United States Patent Application Publication US 2005/0228172 A9 - sequence listing, part 118

SEQ ID NO: 549807 - DNA, 678 bp, Homo sapiens
gcaagattcaaaaagtaatccaaaaaattttcaaaaattaatatatttaatgcaatattttaaaatgaaaattaatgcaaaattcgtgatgaatgaattacaaaagttttaagtagagacagtattttttattttactttttgcctcagcttttactgtggctcggctgggtactggccactttagcaacattgaaataatctgatacaccgattcccacttccatgtacttggttraatgatcagttccaaaagcacctcaaatgaaatctatgtaaatacttcctatcaattctaaaaacgtagggaaaggaatatatttaaatgtatgagttcattgtacaccaaccacaacctaaggcagacctctgggagctggaagctggcatcaggctgaagaagatggaaatgagaaaaggatcaaaagattaaaccggtttcaccaaacagtcaattccaggacacagccagcggtcaaatcccagagtcactgagtttcaaagctgagaatcagtcctggagtcaaagccaagtcgaaatagtgtaaggatcaccatgctccagtaatctcagaagagagtttgttgtgaaaccagcactgcttggcttcctttctagtgactgatcttgtcaattcctaaattaaaaactgcaaacctctcaccatttcctatggca

SEQ ID NO: 549808 - DNA, 572 bp, Homo sapiens
ccagcactttgggaggccaaggtgggtggatcacttgaggtcaggagttcgacagcagcctggccaacacagtgaaaccccatctctactaaaaatacaaaatgttagctgggtgcagtggtacgtgcctgtagtcccagctagttgggaggctgaggcaggagaattgcttgaacctgggaggcggagcctgcagtgagcmgagattgtgccgctgcactctagcctcggcgacagccgctgcactccagcctgggtgacagagcaagactctgtctcaaaaaaaaaaaaaaaaaaaaaaaaaattccatttggaatactctgagtctaatgtgaacaatttaaaaatatttcttctaaaatagttaacaaacaatgcttagagcctaataagctgagacactgtctcggcgctaaagggcttcaagtattctgaatgcttggggtgctcccaaatcttataataagttggttacttcgtgactacaaaacagaagcctcccacggcaattctagaattacttctggccctccagggaatttttttttccaattgatagctaaaaataatg

SEQ ID NO: 549809 - DNA, 1382 bp, Homo sapiens
tcatctgaaatatggagaaaatgcaaatgcttgaatgtgtttatggcgctgttccttaaagcagtgaaatactrgaagcaatataaagggttaatattaggacaatatttaaataaataacaatttatctatttaataatatgctctataatgacaaaaatgatagctatgaatatggtgaattagcagtggaaaaatgctaagtaaagaaaaaaatcaggtatgaaatattacgatgttttaaaatgacacatatgcatatttataaaagcctgagggacatacatagtttttgttgtgttctttgagtttgaggcaactgtttgttataaagtattattattattgtgtaaaacaatttcaaattatttctataatttaaaaatatgtaatgacaaaacgcctaaaatttggggcccaaatcaggtgaatttgtaactaatgtaaataaaatattgttcattgcatttccattattattctttacatgctgtttatgaatatataataggaagttgtcaacatgttaatcctcatgaatttctatatggaataatcttgtttccaatgatgtttaatgcataaatatttacttaaaaagactttttagttcctttgtttgaaagttcttacactataaaacaatttgctttcaatttactttaaccctttctttattaaaagttatttgtaatttctctcttaccatactgaaataaaattcacaggtagtataatatgcctagacacataatttaactataattattataattatctgggtttaattttaatatgaagagaagcagaataaaactaattttaataaagtaatatgcattttaattgaaaataagcataagtaggcaagaagatataatgaaatataaaatatttctgatatttaaaatagcatttaacataaatgagctcacaagccagcctatttgtgtaagttcaggaaaaagacggaacaaaagtatgagtatacactacaataaaactagtgttataataagtgatatatacttatttgtatatgatgaagtaatgagggaaatgaccttagctaatgtattgatattgtgccaagactaattacaaactatagactagagtaaatgaggaagtgtgatacaagctgaaaataatctgggccttaggtgtagtgtcaaaagtattctttatattatgacatagaaaagagtagtgactttcttagatgatttctcctaatgtgaactcccattcaggcagcatacattttagtaactggtacttaaaagatcatggtggacatatcctttgataggcaattataaatagatgatggattggaaaagtaagcatcgatacataacaggttattagaaatgatgata

SEQ ID NO: 549810 - DNA, 627 bp, Homo sapiens
aattcttgagttgaaacaatgagcctcaccaacatgtacagggaggcaggggaagacaaaccccggtgggcactgagaaggagaaagggggagtcaatgggagaaccaagagagaatagtgtcttagagataattggagaagaaaccgcagagagggaaaatttgctaagacttcagaaagattggatatgataaacatctctcctctgtaaaggcccacttttaattatcatgctatcttttgtaggaggtattatatacctgattttatataatttgtaccagggaaattttttagtagcttttacaccatggtagttrtagagaacttttaatgctcatcttatgctgtatttatttatttatttaatgtgcctttgatttggaaaaaaacaacatgtaatcagattaacctttggaagtgactctggaagtgaaagagttaattttttagcatcctgtgtagctctaggggaagcgtgcagagtaaatgaaaaatggagccgtagtcccaactctgtataatctcgaatcatgtgatattctcctggggctgattctaatcaagtttgctgtacaaaaggtcatttccattaccctgtgaggcagatcctaaatagaattatg

SEQ ID NO: 549811 - DNA, 627 bp, Homo sapiens
aattcttgagttgaaacaatgagcctcaccaacatgtacagggaggcaggggaagacaaaccccggtgggcactgagaaggagaaagggggagtcaatgggagaaccaagagagaatagtgtcttagagataattggagaagaaaccgcagagagggaaaatttgctaagacttcagaaagattggatatgataaacatctctcctctgtaaaggcccacttttaattatcatgctatcttttgtaggaggtattatatacctgattttatataatttgtaccagggaaattttttagtagcttttacaccatggtagttatagagaacttttaatgctcatcttatgctgtatttatttatttatttaatgtgcctttgatttggaaaaaaacaacatgtaatcagattaacctttggaagtgactctggaagtgaaagagttaattttttagcatcctgtgtagctctaggggaagygtgcagagtaaatgaaaaatggagccgtagtcccaactctgtataatctcgaatcatgtgatattctcctggggctgattctaatcaagtttgctgtacaaaaggtcatttccattaccctgtgaggcagatcctaaatagaattatg

SEQ ID NO: 549812 - DNA, 331 bp, Homo sapiens
gacaaagtcaacaggtttccatgtcctctggcttcttgttgaattcagccaatggggaggagggaagatggtaagtctggttacttattgccctggctgtagcccctcaaggttacaatatggctcaagactgcygtctctacataagtctcctgctggattcctcccctaattccttccacatgaaaagtgataaaactcctttaccatttctactcctggaaatcaggagtctttgctggacatgactaattattcattatctatgtggtttccctacactcgatgtggttattatctatgtggtttccctacgctctgcccaaacctt

SEQ ID NO: 549813 - DNA, 331 bp, Homo sapiens
gacaaagtcaacaggtttccatgtcctctggcttcttgttgaattcagccaatggggaggagggaagatggtaagtctggttacttattgccctggctgtagcccctcaaggttacaatatggctcaagactgccgtctctacataagtctcctgctggattcctcccctaattccttccacatgaaaagtgataaaactcctttaccatttctactcctggaaatcaggagtctttgctggacatgactaattattcattatctatgtggyttccctacactcgatgtggttattatctatgtggtttccctacgctctgcccaaacctt

SEQ ID NO: 549814 - DNA, 978 bp, Homo sapiens
cttagagaaaagttctgctattatatctaaatacattaaatactagcaagtacctggtatatagcaggctgtcaagaaatgatatttgctttccttatacaaacataaatcttccattttaaatgaaaaataaacagttcatttaacaattaacagtctacttagatatcttcccttgattcaactgagctaccctatttctacctgcagccttcattacaccccagattctagtattaattgaatcctagtcaagggtttaactaagtccccaaaattaattctgtattggttcaacatttttaattagtacctttgcttgtcctgacttactctcttacctgaattccagcaagtagattatgttcctgctctctctttcagttccagcaatggggtcaatttcttctcccaacycataccagattgccagccttcacactgggcccagtatttcctaagcccttgggatgctagtcatggctatgatatccagcaagggtaaccacattcttagtgtctttagaaagcactggatttggccgggcacggtggctcatgcctgtaatcccagcacttcgggaggccgaggcgggtggatcacctgaggtcaggaattcaagaccagcctggccaacatgatgaaaccccgtctctacttaaaaatacaaaaaattagctgggcgtggtggtacatgcctgtaatcccagctactcgggaggctgaggtaggagaattgcttgaacctgggaggcagaggtttcagtgagccgagatcgcgccattgcactccagactgggagacaagagcaagacttcatctcaaaaaaaaaaaaaaaaaaaagcagtactggattctgccagtcttggaccaccaaacccggccccaccaccaccaaaaaaaaaagtcattcttgtcctaagaaggtcaaggaatgtcatgatgaaactgatgtacttgccaccatgtgtcccca

SEQ ID NO: 549815 - DNA, 531 bp, Homo sapiens
caatacattatagtccccatgctgtgcaatagatccctagaacttattcctcctaactgaaacgttgtagcctttgaccaacattctctctttccacattcacaccccacaccccccctctactggtaaccaccatcctactctccatacatagtaggcttcttaagcctaygtatatccaagaatgcctactgtcttatgtatatttcccttccaaagtctgtatctcccagtttacagcattgtggagaagtccaatatcaacctggcttttggccatttaataacctattttccttagactataagccttaatgattttttaatcctttaaattcaaagattttaccaaaatatataccatttcaataataaaaacagccacaaagcaataatacaaatgtctactaaaaagctgagacatgagccctggcagtgtggctccaaaactcatgcacttaaccagtacactataccatttcaagtctgattcagtaatgtgtcttctatatttctgagaatagtttttat

SEQ ID NO: 549816 - DNA, 1137 bp, Homo sapiens
gcagaagagccaacatacaattctcagccactgaacccaaccatgaaagactttacctatatggacactttcagttcttccacccccactccaaaaaggttctgcctaatcccttaccccagactgcaggtcataaagtgtctgtgtgattatgatgttgaacacagcatgggagcggctgctttcttcgttcatgttggtagcagctaccgttcgagacttatttccctcagacatcaatgactcaatatcctaggggcaaagcataaggaaaagaccataagcaaaaacacaagaatgtagtcctgcacaccaggtatatgtattaattatgattcctctgatgcctttgtcaccacccttccatagaaacctccctgccgctcctccattgagcatggtttgagcttccacctcactcaagactttgtaatgtatgaaatgtttccctaattctttccatttcccaattgtcttctttctcagtygagtccctattttctcctttttgggttcctgggatagctaatatttattgagcactccgataatcaataatagcagtgacttgatttaactcttactctcctgtgcttaccaacccgctgatgcctgcctgtctgcctccctcctccaatactgtggctccctgatggcagggttttttccttattccactttgtacacttgctcctagaatgcctagagcctatgggatcttatgaaatatttgctaaatgaactttattttcttgcttttacatacaaggatgctgaagttcgtggaggtcaagcaactttccccaaatccagtaagaggtagagctgggatgcaaatagagcaccctggctcctactagtaagtgacaggataacatcaacacttacctcaaccacactgagctaagaaccagggacctcagtgaaggagctgagttagcacctttagaccaaaaaagtatccattcatttcagaatcgaaacctttttaaaatgatcactgtgctctatttccgattagagcaattctatatataccttgatttaaatggctggagagaatcactgcacagattagttttagccatactaagtctggggtgataatgggccagccacatcccacaaacagcacaa

SEQ ID NO: 549817 - DNA, 700 bp, Homo sapiens
  misc_feature 593, 594, 595, 596, 597, 598, 599, 600, 601, 602, 603, 604,605, 606, 607, 608, 609, 610, 611, 612, 613, 614, 615, 616,617, 618, 619, 620, 621, 622, 623, 624, 625, 626, 627, 628,629, 630, 631, 632, 633, 634, 635, 636, 637, 638, 639: n = A,T,C or G
  misc_feature 640, 641, 642, 643, 644, 645, 646, 647, 648, 649, 650, 651,652, 653, 654, 655, 656, 657, 658, 659, 660, 661, 662, 663,664, 665, 666, 667, 668, 669, 670, 671, 672, 673, 674, 675,676, 677, 678, 679, 680, 681, 682, 683, 684, 685, 686: n = A,T,C or G
  misc_feature 687, 688, 689, 690, 691, 692: n = A,T,C or G
catttgtaatcccagcactttgggaagctgaggtgagaggattgcttgagctcaggagttcaagaccagcctgggcaacatagtgagatactgtttctataaatttaaaaaataaattaataaaaaaatttttaaaaacaaaaaatatatggacctacctcatttttaatggctgcataatatgccacagggtgattattctgtagtaaacttatttatttattattgggcttctcaagtttttcctccatttgacattattacaaataatactgacaatacttgcacatatctcagatatgtcactgcactccataaacagcatgtggctatataatatactgatattatgtttggctcatgatagaaaaagtcatgaatatgatggcagttatttgttcagaataatatgaaattttgtctttcataatttctgagaattttgttaagggaaaaataagagctcagtcagagacytctaattcatctgccctcagcaattcctattcactttctgcctagctacctgcttgatacaaagagctgtaatttttttcttttttctttttttacttggagtttcactcttgttnnnnnnnnnnnnnnnnnnnnnnnnnnnnnnnnnnnnnnnnnnnnnnnnnnnnnnnnnnnnnnnnnnnnnnnnnnnnnnnnnnnnnnnnnnnnnnnnnnnnttacaggc

SEQ ID NO: 549818 - DNA, 633 bp, Homo sapiens
ttttatctctatgctatgtttttagcacattatttttattattaatgtttttaaatygcactcatatatttctattttggccacttttattttgcatggaaattggtagaccctttggatctttaatatttctttagtatatttttgacagtatagtgtttatttcttctatttattcattttttctttcttttctgctttttctctatagtctcctttttgaaatcccactatatagatattaaatattctggatttgtactctgaatatcttgaattttctcatacttttcaatgctttatctttttaccattcattgtggaggattaccttctatctctaattgccttttcattgtgcccattctattcttaaaccattccttttttcttacttattttgctaatcaaataatttaatttcattatcactaattatttctttgatagcatatctgtcttattttatgaatgcagtatctctttgaatgactctaagtattacagttattccttttttcccctttataaatttatctcctcaaaagtttttgtaagttttatgcctctttatcacaatgctggttttcctcaagtgctttgtgatgtttctaggctagtattaggtctgca

SEQ ID NO: 549819 - DNA, 691 bp, Homo sapiens
ccatcctggctaacacggtgaaactccgtctctactaaaaatacaaaaaattagccagacgtggtggcaggtgcctgtagtcccagctactcaggaggctgaggcaggagaatggcgtgaacccgggaggcagagcttgcagtgagccgagattgcgccactgtactccagcctgggcgacagagggagactccgtctcaaaaaaaaaagagaaaaagaaatttctgggtcacatggttaactctatgtttaatttttgaagagctttcaaagtgttttctaaagwgctgcaccatttcacatttgcccagcaatatatgagggttccaatttctccacatcctcaccaacacttgttattgtgtgtcgttttcattatagttatcctagggtatatgaagtggtatctcactgtagttttgatttgcattcccctactgattaataatattgaacatcttcttgtgtgcttattggccagttccaatttatttttaaaggttatgtgagcaaacacatctgggcaatgatatactaaaatgttagtagtgcttctgtctagaagatataatttcttattttctactgtgtttctctatcaatcaacgttctaccagagggaaagaaccagtaggatagacagatggatagataggtagataggtaaattgtaaggaattggctgatacag

SEQ ID NO: 549820 - DNA, 855 bp, Homo sapiens
acacctaatgcatgccaggctctgttcctcctcttcaaatgcccttcaagggtgtaaaatctagtagtagaagacagacaaaacaagtgcacacccattgctctaaaatatagcagaatagccaaagaagggcagatcctgccctgttgagaaaatttaaaaagcttcagggaagaaagggcatttgattttaatcttgaaaaacaggtgggataagcagagattcacaggtgggtgatcaggaaatccagatggaagtcgtcaagtaattatatgagcaaggacattaagaggagaaagyatgggccatagccagaaaacagctggaacattggtttgaatggagaagaataaaagatgtaattagaagggtatgtttgtgtcaaatagaggacttggaagccaaactgaaaaataatggaggaccacagaagcagaggaaacaaaatcagttctgagtttagaaacaagtcaggtggtggtgtgtaggctggaatgacgagggaaattctgaactcttgtgatgggagatgaggaaggaggatttgcccgtcatccctgctacaggtaggaaggcctatgctcagggagtgaacacagaaatgaaaatcagagaggcgtgcccaaggtgctaaatgtgggctgaaagagaaaaaggagtagtcccgaataactcagaggtttcatgcttacgactggagaatgttccccgattacagcttattatcatctcacatatatcaaatgaccttgctttgtgactcaagaaatcacagactcataatactctgtggctggaaagcatctcagagatcccagagagagggcgactgagaactggccaagttaaatact

SEQ ID NO: 549821 - DNA, 490 bp, Homo sapiens
ccaaaataatctgggaaatcatcatcattttggtcaaaattctaacatgataatgtggaagggagctttttttttttcttttgagacacggtcttactctgttgcccaggctggagtgcagtggcatgatcactgcaagctctgcctcctgggttcatggcactctcctgcctcagcctcctgagtagctgggactacaggtgcccgccaccacatccagctaattttttgtatttttagtacagacggggtttcactgtgttagccaggatggtctcaatctcctcacatcgtgatccgtcagcctcggcctcccaaagtgctgggattaaaggcgtgagccaccgcrccccaccctggagcattttaaaaaatatttaaatgcatgatacaaaggtggcatctcaatggtgattgggtaaagataatcatataaataattgtgctattataattatgatgaatggtattaagaaaaaatacagattgg

SEQ ID NO: 549822 - DNA, 1506 bp, Homo sapiens
acaaatgtatatacctgtgcagctaactaaccaatcaagatatagaacattcccatcattccactaagtttccttgtggtacccctcacaaaattctttctttgatttctatcactacagattaatttgtttcctcttcaagaattttatagactcttgtgtctggctttttttgttttaatttacattgaaggactaatgtctggcttcttttgctcagcacagttttgaaaatcattcatgttgttgtattagtaatgtattccttttaattgctgagtagtattccatttatccatgtgggtggacacttggattgtttccagattgaggccattattaataaaactactgtaaaaattaacatcaagtttttgtgtagacatttgctttcatttcccttagttaaacaaaagtcttgggttatatagtaagtgtggatatacctttacaataaactgtcaaactgctttccactaattagagttttaagacaacattttaactaaaaaactggatcatccatcatttgcatacatagtagtccccccttatccttaggagttatgttccaagacctccagtggatgcctgaaacctcagacagtaacaaaccctatatataccaggttttttcctatacatacataactatgataaagtttaatttaattgagattaagttaacccagcacaatatgttgccatcaattggaacacatttttgttcatatcttccacccataaatttaatgtcttttcaatcataactgaacaccgtgctctatggtagtaacttttgcaatttaaggtgcaacagtaacactagcataaatttctttttcattcttcacaatttcatggataggaaactgattcttaccacagatcttagcaacttcagcatatgatttttttttcttattaatttgagaactttcacctttttgcttaaaggaggaactttacagcttctctttggcatatctgaattgtcagcaccactactcttaagctttgggggcattactaataaaataagggttctttgaacacaggcgctgtggtatcaccaacagtcgatctgacaaccaagaaggttactaactgaactaccagatgggtagtgtatatagtgcagataaactgaactcaygtccctagcaggatggagcaggacagtgagatttcatcatgctactcagaatggcacgcaatttaaaaattaaaagttatttctggaattttccacttaatgttttcaaaccacagctgagtacaggtaactgaaattgccttaagcaaaaccgccaataaggggtaactactacaccgtattttggtttatcaaatcaatggcttcacagagtcagtgatttagatataaaaaatgcaaaaagaaatacactggtatattatcacttatccaaatataatcataatagtgtccagttttaggagtcagtcttttcttttcaacaggctagtgtggaaaaaggtatgtga

SEQ ID NO: 549823 - DNA, 577 bp, Homo sapiens
tgcctgtgatgaaggggagacagaacattgcttcttatccctgccttgggctaggcttgtccttggtaaggcagagtatatcagcagcctgattgggcagcttcttcctcatagagctggcagtgattttcatttccagccctcgcgctggacagcacttagaaaatgtctgctgacttgactcaccttcactaggagatcacaccttgggaaaygtggagatgccccagagtgtggataaagggttggaaggagtgagggagaagcatcttgagaggattgggactctccacctaatagatttccccaaacaccaatccatttgccttttgccatctcatttttaagaagattttcaaatttcttgatatattttagtggagtgaggagtagaagtatggattaagagtgagaataaatgtattttaaaaagatgtgtctatagaaaaaagactatttaaatgaaaaaacaggaatcctggctctttaaaatctagagctatatccctctgtgagtgtgagctactgcttggatgaaagtcaatctgctgtagcagaaagtccacagggttggatg

SEQ ID NO: 549824 - DNA, 728 bp, Homo sapiens
ctcagcctaatttttgttttaaataaaattcttcttcactcccctctttttttttctttttttctttctttcctttcctttctttctttctttttttttttttttttttttttgacagagtctcactctatagtccaggctgtagtgcagtggtgccatctcggctcactgcaacctctgctgcccaggctcaagcacttctcctgtctcagcctctcgagtagctgtgattacaggcgcctgccaccacacccagctaatttttgtatttttagtagagaaggggtttcaccatcttggccaggctggtcttgaacttctgacctggtgatccacctgcttcagccccccaaartgctgggattacagcctgagccaccgtatccggccttcactcccctcttgtagtcttttttacatctggttactttggtgaattctctccagcctggacaagtgacctgtgacctctgaccattcacactgaggctaatattcagcctaattttggttttaaataaaattcttcttcactcccctcttgtagtctcttttacatctggttactttggtgaattctctccagcctggatgagtgacctgtgacctctgaccattcacactgaggctaacatatgtgggcagatggaggcccttagcttccatcttcccactgtccagaatcacctgctgacatgaagatgcctcatcaggtggatcattatgtg

SEQ ID NO: 549825 - DNA, 728 bp, Homo sapiens
ctcagcctaatttttgttttaaataaaattcttcttcactcccctctttttttttctttttttctttctttcctttcctttctttctttctttttttttttttttttttttttgacagagtctcactctatagtccaggctgtagtgcagtggtgccatctcggctcactgcaacctctgctgcccaggctcaagcacttctcctgtctcagcctctcgagtagctgtgattacaggcgcctgccaccacacccagctaatttttgtatttttagtagagaaggggtttcaccatcttggccaggctggtcttgaacttctgacctggtgatccacctgcttcagccccccaaaatgctgggattacagcctgagccaccgtatccggccttcactcccctcttgtagtcttttttacatctggttactttggtgaattctctccagcctggacaagtgacctgtgacctctgaccattcacactgaggctaatattcagcctaattttggttttaaataaaattcttcttcactcycctcttgtagtctcttttacatctggttactttggtgaattctctccagcctggatgagtgacctgtgacctctgaccattcacactgaggctaacatatgtgggcagatggaggcccttagcttccatcttcccactgtccagaatcacctgctgacatgaagatgcctcatcaggtggatcattatgtg

SEQ ID NO: 549826 - DNA, 1247 bp, Homo sapiens
  misc_feature 738, 739, 740, 741, 742, 743, 744, 745, 746, 747, 748, 749,750, 751, 752, 753, 754, 755, 756, 757, 758, 759, 760, 761,762, 763, 764, 765, 766, 767, 768, 769, 770, 771, 772, 773,774, 775, 776, 777, 778, 779, 780, 781, 782, 783, 784: n = A,T,C or G
  misc_feature 785, 786, 787, 788, 789, 790, 791, 792, 793, 794, 795, 796,797, 798, 799, 800, 801, 802, 803, 804, 805, 806, 807, 808,809, 810, 811, 812, 813, 814, 815, 816, 817, 818, 819, 820,821, 822, 823, 824, 825, 826, 827, 828, 829, 830, 831: n = A,T,C or G
  misc_feature 832, 833, 834, 835, 836, 837: n = A,T,C or G
cagcaaacaggaaggcatctcagttcaacgtattgggacatcctctgaagatgattctactagcactcatttcagaagccctgtgtgaatgcaaaggaattgttaaacaatgaagcgatcccacagcacctgcatccctactataacttaaaaaccacccacacacccgatcccratgtttaaataacaagccactggtatgtctaggacacctgcacaaaggagatgtaaacccacagcttctagcacaaaaatctgccaacttaacatccctgtcacctgcaactgatggcgggtgagattgagcaaccacctaaaaatatcattcctacaaatttagtgtcattaaaaacaaaaataacaaacacacttactttgacagtgggcggtatcagtgttttttgtcaccaaggcacaagggagttttatcaatgaaccttgctattttgaaaccacaaaaattagtggtggttcattaacataataacatggtaaggggttctcaaaagcacccccagtatgctcttaacaagcatatacatcccccaggaagatgaggcaatgcttcctgggggttataatttaaatatgctaaaatgcacagatcttcagccattaacacaactgtctacacctgtctacctaccacccaaaacaaaatatagaacatttccattatcccagaaagccctcccggcctttttcattcaatctccaccctcaataggcagttccctnnnnnnnnnnnnnnnnnnnnnnnnnnnnnnnnnnnnnnnnnnnnnnnnnnnnnnnnnnnnnnnnnnnnnnnnnnnnnnnnnnnnnnnnnnnnnnnnnnnnaatctccacctcaatagcagtgtcctgccctgcctgctatcactatagctaagttttgcctgttctcaaacttcatatgaatgaaatgacagagtacagttctgttgaatctggcttctttcactcaacatgatgtctctgagatggatccatgctgttgcacatatctgtaattcattctttttagttttggaatcgtattccattgcacgaatagatcacaatttgtttatccggtctcttgttgatggatgtttgggttatttccagtttgggcctattattaagaataaggctgctatttacaagcttctacaagtctttttttgcgtgtggacatatgtttccagttcttttgggtcaacacctgggagtggggttgctctatcatacaggaagagtgtgattag

SEQ ID NO: 549827 - DNA, 1247 bp, Homo sapiens
  misc_feature 738, 739, 740, 741, 742, 743, 744, 745, 746, 747, 748, 749,750, 751, 752, 753, 754, 755, 756, 757, 758, 759, 760, 761,762, 763, 764, 765, 766, 767, 768, 769, 770, 771, 772, 773,774, 775, 776, 777, 778, 779, 780, 781, 782, 783, 784: n = A,T,C or G
  misc_feature 785, 786, 787, 788, 789, 790, 791, 792, 793, 794, 795, 796,797, 798, 799, 800, 801, 802, 803, 804, 805, 806, 807, 808,809, 810, 811, 812, 813, 814, 815, 816, 817, 818, 819, 820,821, 822, 823, 824, 825, 826, 827, 828, 829, 830, 831: n = A,T,C or G
  misc_feature 832, 833, 834, 835, 836, 837: n = A,T,C or G
cagcaaacaggaaggcatctcagttcaacgtattgggacatcctctgaagatgattctactagcactcatttcagaagccctgtgtgaatgcaaaggaattgttaaacaatgaagcgatcccacagcacctgcatccctactataacttaaaaaccacccacacacccgatcccaatgtttaaataacaagccactggtatgtctaggacacctgcacaaaggagatgtaaacccacagcttctagcacaaaaatctgccaacttaacatccctgtcacctgcaactgatggcgggtgagattgagcaaccacctaaaaatatcattcctacaaatttagtgtcattaaaaacaaaaataacaaacacacttactttgacagtgggyggtatcagtgttttttgtcaccaaggcacaagggagttttatcaatgaaccttgctattttgaaaccacaaaaattagtggtggttcattaacataataacatggtaaggggttctcaaaagcacccccagtatgctcttaacaagcatatacatcccccaggaagatgaggcaatgcttcctgggggttataatttaaatatgctaaaatgcacagatcttcagccattaacacaactgtctacacctgtctacctaccacccaaaacaaaatatagaacatttccattatcccagaaagccctcccggcctttttcattcaatctccaccctcaataggcagttccctnnnnnnnnnnnnnnnnnnnnnnnnnnnnnnnnnnnnnnnnnnnnnnnnnnnnnnnnnnnnnnnnnnnnnnnnnnnnnnnnnnnnnnnnnnnnnnnnnnnnaatctccacctcaatagcagtgtcctgccctgcctgctatcactatagctaagttttgcctgttctcaaacttcatatgaatgaaatgacagagtacagttctgttgaatctggcttctttcactcaacatgatgtctctgagatggatccatgctgttgcacatatctgtaattcattctttttagttttggaatcgtattccattgcacgaatagatcacaatttgtttatccggtctcttgttgatggatgtttgggttatttccagtttgggcctattattaagaataaggctgctatttacaagcttctacaagtctttttttgcgtgtggacatatgtttccagttcttttgggtcaacacctgggagtggggttgctctatcatacaggaagagtgtgattag

SEQ ID NO: 549828 - DNA, 1247 bp, Homo sapiens
  misc_feature 738, 739, 740, 741, 742, 743, 744, 745, 746, 747, 748, 749,750, 751, 752, 753, 754, 755, 756, 757, 758, 759, 760, 761,762, 763, 764, 765, 766, 767, 768, 769, 770, 771, 772, 773,774, 775, 776, 777, 778, 779, 780, 781, 782, 783, 784: n = A,T,C or G
  misc_feature 785, 786, 787, 788, 789, 790, 791, 792, 793, 794, 795, 796,797, 798, 799, 800, 801, 802, 803, 804, 805, 806, 807, 808,809, 810, 811, 812, 813, 814, 815, 816, 817, 818, 819, 820,821, 822, 823, 824, 825, 826, 827, 828, 829, 830, 831: n = A,T,C or G
  misc_feature 832, 833, 834, 835, 836, 837: n = A,T,C or G
cagcaaacaggaaggcatctcagttcaacgtattgggacatcctctgaagatgattctactagcactcatttcagaagccctgtgtgaatgcaaaggaattgttaaacaatgaagcgatcccacagcacctgcatccctactataacttaaaaaccacccacacacccgatcccaatgtttaaataacaagccactggtatgtctaggacacctgcacaaaggagatgtaaacccacagcttctagcacaaaaatctgccaacttaacatccctgtcacctgcaactgatggcgggtgagattgagcaaccacctaaaaatatcattcctacaaatttagtgtcattaaaaacaaaaataacaaacacacttactttgacagtgggckgtatcagtgttttttgtcaccaaggcacaagggagttttatcaatgaaccttgctattttgaaaccacaaaaattagtggtggttcattaacataataacatggtaaggggttctcaaaagcacccccagtatgctcttaacaagcatatacatcccccaggaagatgaggcaatgcttcctgggggttataatttaaatatgctaaaatgcacagatcttcagccattaacacaactgtctacacctgtctacctaccacccaaaacaaaatatagaacatttccattatcccagaaagccctcccggcctttttcattcaatctccaccctcaataggcagttccctnnnnnnnnnnnnnnnnnnnnnnnnnnnnnnnnnnnnnnnnnnnnnnnnnnnnnnnnnnnnnnnnnnnnnnnnnnnnnnnnnnnnnnnnnnnnnnnnnnnnaatctccacctcaatagcagtgtcctgccctgcctgctatcactatagctaagttttgcctgttctcaaacttcatatgaatgaaatgacagagtacagttctgttgaatctggcttctttcactcaacatgatgtctctgagatggatccatgctgttgcacatatctgtaattcattctttttagttttggaatcgtattccattgcacgaatagatcacaatttgtttatccggtctcttgttgatggatgtttgggttatttccagtttgggcctattattaagaataaggctgctatttacaagcttctacaagtctttttttgcgtgtggacatatgtttccagttcttttgggtcaacacctgggagtggggttgctctatcatacaggaagagtgtgattag

SEQ ID NO: 549829 - DNA, 1247 bp, Homo sapiens
  misc_feature 738, 739, 740, 741, 742, 743, 744, 745, 746, 747, 748, 749,750, 751, 752, 753, 754, 755, 756, 757, 758, 759, 760, 761,762, 763, 764, 765, 766, 767, 768, 769, 770, 771, 772, 773,774, 775, 776, 777, 778, 779, 780, 781, 782, 783, 784: n = A,T,C or G
  misc_feature 785, 786, 787, 788, 789, 790, 791, 792, 793, 794, 795, 796,797, 798, 799, 800, 801, 802, 803, 804, 805, 806, 807, 808,809, 810, 811, 812, 813, 814, 815, 816, 817, 818, 819, 820,821, 822, 823, 824, 825, 826, 827, 828, 829, 830, 831: n = A,T,C or G
  misc_feature 832, 833, 834, 835, 836, 837: n = A,T,C or G
cagcaaacaggaaggcatctcagttcaacgtattgggacatcctctgaagatgattctactagcactcatttcagaagccctgtgtgaatgcaaaggaattgttaaacaatgaagcgatcccacagcacctgcatccctactataacttaaaaaccacccacacacccgatcccaatgtttaaataacaagccactggtatgtctaggacacctgcacaaaggagatgtaaacccacagcttctagcacaaaaatctgccaacttaacatccctgtcacctgcaactgatggcgggtgagattgagcaaccacctaaaaatatcattcctacaaatttagtgtcattaaaaacaaaaataacaaacacacttactttgacagtgggcggtatcagtgttttttgtcaccaaggcacaagggagttttatcaatgaaccttgctattttgaaaccacaaaaattagtggtggttcattaacataataacatggtaaggggttctcaaaagcacccccagtatgctcttaacaagcatatacatcccccaggaagatgaggcaatgcttcctgggggttataatttaaatatgctaaaatgcacagatcttcagccattaacacaactgtctacacctgtctacctaccacccaaaacaaaatatagaacatttccattatcccagaaagccctcccggcctttttcattcaatctccaccctcaataggcagttccctnnnnnnnnnnnnnnnnnnnnnnnnnnnnnnnnnnnnnnnnnnnnnnnnnnnnnnnnnnnnnnnnnnnnnnnnnnnnnnnnnnnnnnnnnnnnnnnnnnnnaatctccacctcaatagcagtgtcctgccctgcctgctatcactatagctaagttttgcctgttctcaaacttcatatgaatgaaatgacagagtacagttctgttgaatctggcttctttcactcaacatgatgtctctgagatggatccatgctgttgcacatayctgtaattcattctttttagttttggaatcgtattccattgcacgaatagatcacaatttgtttatccggtctcttgttgatggatgtttgggttatttccagtttgggcctattattaagaataaggctgctatttacaagcttctacaagtctttttttgcgtgtggacatatgtttccagttcttttgggtcaacacctgggagtggggttgctctatcatacaggaagagtgtgattag

SEQ ID NO: 549830 - DNA, 493 bp, Homo sapiens
tgaatgcttttgttcattcctctcatcaaacaagggaagtttggggagagagttttgatgggaaatcattaggcatccaccttacagttctgatttggctccttctgattttctttttgttcctaatcttaaaaagtctttaaaggcacccacttttctttagttatagtgtaaaaaagtgctctcaagtrgggacatgtttcactaacccaggactacagttctttaaggatggactaaatgattggtgtcatcacttacaaagttgtcttgagcttgatggagcatatgttgaaggtaaagtttatactttttgtttttatcttttaattttattttcccattaactttctgaaggccctttgtatattatatacatattattatatacaattgcttttaaaatcagtgaagagaagaaaggagaaaaaaattgcagttaaactgtcttttataatggcataattattttactgttgctctttgttatttt

SEQ ID NO: 549831 - DNA, 493 bp, Homo sapiens
tgaatgcttttgttcattcctctcatcaaacaagggaagtttggggagagagttttgatgggaaatcattaggcatccaccttacagttctgatttggctccttctgattttctttttgttcctaatcttaaaaagtctttaaaggcacccacttttctttagttatagtgtaaaaaagtgctctcaagtagggacatgtttcactaacccaggactacagttctttaaggatggactaaatgattggtgtcatcacttacaaagttgtcttgagcttgatggagcatatgttgaaggtaaagtttatactttttgtttttatcttttaattttattttcccattaactttctgaaggccctttgtayattatatacatattattatatacaattgcttttaaaatcagtgaagagaagaaaggagaaaaaaattgcagttaaactgtcttttataatggcataattattttactgttgctctttgttatttt

SEQ ID NO: 549832 - DNA, 521 bp, Homo sapiens
ttgaaaataatattatttacaaattgaattctcttggcatggaatagattttgaggtattaccttactttttcacctgatgctacccctaatttctttaaacatctatttatttccattaatcatttctggcctcatagctcaggctgcttggccaggccttcccctgaggcacccattttaacacagactggtgtatagagcccagaccagaggcactctctaatctccatgtgcattagccagggtagaccaagtactgtaacaaacagcctcctacatctcagtggcccaacacaatcaaagtttatttttctcttaycgtagtcccatgtgaatcggtgggggaagggatgttccatgcacgtactcaggactcagtctccttccagcaagaggctcttctgttgcctagggctttatagtcctcttttttcccttagctgctgaccagacccagatggtcgggtctgctgtccccaagggcttattgtccttcactagatcttctggatctggcca

SEQ ID NO: 549833 - DNA, 576 bp, Homo sapiens
cattagcagatggattagtacgagtaaacatactctttgtaaatcctgcactgtgttcttgatatgcaaacacaacttcaagacaaccccctgacccagctgccactcaatgggtgctctaactcctcccatctagcawtcttggagccatctctgaatgaaataaccagaacatgaatttcattccagcactcactgggtggtggtcatttttgtttggttggttgtgacgtttcagactttctccgcaagtagttaaaaactgacttgcactagttccaaggacagattatctcctgttggatgggcttgaaggccattcgccgagctggcagttgtggaggaaaaacggttaatttcgcaaagctacaaaggtccgtcccagctcttactccacacaccccgcggaacactcgcccccgtccggtcctctgtagtccgagcgcccctcccccgcctcctggttctcccttttccagccaccacccaagccccgaggctcgcgcacgccctccccgtccacccgcgttccgagggtctgcggggctatctgtggaggacagggcccctctctaa

SEQ ID NO: 549834 - DNA, 1346 bp, Homo sapiens
aggctgacaattcacaattctttcacttggtcaagtttctaatatatttttgtttatttttatttatttattgtcaacacctcaaaattgggatatttcacaaagaagagtcagatttctagcttttattgaaaaactaggagatctggccatactgggcccatacttgcaggcaaaacaaccagctaaactgagcagtggtagctgctcccttgatgcagcgtctgagcgctcctgtttgccatagctgccaccactccatactgcttccaacagtgatgctgagtgccagtaagcatatatctttgcacctaaagaaacatttatttgtacttatggctctttcaagtgtggraatataaaaaatgaacttatgagacctatgtttttccagaaaaaaaaaaaaggaagccagagaatgctctgatgtgcttaataggacaacagatgtccaaacatctcacccctactggcaagacctcattgcgcacggactagtaacagtaaaacttcttcagtgaaggctgagcaggggatgaggttggggagccaaatttgagtcttgacagaggaacacagcctgagcaaggaggtggccaaggaagctgcatcacagtgaccgaatggctggggagaagcacctctgtgaaacggatgagacgaatccgtgaatcaatccttgaaagtcagatgggcattaattgaacatgctgatcacttctaatcttagctactaagcaggaagcctcatccttgcacagaactgaatttgatgtgtcaagaaaagaaaggcaaccggtcaaccccggagtgagccacctactagcctatttgaaattgagatgctttaaacaacacagctggaaggcagagggaaatgcaaaaccaaaggaaagtccatgtgctttgcagctgggtcatcaaagagaattcctgtggctgccaaaaagaaaaatggaggaaaagaaaaaagcctaagtcaacccccgtctccctccaaaataaaacaagcagtgtgtccatttttcaatctgggcagaccacttccctagggtaagaacataacacactttgtcactcacggaatgtgacaggaagagggggagggaccaggccccaggagtcagttttagtttccaccctgtcccaaggcaggggacagaaagaaccacgcctttatacacaaacatcctggacagatcaaagtagagtcatagattttatttaattaaaatagattaaaaacagactgtgtaaaagaattagaattctcaataatttactattatttacattagcaaatgtcggtcgttagtagacactgagcagagaagcttgaagaacgg

SEQ ID NO: 549835 - DNA, 1373 bp, Homo sapiens
tctcagctactagggaggctgaggcaggagaatcacttgaacctgggaggcggaggttgcagcgagctgagattaagccactgcactccagcctgggtgacagatcaagactccatctaaaaaaacaaaaacaaaaacaaaaaccagcacaagcaaagagaaaaggaaaaggcacagcaaacagacgtgctgtggcggtttccaatgcttccaccacacagaagcccccagttaaaacagcaactaaatgtgctataatttcactgaggggcggatgaggaggggagacttttcctcattgtcagcacaagttgtaacaaccccatcgccctctgccagaggtggagaaattgggctcatcatcgtctatctatgtttcccaaggttctgagtagttcatctgtcatgatcccaaactcctccaacaggtcttggcgatgtgattcatgtcatttctgattcatccagggatgatgtctgtcttttccatttctcccgtggtactcagtcctgtaacaatacacttgggaagttttcttctttgtgtttccaaaacccctgttgcttgccgcagagaaagccaatggtggagacaatagtattgcccaggaaaaaagctttaattgggcgttgcagccaaggagatgggtaatctgtctcaaatccatttccttgaccaactaaactactaaaactagagatttgtgtaggagggaagaaatgttacaatgtgtaagaaaacaagaactagggaggggcaaggtagcaatcatgataaatgaggggtctggcatctcattgtggtgatctggtgagtttcagttctttgatactttttttgaggagcctgagcatcctttcctgagaaaggaactcagataaaacaaattaagtttcaagctttatcaccagaagggtcaatttctatgtttatatatatatattaaaaaaaaatctatgggactattgggtgcctacaagagtataacacattctaccagtgaaggctcaggtgcagaataaagccttcattgatagctgtgatctgtgatttaaggcaggaggctacttccaggactattcttcaatggttcaggcttttaggttaccttctgcrtgctaaagacttcgtatcttttagaacatgaagggacagagccagaaaatatctcatgtttcagtgagacattgaaagttcatattcacagtgaaagaatctggcccattttactggttcattgatctcatttttctagtgatttttagatcaaggctcttgacctttaagataatgatttgttggtagatcctaaaacccccaaacctggtgtgcgtttttttctttcccacagcagagacacctgaacatttat

SEQ ID NO: 549836 - DNA, 1503 bp, Homo sapiens
ctccctctcagtggtaatgggggagctttgggggtgttctgcataggctgttcccactaacagatgcctcttacctgttttccaaatctagagcctcctgtcatcacttctgagccccccatttcttttcttaagatagccagaagcagggggtgttccacagggggcacacatcctggttgaccctggatagtttgaagggggtgccactgagggacattagacggtgrggagaagacatggtgtgggtcggggtaccatgtggaaagaagattgtgggaggaaatgagaattagggacctcagtcgggaggccacaggccaggggagggaggatggtgatgatggaaacccaagattcagaatatatacttggaagcagatttggtgattaaagaatcaagggtgatgtttagatttctgacttgagtgtggtgtggacggcggtggtatttaatcagctggagaaaactgaggaaggaagagatatgtgttaggcgaggtggcatccacagttccgtgttgaatattttaatggtgagaagctctatcagtgacggtccaagcaggaaaacggagctttcgccaggcagttcaatcagggaatataatatgcaaaaaaattccagaggtgctgggggagctgagcaggagatggggaaagaaagatccgaagattgctaatggcaggaatctgctccaccctaggttggaggaatagggacagcctgggagctgggctgcccagtgggagctgggatgcagagaaggggctacccaggggcctcccaggctggaactggaactggaattgtggagggacaaactctggaagccaataaacagccactggcagagacaccacagatcagaggagtgggaagaaatacccaggcttctcctcttctccctcctaccagcctccagccagtgactgctattggtctaacctgacaggaagccagcaggcagggagcctgggaaatgtagtttgtgggggcagcacactgtgatccattgcagagcaggggaagggggcaggcgcacaggatcctcacagatgccaccaaaaatcactctgagtttgacaagtcttcctccaggagtatctgtattatttttatttttattttttattttcatttttgagacagagtttagctctgtcaaccaggctggagtgcactggcacaatctcggctcactgcaacctccggcccctgggttcaagtgattctcctgcctcagcctcccgagtagctgggattacaggtgtgtgctaccacgcccggctagtttttgtatttttagtggagatggggtttcaccatgttggccaggctggttttgaactcctgacctcaggtgatccgcctgcctcagcctcccaaagtgctgggattacaggcatgagccaccgtgcctggcccaggagtatctgtatttctaacaagccctattcaaaaggataaatctataatgaggagattcgggtatcagggac

SEQ ID NO: 549837 - DNA, 527 bp, Homo sapiens
gacatttattaggtgacgtaaaatattatagttccacaaggcaggtcattatttgargttggcaagagtaatttcttcatattagtcagttttctattttcccaaatgtgttttaacctgaaacctctgaaatcagtgcagaatttcaaattgagtagtttttttttcctggtaaaatactctttttcatactcaatgagtttcacaggatggactgcattttattttctgaacttaaaagtaaaaaacattactctgtcctgagaaattttccttctagttccttgttttggtgaaatttttttctagctgttctcttttcaatggtgttctgaaggatcatcggccttagcatcagccttaacaatggtgcagaagaatcagatctgacatagagtgcaaccaattaacagcaaaaaaaaaaaaaaaaccctctaaaaacagcaaaacctactggcatgggtcacaaccttatatattccgtatcttattaccatttaatatacatccagatgaggcaaataagc

SEQ ID NO: 549838 - DNA, 1458 bp, Homo sapiens
ttccagggaaaccatttccctggggcagaggtatggttcctccagacatgcagtctgcactttgaataaaagtacatttttatcactggcggaagccttgcaggaaaccccaggacacagcaaaagacctaaagctaaaaaaatcaataatcaaggatttacaaagataggtgaaatttaatcaaacaccctagcagtgattgtgtgagtgaatctgaacactgccttgatcaatttggcttgagtttcttactactgaatataacaaaatattaatttttattccttgaacaaaactgatggccagggcaggattctgctcatgtctgaggcaggagacagagcacaggacgtatcccttggagaaagggcacattctttcttgcattagatagctttctttctttaatgatgacattattgcagtttgcagatatactttaaggaatatacaaaaattagatatagcagcaaatatttcataagaatgagaaaaggaattatcatttaaaaaatgattaatactacaaacatcacacaacccagacacttgcgctagtgaaggactgtaaaacttaaactttaatatcttcrtggaaagtcccctgttctttgtcattacagagctgcagagggaattacagtggttgttaccagaggctggactgggggcttggtagatggggaaagaaaggaaagatgttggtcaaaaggttcaaagttttagttaggaggagtaaattatattcatcttttgcacagcatggtgattggagttaatcaataatgtatatttcataatagccaaaagagaggattttataatgctttcaccacaaagcaataaatattttgggtaatggataggctaattagcctgatttaatcattccacaatgtttacatgcttggaaacaccacatggtacccagtaaatatatgtatacaactattagttctctgtcaaaaataaataaaataacacagccataatcaggtccttaaaaccatagaactcccttacccttatattattctgggtgatatgatggttctccctcaaagaagtctttgtaaactgagtattagcagggagaaagttgtccttccagacttgctctacactagctgccacactgattccctcagaaggccacagctgtggcatttcctaggctcatacagcattcgtctactctaacacattttctggaataagcagggcttcttctacctcccccaatcctcttccttgtattgttgctcagctggtgtacccatttttttctccccagacttccgccaccgaacacacgcaagtgtacaaatgtatttaagacaatgagcatttcgaaacttaattgagatagagtggacttttcgttaatctggaaatgtgaaggattcaggcatgtggtcttatctacaccccaaatgataaatccagagaatgttgtg

SEQ ID NO: 549839 - DNA, 1458 bp, Homo sapiens
ttccagggaaaccatttccctggggcagaggtatggttcctccagacatgcagtctgcactttgaataaaagtacatttttatcactggcggaagccttgcaggaaaccccaggacacagcaaaagacctaaagctaaaaaaatcaataatcaaggatttacaaagataggtgaaatttaatcaaacaccctagcagtgattgtgtgagtgaatctgaacactgccttgatcaatttggcttgagtttcttactactgaatataacaaaatattaatttttattccttgaacaaaactgatggccagggcaggattctgctcatgtctgaggcaggagacagagcacaggacgtatcccttggagaaagggcacattctttcttgcattagatagctttctttctttaatgatgacattattgcagtttgcagatatactttaaggaatatacaaaaattagatatagcagcaaatatttcataagaatgagaaaaggaattatcatttaaaaaatgattaatactacaaacatcacacaacccagacacttgcgctagtgaaggactgtaaaacttaaactttaatatcttcatggaaagtcccctgttctttgtcattacagagctgcagagggaattacagtggttgttaccagaggctggactgggggcttggtagatggggaaagaaaggaaagatgttggtcaaaaggttcaaagttttagttaggaggagtaaattatattcatcttttgcacagcatggtgattggagttaatcaataatgtatatttcataatagccaaaagagaggattttataatgctttcaccacaaagcaataaatattttgggtaatggataggctaattagcctgatttaatcattccacaatgtttacatgcttggaaacaccacatggtacccagtaaatatatgtatacaactattagttctctgtcaaaaataaataaaataacacagccataatcaggtccttawaaccatagaactcccttacccttatattattctgggtgatatgatggttctccctcaaagaagtctttgtaaactgagtattagcagggagaaagttgtccttccagacttgctctacactagctgccacactgattccctcagaaggccacagctgtggcatttcctaggctcatacagcattcgtctactctaacacattttctggaataagcagggcttcttctacctcccccaatcctcttccttgtattgttgctcagctggtgtacccatttttttctccccagacttccgccaccgaacacacgcaagtgtacaaatgtatttaagacaatgagcatttcgaaacttaattgagatagagtggacttttcgttaatctggaaatgtgaaggattcaggcatgtggtcttatctacaccccaaatgataaatccagagaatgttgtg

SEQ ID NO: 549840 - DNA, 1458 bp, Homo sapiens
ttccagggaaaccatttccctggggcagaggtatggttcctccagacatgcagtctgcactttgaataaaagtacatttttatcactggcggaagccttgcaggaaaccccaggacacagcaaaagacctaaagctaaaaaaatcaataatcaaggatttacaaagataggtgaaatttaatcaaacaccctagcagtgattgtgtgagtgaatctgaacactgccttgatcaatttggcttgagtttcttactactgaatataacaaaatattaatttttattccttgaacaaaactgatggccagggcaggattctgctcatgtctgaggcaggagacagagcacaggacgtatcccttggagaaagggcacattctttcttgcattagatagctttctttctttaatgatgacattattgcagtttgcagatatactttaaggaatatacaaaaattagatatagcagcaaatatttcataagaatgagaaaaggaattatcatttaaaaaatgattaatactacaaacatcacacaacccagacacttgcgctagtgaaggactgtaaaacttaaactttaatatcttcatggaaagtcccctgttctttgtcattacagagctgcagagggaattacagtggttgttaccagaggctggactgggggcttggtagatggggaaagaaaggaaagatgttggtcaaaaggttcaaagttttagttaggaggagtaaattatattcatcttttgcacagcatggtgattggagttaatcaataatgtatatttcataatagccaaaagagaggattttataatgctttcaccacaaagcaataaatattttgggtaatggataggctaattagcctgatttaatcattccacaatgtttacatgcttggaaacaccacatggtacccagtaaatatatgtatacaactattagttctctgtcaaaaataaataaaataacacagccataatcaggtccttaaaaccatagaactcccttacccttatattattctgggtgatatgatggttctccctcaaagaagtctttgtaaactgagtattagcagggagaaagttgtccttccagacttgctctacactagctgccacaytgattccctcagaaggccacagctgtggcatttcctaggctcatacagcattcgtctactctaacacattttctggaataagcagggcttcttctacctcccccaatcctcttccttgtattgttgctcagctggtgtacccatttttttctccccagacttccgccaccgaacacacgcaagtgtacaaatgtatttaagacaatgagcatttcgaaacttaattgagatagagtggacttttcgttaatctggaaatgtgaaggattcaggcatgtggtcttatctacaccccaaatgataaatccagagaatgttgtg

SEQ ID NO: 549841 - DNA, 1458 bp, Homo sapiens
ttccagggaaaccatttccctggggcagaggtatggttcctccagacatgcagtctgcactttgaataaaagtacatttttatcactggcggaagccttgcaggaaaccccaggacacagcaaaagacctaaagctaaaaaaatcaataatcaaggatttacaaagataggtgaaatttaatcaaacaccctagcagtgattgtgtgagtgaatctgaacactgccttgatcaatttggcttgagtttcttactactgaatataacaaaatattaatttttattccttgaacaaaactgatggccagggcaggattctgctcatgtctgaggcaggagacagagcacaggacgtatcccttggagaaagggcacattctttcttgcattagatagctttctttctttaatgatgacattattgcagtttgcagatatactttaaggaatatacaaaaattagatatagcagcaaatatttcataagaatgagaaaaggaattatcatttaaaaaatgattaatactacaaacatcacacaacccagacacttgcgctagtgaaggactgtaaaacttaaactttaatatcttcatggaaagtcccctgttctttgtcattacagagctgcagagggaattacagtggttgttaccagaggctggactgggggcttggtagatggggaaagaaaggaaagatgttggtcaaaaggttcaaagttttagttaggaggagtaaattatattcatcttttgcacagcatggtgattggagttaatcaataatgtatatttcataatagccaaaagagaggattttataatgctttcaccacaaagcaataaatattttgggtaatggataggctaattagcctgatttaatcattccacaatgtttacatgcttggaaacaccacatggtacccagtaaatatatgtatacaactattagttctctgtcaaaaataaataaaataacacagccataatcaggtccttaaaaccatagaactcccttacccttatattattctgggtgatatgatggttctccctcaaagaagtctttgtaaactgagtattagcagggagaaagttgtccttccagacttgctctacactagctgccacactgattccctcagamggccacagctgtggcatttcctaggctcatacagcattcgtctactctaacacattttctggaataagcagggcttcttctacctcccccaatcctcttccttgtattgttgctcagctggtgtacccatttttttctccccagacttccgccaccgaacacacgcaagtgtacaaatgtatttaagacaatgagcatttcgaaacttaattgagatagagtggacttttcgttaatctggaaatgtgaaggattcaggcatgtggtcttatctacaccccaaatgataaatccagagaatgttgtg

SEQ ID NO: 549842 - DNA, 1286 bp, Homo sapiens
ttaatattttgaattttagattatttggttttcccttgaagtgtatctgttctgtttaaagtgtctttgtatttgacactcccccatctcccacttggagtcatttctctgcttactaccgtccttttctcatggttccatcttcaagtctctgtcttgattactttcttaagtgttttgcccaaacwgggtagataggtgatatattctgatatattctctgaatctttgcataactgttagtgcagtttttattttactccaacagatgattgatattcatttgcatgtaacatatcaccgtgcctctttatcttccgcctgagccatattctccaggctagcttttatcagtagtaagatgatattttaatctctgtctatctactgcatggtctcttattctgaatttggactgaagagaaaaaggaacatggtggcctttattatgcagcaataaataataaatagaaaaatttgcaatgtttataattgctcaaattgaaatatcataggtatgcatatgaataagtgtgaatgatattctgagtacattagcattatatcaaatgttaaatattgattgattctactactagacattgagctcctggaggccagggaccacattttaatcatttctgtgtctctaatgtatttgctagaagacaaaatatatttctcttcctacctttcctctcctccaactcctccaatctaaaattgagcctgttttcagtacagcagtacaacaagattccggatggaagtcaaggcatagagtgatttgattaaccctggtagcaaaaatattgtttcagtacagataaaaattttacattccatctgtgattttcttaatttaaaaatatattggtactacagtcacatagttcaaaatcaaagtgatataaaatgatattcattaagccatcttgctcctacccttgtctccatcacttttgtacctgcttctccctgcagagttaattcattcaacaaatatttattgagtacttaggtgctcagtgtgtgccagacactgttctaagtgctaagggcacagtgaagaaaaaaaaaaacaggaaaaataattgattctgcatgatgcttacttctggtaggagagacaagttaacaaaacaaataagttatatcgagtattaggagataagtgctacagagggaaagaaaacaggtgtgcacctccatggctgcctaatttttttaaaaattttttgtagagatgaggtcttgctatgctgcccagcctggcctcaaactcc

SEQ ID NO: 549843 - DNA, 1286 bp, Homo sapiens
ttaatattttgaattttagattatttggttttcccttgaagtgtatctgttctgtttaaagtgtctttgtatttgacactcccccatctcccacttggagtcatttctctgcttactaccgtccttttctcatggttccatcttcaagtctctgtcttgattactttcttaagtgttttgcccaaacagggtagataggtgatatattctgatatattctctgaatctttgcataactgttagtgcagtttttattttactccaacagatgattgatattcatttgcatgtaacatatcaccgtgcctctttatcttccgcctgagccatattctccaggctagcttttatcagtagtaagatgatattttaatctctgtctatctactgcatggtctcttattctgaatttggactgaagagaaaaaggaacatggtkgcctttattatgcagcaataaataataaatagaaaaatttgcaatgtttataattgctcaaattgaaatatcataggtatgcatatgaataagtgtgaatgatattctgagtacattagcattatatcaaatgttaaatattgattgattctactactagacattgagctcctggaggccagggaccacattttaatcatttctgtgtctctaatgtatttgctagaagacaaaatatatttctcttcctacctttcctctcctccaactcctccaatctaaaattgagcctgttttcagtacagcagtacaacaagattccggatggaagtcaaggcatagagtgatttgattaaccctggtagcaaaaatattgtttcagtacagataaaaattttacattccatctgtgattttcttaatttaaaaatatattggtactacagtcacatagttcaaaatcaaagtgatataaaatgatattcattaagccatcttgctcctacccttgtctccatcacttttgtacctgcttctccctgcagagttaattcattcaacaaatatttattgagtacttaggtgctcagtgtgtgccagacactgttctaagtgctaagggcacagtgaagaaaaaaaaaaacaggaaaaataattgattctgcatgatgcttacttctggtaggagagacaagttaacaaaacaaataagttatatcgagtattaggagataagtgctacagagggaaagaaaacaggtgtgcacctccatggctgcctaatttttttaaaaattttttgtagagatgaggtcttgctatgctgcccagcctggcctcaaactcc

SEQ ID NO: 549844 - DNA, 1286 bp, Homo sapiens
ttaatattttgaattttagattatttggttttcccttgaagtgtatctgttctgtttaaagtgtctttgtatttgacactcccccatctcccacttggagtcatttctctgcttactaccgtccttttctcatggttccatcttcaagtctctgtcttgattactttcttaagtgttttgcccaaacagggtagataggtgatatattctgatatattctctgaatctttgcataactgttagtgcagtttttattttactccaacagatgattgatattcatttgcatgtaacatatcaccgtgcctctttatcttccgcctgagccatattctccaggctagcttttatcagtagtaagatgatattttaatctctgtctatctactgcatggtctcttattctgaatttggactgaagagaaaaaggaacatggtggcctttattatgcagcaataaataataaatagaaaaatttgcaatgtttataattgctcaaattgaaatatcataggtatgyatatgaataagtgtgaatgatattctgagtacattagcattatatcaaatgttaaatattgattgattctactactagacattgagctcctggaggccagggaccacattttaatcatttctgtgtctctaatgtatttgctagaagacaaaatatatttctcttcctacctttcctctcctccaactcctccaatctaaaattgagcctgttttcagtacagcagtacaacaagattccggatggaagtcaaggcatagagtgatttgattaaccctggtagcaaaaatattgtttcagtacagataaaaattttacattccatctgtgattttcttaatttaaaaatatattggtactacagtcacatagttcaaaatcaaagtgatataaaatgatattcattaagccatcttgctcctacccttgtctccatcacttttgtacctgcttctccctgcagagttaattcattcaacaaatatttattgagtacttaggtgctcagtgtgtgccagacactgttctaagtgctaagggcacagtgaagaaaaaaaaaaacaggaaaaataattgattctgcatgatgcttacttctggtaggagagacaagttaacaaaacaaataagttatatcgagtattaggagataagtgctacagagggaaagaaaacaggtgtgcacctccatggctgcctaatttttttaaaaattttttgtagagatgaggtcttgctatgctgcccagcctggcctcaaactcc

SEQ ID NO: 549845 - DNA, 577 bp, Homo sapiens
tttttttgtgacrggatctcgctgtgtcacccacgctggagtgcagtggtgcaagctcgattcactgcaacctctgcctctagggctcagtgatcctcatgcctcagcctcccaagtggctgggatgacaagcatgtgccaccatgcccagctaatttttgtattttttgtagggatggttttttgccatgttgcccaggctggtctccaactcctgggctcaagtgatctgcccacctcggcctcccaaaatgctggaattacaggtgtgagccgcctcacctggacagtttactttttctcaactgcatgaaagttggctggttcaccgggtataaaatgagccctgtagtccctattatgacctgtgtctcagatcgtgatgagatcaaatgagatacttatatgagttctgaaaagaaaaatcaccagcgtgctactggtagaaaccagaatgccaaatttggctaaagtctaatagagacatagcccttcctctgccaatactggcatagataataataatttgtatttatataatgaaacatccccaggcagctggattgaatccctctgt

SEQ ID NO: 549846 - DNA, 577 bp, Homo sapiens
tttttttgtgacaggatctcgctgtgtcacccacgctggagtgcagtggtgcaagctcgaytcactgcaacctctgcctctagggctcagtgatcctcatgcctcagcctcccaagtggctgggatgacaagcatgtgccaccatgcccagctaatttttgtattttttgtagggatggttttttgccatgttgcccaggctggtctccaactcctgggctcaagtgatctgcccacctcggcctcccaaaatgctggaattacaggtgtgagccgcctcacctggacagtttactttttctcaactgcatgaaagttggctggttcaccgggtataaaatgagccctgtagtccctattatgacctgtgtctcagatcgtgatgagatcaaatgagatacttatatgagttctgaaaagaaaaatcaccagcgtgctactggtagaaaccagaatgccaaatttggctaaagtctaatagagacatagcccttcctctgccaatactggcatagataataataatttgtatttatataatgaaacatccccaggcagctggattgaatccctctgt

SEQ ID NO: 549847 - DNA, 609 bp, Homo sapiens
gtaatcccagctacttgagagttcaagataagcctgggcaacatggcgaaaccctgtctctacaaaaattagccaggcgtggtgacaagtgcctgtggtcccagccaattgggtggctaaagcaggaggatcgcttgaacccaggaggcagaggttgcagcgagtggagatcgtgccactgcactccagcatgggtgacagagcaaasctccatctcaaaataaatacattaaataaataaataaataactgggtgatgggatgatctgtgcagtaaaccaccatggcacacgtttacccatgtaacaaaactgcacatcctgcacatgtacccctgaacttaaaagatgaaaagaaaaataaattgatgttcaagtttgtcacaggtgacccttaaagtcctcctaatggcttgactactttgtcttttagtctacaggactttgaagaaggaaggaaataactaacccagcaaaccagaacctgatgctataataattgtaatagttaacatgttaagcactttacatgtatttcctaatttaatcctacaccaaccctacgatactttactatttgtcttaaaatttgttcctgagcaaaccagca

SEQ ID NO: 549848 - DNA, 1594 bp, Homo sapiens
ctctggtggctgaggtgggagtattgcctgatcctgagcccaggatttcagtgctgcagtgagttacaattgtgccactacactcaagcctgggcagcagaaccaaacccccatgtctaaaaaaaaaaggacaaaagaaaaagaaagagaaaaagaagttattagaaaatgtgttccctttatggggcatccctggaaaaatatccagcaacagaggaacccactttactgatcaaattataagtcagtcaaataagatatttcaaacacgatggtattaggtacggctaactgaattgattgaattgctttattcaaagatgttaccagttgatggcaattagatccactaccactggaaaacatacattgatctcttataaaagagttactgaaatacctatgcccttaataatggaaactcaggtattggcccctcttataaactctgacatggctgaatagtgccaggctttaatgcattatcccaaagcatattttcaccagctaaaagaaacccgttgtggcctgtcaaatgatgataatcagatctttcacagtctaaaactcagaaattgggtcttttggaagtgacacctgggaaagactgctcttgacctctagtggaaggggacaataccaagttttctgcagcaaacttcggggccttaagtattggatccacatctctcagctcaaagtgggccctcaagactcctgaaactgtacacctattagagatcttaaggtgaaactgactacagaagatttggccataagcagatggcattctagatgcggacagctctcccaagattgatgatcaagacttctctggtatcacaaaagtcttgtctttttcattgtgtttctttttattctaatctcttctcttttcttacaggaaaatccatgggaccataatctgtgaatggctttagtgaaggcttatgctctagcaagaaaccagagcaattttggggygtgtggactaatgcccccaaatgataaaacaattccattaatgccagtgcctctttgttttcccagcgagagtccacctgaaatctcaaaggaagaatggaaagctatccctgatattctagcatcactgttatttggcttcctgcactcaatggaaacaataccctaacctttccaataattaacctaattactaccaagtatatgaaatctatccaagtgatgcctgcagaagggatattgtgcctccaagtattgcaaactcaagacctggggactacctatgtgggtaagagtaattgcttatatgatcttactagattaaatgtagtgaggtgtctttccactaaacgtgtttatgtacccttacagtatgctataaaaggaccacaaaaaggtcagtttcccactggaccttgttcaggagctatgctcacttatgggcagataaatttattaataacttgacctctgctcaaacaccactaggtatttttcacctcattttcagcccctgagatcctatattgggtctatggagaaattgtgtactctgttgtacattgcctccttgctggcttggatctttctgtttggtcttgctcactcc

SEQ ID NO: 549849 - DNA, 488 bp, Homo sapiens
cagaaacaaaaaaacctacacactttatctcccctatttccaagttctagcagaggttgtagagggaggggacatccatcaacacgctgcatcccaccaactgaaccgccaaactgcactcgtaaactgactcagtgagaaaaactggactggtgaatgggattctgtagctcacaatgttggaatcttcacctaatttatcacttagcctttcagcaagatcctttcatatttaagacagcaaaacgaaaacaacaaaactctaraaaaatgtaatatataatgtctgttcaagttaagaataatcatgaaatgacaaatttctaggaaaatatatatcactaaaattgatttacctcacaaaaacaacatagaaagtgtaaaacttatgtaagtatcctattactggtgcattgcttcaaacctttaaagaattggtagtttctgttctaacaaatatgttttaaagcttgtcagaagaagatagg

SEQ ID NO: 549850 - DNA, 2063 bp, Homo sapiens
agtctttcccctagctgtggtgggcccattctgaggtgactatgttaatgtttatgctgaggaaaacctatacccagaagatagtgagaagcagggaatgttttttttttgtgtgtggggggagggggctgagtggtagaagactctggaaagatttctgcttgagtgaaagagagatacacagatagatctcagcctgggccataagcacctattcagtacctagtttgtcatcaacactctggatatatttgatatctgtctagaacagatgaggttcctgctttcatggagcctgtaccctgggacgtgcaaaggaccatgggagcacataggagggacatctaacacaggtttagggagcttgggaagttttctagagaaagagatgtttaagcagaaactaaaaatcatacaggtaaggaaagtgaaggaaatgtttaaggcagtgcaaccaacatgcacaaaggcctggaggtgagagacagcaggacatgttcaaggatctgaaagtagttcaatatggctgagggtgggaaaggggcagagagggaatgggggagagaccactgaagtgagattctagaggccttctctaagccatgtgaaggaatttggtctttaatttaaatgcagtgggagcttctgagtgacttcaagcagaacagtgacctgatcagatgtgtgtttagaaagatcctcctagctatagagtggagaaagggttttgggggtgggaggcaggggaagtctagagatggggaaaggtaggagagaggagtagaaacttttggaatctaggtgaaagagaatagtggtttggattatgatggtggcatgagattggagagaagtgatagattcaagaratgtttaggaggtagactaggcagaattcaatgaatcatgtgatgtgaaaagtaagggaaggaaaataattcaggatggtgtccaaagtctctgttttggacatctgggtgatgatgttccattctttctgatttgtacgtgacattgcagtggatgtggctgcctgctctatgctggctgtcagaaactccagccctagacctctcacctggcttcctgtcctcccttcttcatcttcattgggaaagtgcttttgtgggaagggtagtgaagccaacctggctttcaaaggctgtaaggttgttagagaaaggccatccattttgacctacttctccctctgggacatgataaacgctattgctacaagaggttttttttttttgttttttttgttttttttgataaaaatctttctagagatgatgaatccccatgggaactggaccactgaagcagtctcttatttggttttctcactttttttcaagcaatcagcttgttgccagagggctctcctcaagtcactctgttttatggtctccattagttcacatttctgtttttagcaaaatatcctataaatacctcgggggtgggagtcaaagaggttaaagatggatctttcaccggcaataattctttttttttttaactttttaagtttaaattatcatgggtacatagtaggtgtatatgtatataggttacatgagatattttgatccaggcatccaatgcataataatcacatcagggtaaatagagtatcacctcaagcatttatcttttgtgtttcagacagtccaattatactcttagttacataaaaatgtacaattaaaatttttcttttttcttttttttaactatactcaccctgttgtgctagcaactactaggtcttatttattatttctaacttttttttttagccattaactatttccctatccccttgcccaccctgactacacttttcagcctgtggtgtccatccttctgctctttttagctaccacagagaagtgagaacatccagcagtggatttatgaattattagaaggtacctccatgggtacctgttctccaatccactgttgattccaggcaaaaatgctcttggaaaaagatcttgcatcaagtgtgaacttgaacatgttccttttgcaaggggtgcttttattatgta

SEQ ID NO: 549851 - DNA, 2063 bp, Homo sapiens
agtctttcccctagctgtggtgggcccattctgaggtgactatgttaatgtttatgctgaggaaaacctatacccagaagatagtgagaagcagggaatgttttttttttgtgtgtggggggagggggctgagtggtagaagactctggaaagatttctgcttgagtgaaagagagatacacagatagatctcagcctgggccataagcacctattcagtacctagtttgtcatcaacactctggatatatttgatatctgtctagaacagatgaggttcctgctttcatggagcctgtaccctgggacgtgcaaaggaccatgggagcacataggagggacatctaacacaggtttagggagcttgggaagttttctagagaaagagatgtttaagcagaaactaaaaatcatacaggtaaggaaagtgaaggaaatgtttaaggcagtgcaaccaacatgcacaaaggcctggaggtgagagacagcaggacatgttcaaggatctgaaagtagttcaatatggctgagggtgggaaaggggcagagagggaatgggggagagaccactgaagtgagattctagaggccttctctaagccatgtgaaggaatttggtctttaatttaaatgcagtgggagcttctgagtgacttcaagcagaacagtgacctgatcagatgtgtgtttagaaagatcctcctagctatagagtggagaaagggttttgggggtgggaggcaggggaagtctagagatggggaaaggtaggagagaggagtagaaacttttggaatctaggtgaaagagaatagtggtttggattatgatggtggcatgagattggagagaagtgatagattcaagaaatgtttaggaggtagactaggcagaattcaatgaatcatgtgatgtgaaaagtaagggaaggaaaataattcaggatggtgtccaaagtctctgttttggacatctgggtgatgatgttccattctttctgatttgtacgtgacattgcagtggatgtggctgcctgctctatgctggctgtcagaaactccagccctagacctctcacctggcttcctgtcctcccttcttcatcttcattgggaaagtgcttttgtgggaagggtagtgaagccaacctggctttcaaaggctgtaaggttgttagagaaaggccatccattttgacctacttctccctctgggacatgataaacgctattgctacaagaggttttttttttttgttttttttgttttttttgataaaaatctttctagagatgatgaatccccatgggaactggaccactgaagcagtctcttatttggttttctcactttttttcaagcaatcagcttgttgccagagggctctcctcaagtcactctgttttatggtctccattagttcacatttctgtttttagcaaaatatcctataaatacctcgggggtgggagtcaaagaggttaaagatggatctttcaccggcaataattctttttttttttaactttttaagtttaaattatcatgggtacatagtaggtgtatatgtatataggttacatgagatattttgatccaggcatccaatgcataataatcacatcagggtaaatagagtatcacctcaagcatttatcttttgtgtttcagacagtccaattatactcttagttacwtaaaaatgtacaattaaaatttttcttttttcttttttttaactatactcaccctgttgtgctagcaactactaggtcttatttattatttctaacttttttttttagccattaactatttccctatccccttgcccaccctgactacacttttcagcctgtggtgtccatccttctgctctttttagctaccacagagaagtgagaacatccagcagtggatttatgaattattagaaggtacctccatgggtacctgttctccaatccactgttgattccaggcaaaaatgctcttggaaaaagatcttgcatcaagtgtgaacttgaacatgttccttttgcaaggggtgcttttattatgta

SEQ ID NO: 549852 - DNA, 2063 bp, Homo sapiens
agtctttcccctagctgtggtgggcccattctgaggtgactatgttaatgtttatgctgaggaaaacctatacccagaagatagtgagaagcagggaatgttttttttttgtgtgtggggggagggggctgagtggtagaagactctggaaagatttctgcttgagtgaaagagagatacacagatagatctcagcctgggccataagcacctattcagtacctagtttgtcatcaacactctggatatatttgatatctgtctagaacagatgaggttcctgctttcatggagcctgtaccctgggacgtgcaaaggaccatgggagcacataggagggacatctaacacaggtttagggagcttgggaagttttctagagaaagagatgtttaagcagaaactaaaaatcatacaggtaaggaaagtgaaggaaatgtttaaggcagtgcaaccaacatgcacaaaggcctggaggtgagagacagcaggacatgttcaaggatctgaaagtagttcaatatggctgagggtgggaaaggggcagagagggaatgggggagagaccactgaagtgagattctagaggccttctctaagccatgtgaaggaatttggtctttaatttaaatgcagtgggagcttctgagtgacttcaagcagaacagtgacctgatcagatgtgtgtttagaaagatcctcctagctatagagtggagaaagggttttgggggtgggaggcaggggaagtctagagatggggaaaggtaggagagaggagtagaaacttttggaatctaggtgaaagagaatagtggtttggattatgatggtggcatgagattggagagaagtgatagattcaagaaatgtttaggaggtagactaggcagaattcaatgaatcatgtgatgtgaaaagtaagggaaggaaaataattcaggatggtgtccaaagtctctgttttggacatctgggtgatgatgttccattctttctgatttgtacgtgacattgcagtggatgtggctgcctgctctatgctggctgtcagaaactccagccctagacctctcacctggcttcctgtcctcccttcttcatcttcattgggaaagtgcttttgtgggaagggtagtgaagccaacctggctttcaaaggctgtaaggttgttagagaaaggccatccattttgacctacttctccctctgggacatgataaacgctattgctacaagaggttttttttttttgttttttttgttttttttgataaaaatctttctagagatgatgaatccccatgggaactggaccactgaagcagtctcttatttggttttctcactttttttcaagcaatcagcttgttgccagagggctctcctcaagtcactctgttttatggtctccattagttcacatttctgtttttagcaaaatatcctataaatacctcgggggtgggagtcaaagaggttaaagatggatctttcaccggcaataattctttttttttttaactttttaagtttaaattatcatgggtacatagtaggtgtatatgtatataggttacatgagatattttgatccaggcatccaatgcataataatcacatcagggtaaatagagtatcacctcaagcatttatcttttgtgtttcagacagtccaattatactcttagttacataaaaatgtacaattaaaatttttcttttttyttttttttaactatactcaccctgttgtgctagcaactactaggtcttatttattatttctaacttttttttttagccattaactatttccctatccccttgcccaccctgactacacttttcagcctgtggtgtccatccttctgctctttttagctaccacagagaagtgagaacatccagcagtggatttatgaattattagaaggtacctccatgggtacctgttctccaatccactgttgattccaggcaaaaatgctcttggaaaaagatcttgcatcaagtgtgaacttgaacatgttccttttgcaaggggtgcttttattatgta

SEQ ID NO: 549853 - DNA, 717 bp, Homo sapiens
gaaattctctcacttctattcatcctctcaatggagagagagagaccatatggcctgaaaccacgtccacagagcaatgaatcaatagggagtcctcctttcctgttttgcagtcctaaatgatactcccaatggctttcactctttaatatcagtatcagcaccacarctggtcgtaaatgaaggtcttttccttgaaagggtgactactctttctctcattttttttttcctggcttgatttggctctagttagcacaagaaaacttcttaattttcaaacagcatattaaaaactaccttctcttttaagaatttttctctgaatcccagctcacattggtagccacatactgccaggtatttcccatctatttttctagcatttaaagtttcatggagtcactaatgaagtagccatttgctatatttacttagtcaccatagcaacattgtctcggttagtgtatgcctgggtagcttcctgcagtttgacatgatatgcagctaataattctgatttctactcagaggcacaggaattttgcagatagtatttttaaatttgctgaatagaattatttgatcccaccattgtattccattggcacttatcacatagtcataggattacagaaattttaatttgaaaaaatgattcatacttacatatatcagagtagctggctggagaaacatggcctccatcatcataag

SEQ ID NO: 549854 - DNA, 550 bp, Homo sapiens
ctctgtcctcaagtgatgctctcacctcagcctcccaaagtgctgggattataggtatgagccactgctcttggcttacatcaccactttacaggtgtatttattccatttttacttgctgtaccgctaccacatattaaagtaaagaacgtattaccacatattaaagarcagaagatcttttcattcttaaatttgtaatatttttattcatttgccaactggccacttaggtgtaatcatgtaattatctaactttttacttctagttttcactcctttaagtctttttctaaagcacgttaggaaaaaggagaaggcatggtatctatttaagtcactttgtagatttactttcaaaagagaatgttaaattactaagtttaagattagcaattctaatgcagtttagaatttaatatatcttttatttacctgggtacctctgtgttccaccatatttgaaagttgtgtataaaacttttcactgggagaagttcttgctattaagggagacgttcttgctattgaagaagttgttctttttact

SEQ ID NO: 549855 - DNA, 550 bp, Homo sapiens
ctctgtcctcaagtgatgctctcacctcagcctcccaaagtgctgggattataggtatgagccactgctcttggcttacatcaccactttacaggtgtatttattccatttttacttgctgtaccgctaccacatattaaagtaaagaacgtattaccacatattaaagagcagaagatcttttcattcttaaatttgtaatatttttattcatttgccaactggccacttaggtgtaatcatgtaattatctaactttttacttytagttttcactcctttaagtctttttctaaagcacgttaggaaaaaggagaaggcatggtatctatttaagtcactttgtagatttactttcaaaagagaatgttaaattactaagtttaagattagcaattctaatgcagtttagaatttaatatatcttttatttacctgggtacctctgtgttccaccatatttgaaagttgtgtataaaacttttcactgggagaagttcttgctattaagggagacgttcttgctattgaagaagttgttctttttact

SEQ ID NO: 549856 - DNA, 667 bp, Homo sapiens
gtcaaataaaaaagagtttgacgtgcacaaataaacaatgcttgttaaattctcaaattataagaatagaagcaagcttggccttatattcacactcaaaaataaaaaaactaccaaattaaaaacctatttttgagtaaacataattgggaccttaatgtttcaaaactgaagtatgatgtgttttggtttttgtatgtttgtttgtttctaaatttttactttttatttttaatttttgtgggtgcatagtaagtgtatatatttatagggtacatgggatgctttgacaggcatgcaatgtgaaataatcacgtcatgtagaatagggtttccatcttctcaagcatttattctttgtgttacaaacaatccaactgtgttttgcaagagtacttattttttactgtaattcatagtcatgaaatctcttgagttccctaggccttatctatatatgacatggaacatggcctccttccatgaagcaggggcttaatcaacrggaattagtcccgcccatttactctgtgcctgttgcctggctttggatccctcagatctggttttcctttctagggcttcaaccaaagtttgtaattgagtttgggacaaaaaggtgtctcgggggatgcatggatttatttagattaagtcccagacagac

SEQ ID NO: 549857 - DNA, 667 bp, Homo sapiens
gtcaaataaaaaagagtttgacgtgcacaaataaacaatgcttgttaaattctcaaattataagaatagaagcaagcttggccttatattcacactcaaaaataaaaaaactaccaaattaaaaacctatttttgagtaaacataattgggaccttaatgtttcaaaactgaagtatgatgtgttttggtttttgtatgtttgtttgtttctaaatttttactttttatttttaatttttgtgggtgcatagtaagtgtatatatttatagggtacatgggatgctttgacaggcatgcaatgtgaaataatcacgtcatgtagaatagggtttccatcttctcaagcatttattctttgtgttacaaacaatccaactgtgttttgcaagagtacttattttttactgtaattcatagtcatgaaatctcttgagttccctaggccttatctatatatgacatggaacatggcctccttccatgaagcaggggcttaatcaacaggaattagtccygcccatttactctgtgcctgttgcctggctttggatccctcagatctggttttcctttctagggcttcaaccaaagtttgtaattgagtttgggacaaaaaggtgtctcgggggatgcatggatttatttagattaagtcccagacagac

SEQ ID NO: 549858 - DNA, 672 bp, Homo sapiens
ccaggctctagcagaacagaggtaaaaacaaacaaacaaaaaaaaaacaccatcctaaaataccctgcctgtctgcctttttcctcaggtgatatcagaagcccaaggtgctatcttaccccaggcctttaaaccagtgtggaagagcacaccmttgcagtcacacagaaaacatcttttaaaaattggagagatgttgagatgaatttgaaaactggttcattcttcagtaatcaaaaatgcaacaatagtgactgtaatgatgtaacaacacaagacaacatatacgtgcctttcatctaagctcaaagcactagacaaataatagtctgggctaggatcccatcctatgcagctttatgggagaatccacacaattacaataacataatgatactatgatagtgataataataccttatgtttacataatgcctatctcggggaaacctgagtagtttagagatgctaatctaattaaactccagagcccagtcagacaggtaggaggcaggtatttttcatgcagaagctgtttaggaagtgatgggaatactaatatcttccacctcccttccccctaggtatttgtgaacataaagaaaaaaggtagctcagattgaaatcttctaactacatggaagaacaatgataatagtagaatataataat

SEQ ID NO: 549859 - DNA, 759 bp, Homo sapiens
cttccttctttatatctttttcttggtgtggaaaaaattctaccttcaggcttcctgatgatggctgctctggaggaggtaggtaactctttgtattcacagcatcaaaaagtttttccacaaatatctgtgtctctaaaaataaaaccaaacaccatagattaaaacacatttgttaagattaattccccgcttccacatctcttatctctaatatgatgaaacataccttgacttttataaactagaaaatatactagcactggccaggcgtggtggcttacgtctgtaatcccagcactttgggaggccaaggcaggtggatcacctgaggtcaggagttcaaaaccagcctcgccagccctgtctccacaaaaattagccaggcatgatggcaggtgcctgtaattccagatactagggaggctgaggcaggagaatcacttgaacccaggaggcagagactgcagtgagccgagatcgcgccactgcactcaagatcacgccattgcactcccrcctgggtgacagagcaagactccgtctcaaaaaaaaaaaagtaaaaagaaagaaaatatcctaatatcaacagcttcccaaccagtgtgccatggcacaagtcctgaggcaatactgattcatgctattttcaagacggtagggactggaatggtcgcagccctctgggctagtcacctccagccatgactaagtcttctccacatcgcctactcagtgttgcaaacacaaacactatca

SEQ ID NO: 549860 - DNA, 531 bp, Homo sapiens
ttggaatctgggaattgaagcaggaactggtaggagccattccctttgccccctggctaggtagctattcaggctccctctctgcctcttttaagagatcaattacttaccatccgtcagtttcttttatcttttggaaggaaacctgttyagaacagcccccttgggactagggccccaggcagcgagtgtagtagagaagtgaggtccagatgctgtatgctgatgtaaagttgcgactgccctcatggagcctgacagcaaggactgcagagttttttccccatctctggcatctttcctccatcagcagagggtccagggtatcaggataatgacaagaccttgccctgaacagtagaagggtaaatacaaagaaaggagagaaatcaagggggagacaattcatatataatgagcacctattctgcacaagacactgctagatattctacttactgttgacctatttattttaattctcatggagccctgttaaataagaattactcaccctatgttctggatgag

SEQ ID NO: 549861 - DNA, 531 bp, Homo sapiens
ttggaatctgggaattgaagcaggaactggtaggagccattccctttgccccctggctaggtagctattcaggctccctctctgcctcttttaagagatcaattacttaccatccgtcagtttcttttatcttttggaaggaaacctgtttagaacagcccccttgggactagggccccaggcagcgagtgtagtagagaagtgaggtccagatgctgtatgctgatgtaaagttgcgactgccctcatggagcctgacagcaaggactgcagagttttttccccatctctggcatctttcctccatcagcagagggtccagggtatcaggataatgacaagaccttgccctgaacagtagaagggtaaatacaaagaaaggagagaaatcaagggggagacaattcatatataatgagmacctattctgcacaagacactgctagatattctacttactgttgacctatttattttaattctcatggagccctgttaaataagaattactcaccctatgttctggatgag

SEQ ID NO: 549862 - DNA, 934 bp, Homo sapiens
caaagatggtggtgtataacttatagaactcccattctgtgttgggcgcataaatgatctttgtagataccatttcatttactcaaataaccctgcgagccaggcactgttatccctgtgatgaaactgaggctcagagaggttaagacacttgccaaggattacagagctagtaagtggcrgaactgggctttaaacccaggaagctagattccaaagtcttgtgttcttaactactaagctacactgttgatcacccttggagtcgtgggttaggagaaaaggaagggaaacaataaggtgggagaagatgaaggacttagggctcaaagctgatgcttcagtgaggtggaaaacctgtgctgtggggttttcctcagattacacacacgtgcacacgtgtttatatcaggtgctgaaaaaaagataattaatttagatatttaccaggaattctttcagaagcatttttaatgagtcatatttgcactgcacaattctttttgcttcatttttatatagttgaaggcagtaaggaattcttgtacaagtaaacatcttttccttttgtacccctcatcactgcgaatttgatagaacccttagtaaatgaccaggttgttttttacacttttttttctctcccacaacgtaacatgggtttggcaagctttaaaaaatgttagtatgtttgtatccactagtatacctctgaccatttaataggagatccctgccaattagagctagtgatgttttgttctaatttggagagacagggtgtgtctgtctttaaattctctgtcagttttcctttttgtaaaaaaaaaaaaaacaaaacaaaacctcaattcccaaattataaataaatttgagcaattgcagactaagggaataagaatgaatgaatgaatgcatccattggagtagaaca

SEQ ID NO: 549863 - DNA, 934 bp, Homo sapiens
caaagatggtggtgtataacttatagaactcccattctgtgttgggcgcataaatgatctttgtagataccatttcatttactcaaataaccctgcgagccaggcactgttatccctgtgatgaaactgaggctcagagaggttaagacacttgccaaggattacagagctagtaagtggcagaactgggctttaaacccaggaagctagattccaaagtcttgtgttcttaactactaagctacactgttgatcacccttggagtcgtgggttaggagaaaaggaagggaaacaataaggtgggagaagatgaaggacttagggctcaaagctgatgcttcagtgaggtggaaaacctgtgctgtggggttttcctcagattacacacacgtgcacacgtgtttatatcaggtgctgaaaaaaagataattaatttagatatttaccaggaattctttcagaagcatttttaatgagtcatatttgcactgcacaattctttttgcttcatttttatatagttgaaggcagtaaggaattcttgtacaagtaaacatcttttccttttgtacccctcatcactgcgaatttgatagaacccttagtaaatgaccaggttgttttttacacttttttttctctcccacaacgtaacatgggtttggcaagctttaaaaaatgttagtatgtttgtatccactagtatacctctgaccatttaataggagatccctgccaattagagctagtgatgttttgttctaatttggagagacagggtgtgtctgtctttaaattctctgtcagttttcctttttgtaaaaaaaaaaaaaamaaaacaaaacctcaattcccaaattataaataaatttgagcaattgcagactaagggaataagaatgaatgaatgaatgcatccattggagtagaaca

SEQ ID NO: 549864 - DNA, 690 bp, Homo sapiens
actatcatgaagacagcaccaagccatgaggaacccacctccatgacccaaacacctcccaccaggccccacctccggcattggggattacaattcaacatgagatttgggtggggacaaatatccaaactatattagcaactgtccatccagtggaattttggtggcttcatggggaagacattccatccctctccttttcccataccttccttcagatgacctaccccattaccttcaaagaattccacagtcacaaagttattccttaggcataagactctttgtctcctggaaaacagagaatctctggaagggatggtctaggtcttatgagagtcagggagaattggtgtatgcaatcctctgctgggggcaggcttwtatgagaataaaagaagaggaagccactgtgaggatgttcagaggagagggtagagaagatggtggtgaaaggggaacagtaggaccaaggagcaaagacaaccaataatttggggatttcagaaactctgacatcctgtcctttataattctggaggtgctgctgagccctgctgcctgctctggagtttcttggcatttgctttgcctgtttgctcatttactatcagcaaagtagctggacatttcaccagttatcaaggactgtgctaggtcgggcagcaccaggggctacggacacacaga

SEQ ID NO: 549865 - DNA, 540 bp, Homo sapiens
gttgtctatttactctgttgatggtttcttttactctgcagaagacctttagtttaattaggttacaattgccaaattttttgttacatttgttgcttttgaagatttagtcacaaattctttgcctaggccggtgtccagaagggtatttcctaggttttcttctaggattatagtttgaggtcttacatactaagtctttaattcatcttgagttaatttttatatattaactcagtcagaggtaggagtccaatttcattcttctgcatatggttagcaagttttccagcaccatttattgaacagggtattctttcccrattatttatttttgccgactttgtcgaagatcagtgggtagtagggtgcagctttatcaagtatagatttttagcattaacttaaaatctagttaaaaaggcaaaaatcatagaaacacactcataggatacatgtttttcacttaatttgtgtcctgttactggtaaattctaaatgttatgcattgtacatgaatattttcatgaatcatgataa

SEQ ID NO: 549866 - DNA, 539 bp, Homo sapiens
aaacaggtgtctagtgactgcttaattatttccaaatcacatcaaagatgaattggtaaataatgggtatgagtagtgatatgaaaatggttacgtaactacctattacttgtgtctggtaatcaagtcttattttttaaaagactattgtttttgagaattgagatatttaaaactcattataacttattcctaaaaatagaagagaagaggaggtactgtgtattcaaaaawttttttaaataaagaattcagtgtcacgaaaaaaagaattaaccagtctttatttaaattgctttgtttcacataaagaatatatgctcattgtaaagaggaaataaaatgacatagaagtatgtgaagtaaaaagccaatctctatcaattcttcctacccactcaccaagcgtaagcacttttaatgttgatgtgtatcctttcaaccacttctatgcatgtgtaaacacgatttataatgcttagcgaaaaatgagatgatacaacatatgttgtcctataacttgctttatttatacaaca

SEQ ID NO: 549867 - DNA, 2137 bp, Homo sapiens
  misc_feature 585, 586, 587, 588, 589, 590, 591, 592, 593, 594, 595, 596,597, 598, 599, 600, 601, 602, 603, 604, 605, 606, 607, 608,609, 610, 611, 612, 613, 614, 615, 616, 617, 618, 619, 620,621, 622, 623, 624, 625, 626, 627, 628, 629, 630, 631: n = A,T,C or G
  misc_feature 632, 633, 634, 635, 636, 637, 638, 639, 640, 641, 642, 643,644, 645, 646, 647, 648, 649, 650, 651, 652, 653, 654, 655,656, 657, 658, 659, 660, 661, 662, 663, 664, 665, 666, 667,668, 669, 670, 671, 672, 673, 674, 675, 676, 677, 678: n = A,T,C or G
  misc_feature 679, 680, 681, 682, 683, 684: n = A,T,C or G
gatgattttttcaggtagcaagtttctatccttcgaagtttctagaatgaaaatctgaagaatttatggaactcattgaggcttgggtttatgtgctcagattggaatctggtaatacgtaaggatcagcagttctgtctcagagaggcctgataataagagggagtggcaaagcttggaaggacaggcagaacactgccgctaaccctctataactgaagacatgggaaaacttagctagtccctgcgacttactgggcaaagagaggagtcagtaatttgttgggtgttccgaatgaagtctgttttgtgttttcctgttaacaaattcttcccaggtggaagggaagattcaataaacatctgtcccgatagagctgtaaagtgaaggagggaaatggggagaaagagaaagcaactgcttcattatcacgtttgctgatgagcagaaggagggtagaaatgccaatcagagtttgcgattgtgcaagtttttcgagaagcttgcgtcacaaagcaataagaagaaatgagttccaggaagcaatgggggtgacggtgggtgcggagggaggggcggcgtannnnnnnnnnnnnnnnnnnnnnnnnnnnnnnnnnnnnnnnnnnnnnnnnnnnnnnnnnnnnnnnnnnnnnnnnnnnnnnnnnnnnnnnnnnnnnnnnnnnacgcggtaggggagtgtaaaaagtcttttgaagatctcgtgggaaggcacctgcaaggatccatgcctgtgtgccgaggacagccaccaggcgagctccaaatgaaccccaggattatttttagctatcatgatagaaatgaggtgctattttaagcactgatggcacgtgtacctataacattatgtacaggtgaggcactgtagataaaaataactttagagaagaatagccacgtgaaaggcacgatctaaatagggacatcttttcagcgcacactagaacagtgttctcgaagccagggcctcccctgtcaccaatccacagccacgccggcccctctactccaatctgtaggagggaaaagacatttcctgtcttgcttctgccttctctggattaaattctccctagcacactctgttcacaagctattctttaagctgcagaatattgtttcaaagaggggaccagcctttcctttactttcactgacattttattttcttgattctgaaggtctccacccccattcatgttatttttaaaaacattaaaaatgttatttttaaaaaccaccatgccacttttctcccccacatctttatccaaagcctggagtggacgggcctggtgagtccagagtctgtctgcactttgatgaggggtggggcgcgtgagtcaagaacatttgtggaggcagcaggcaaggccaaaggtccaggacaccaagacgaaaaatcaaggattttgctatatctaccatcaagaattattattgccacacagatgtgcaggaatgatagtggcatatgtgatagctttcatcctatcaaggctgctgaggaaaagtggaaagaaataaatgtgcttacttttctacccaaagaactctagcactgtccaaaatcacacctacacatttcaacacaacttacttcaaactttaaaattgttacgaaacaactaacttcttgccttctaagttttaagaaacttcaagaaattcaatcagttcttttttttaagagaacaaaattttctttttgtctttgatagtcttaaattttatgatgatgtgaaaaggtgtaagtctgtttttattcaatgcggcacacacagaatctggggatggggaccagggatctgttttatacacacaccctccttgtaaggctgatacagctcagatgtgaggatggtgagggcttcggattaattttgcaacttcagccaccgcatgaagtcaggcattgtggtgtcctagggggttgtctagatgtttggatcagtagttcccaaagtgtgggccctggaaacttgcgagatgttgccagctcttgggccttattccagacccccccaaagcagaaatgctggagtgggacccccacaccctggttttaaccatccctccctctgatgcacgctcctgtttgagaaccacrattct

SEQ ID NO: 549868 - DNA, 561 bp, Homo sapiens
gttcaggaatctgacgtggaatctgattggttcgaactgggtgttcaatggccttcagtaaaaaaaggaaggaagaattcataattacgtatctgtctcaaatattcttctctamacgagattatttgcctgctttttttcagcttctatgttgtcactaatggcaataaagtctacttaagacatcaaactgaaatttgtctttggaagccatcatccaggtaccatcaggtacaatactcagtctgtctactggaacaagttaatactgtctccagcagtgatctactgactaatggctttagacacaggaaaaagtacacaggagataagagaatacttggaaaataatagttaataaaaaggtagagttaggcttttcattttcattacacatgtactgtaagaaatcagctggttctggaattttggtccatgtatttttatttggaggtgcgcaatgtcatctttactaaaattgctcaattttactaagacttaagaacatgaaaacaacaatgaatggctgtatgaagctttacgaccataaggagttggtga

SEQ ID NO: 549869 - DNA, 623 bp, Homo sapiens
gcacaacaaggcagaaatggtcctggtcaatgtaaaattggtaaaatttgctgggttgttttctctctgaagatctgaattttgactacagtagtcaagtattcccctaattgtgtgttctgtctgcaaatgtatttrggaagattttttatcctgggactttatgaacaactcaaagtataaatggttagtaaaactgaaaagggtttaatgtggctgctaataaataatataaataaaaatgataatcctctagcttttatctgttgtccatcctaatactgccaaggatggagttagcaggtacattcatgtactgaaggggcaagggtaacaaaatgtaccctttctgtaaaacagggagaaattcataattttctagccagtatttacattcttaggagccctaattcccagtacttggcaatctatattttcattattctggttaagaattaccctctcctcactaatgactcagaggaatataatgtttcaaagcagaatttcttgacgtagtttccacagaaaacttgtcctgttcttttgactaatcatttcaagatctgaaaaatacagagtcctggatggtccctagggacttccatgatgaatggttgaca

SEQ ID NO: 549870 - DNA, 623 bp, Homo sapiens
gcacaacaaggcagaaatggtcctggtcaatgtaaaattggtaaaatttgctgggttgttttctctctgaagatctgaattttgactacagtagtcaagtattcccctaattgtgtgttctgtctgcaaatgtatttaggaagattttttatcctgggactttatgaacaactcaaagtataaatggttagtaaaactgaaaagggtttaatgtggckgctaataaataatataaataaaaatgataatcctctagcttttatctgttgtccatcctaatactgccaaggatggagttagcaggtacattcatgtactgaaggggcaagggtaacaaaatgtaccctttctgtaaaacagggagaaattcataattttctagccagtatttacattcttaggagccctaattcccagtacttggcaatctatattttcattattctggttaagaattaccctctcctcactaatgactcagaggaatataatgtttcaaagcagaatttcttgacgtagtttccacagaaaacttgtcctgttcttttgactaatcatttcaagatctgaaaaatacagagtcctggatggtccctagggacttccatgatgaatggttgaca

SEQ ID NO: 549871 - DNA, 623 bp, Homo sapiens
gcacaacaaggcagaaatggtcctggtcaatgtaaaattggtaaaatttgctgggttgttttctctctgaagatctgaattttgactacagtagtcaagtattcccctaattgtgtgttctgtctgcaaatgtatttaggaagattttttatcctgggactttatgaacaactcaaagtataaatggttagtaaaactgaaaagggtttaatgtggctgctaataaataatataaataaaaatgataatcctctagcttttatctgttgtccatcctaatactgccaaggatggrgttagcaggtacattcatgtactgaaggggcaagggtaacaaaatgtaccctttctgtaaaacagggagaaattcataattttctagccagtatttacattcttaggagccctaattcccagtacttggcaatctatattttcattattctggttaagaattaccctctcctcactaatgactcagaggaatataatgtttcaaagcagaatttcttgacgtagtttccacagaaaacttgtcctgttcttttgactaatcatttcaagatctgaaaaatacagagtcctggatggtccctagggacttccatgatgaatggttgaca

SEQ ID NO: 549872 - DNA, 518 bp, Homo sapiens
gaaacccagtccaaatacacacatacatgcttacatgaacacacagatagatgacagctgggagaaagctgcagcagttgccctggatgcgctgcctgcatccctcagctttctgccccacctatgaaagctgtttactgagctctttagcaactctctgcccgaaggtcttttttctggctgtgggagattggctggtcatggccacagggcaggctggaggtgccagggagttaaggccccagaagcagccttcaagcaatgaccgaccagcagttgatgaaaaaccctgctgggcacggtggcacatractaatcctagtgactcggtaggctgaggtgggaggatcacttgtgcccaggagtccaaggctgcagtgagctataatcctgccactggacaacagagcaagatctttttttttttttttttttttctgagactgagtttcactcttgttgcccaggctggagtgcaatggcgtgatcttggctcaccgcaacctctgcctcccagg

SEQ ID NO: 549873 - DNA, 512 bp, Homo sapiens
aggacaagctcaactccaccatgaagctggtgtcccacctcactgcccagctcaacgagctcaaggagcaggtgtgcaccccgcctgatcccaggcccaccctgggttctatccctgggcagtccctgcctgccttcatccttcctgacccaccctcttccccactggcctctggccctgggcctggatgaraaggcaggtgccaaacccactctcccctgcatggcaagtcagactggggttgacaacccctgccttgggccgctaaagacaaggccaagtggaaactttagtacagggtggtggggccctctgtctctcatccccttcctctgacagctgccaggtaggtcctttgaggggatccccatcactggagatgggggagtttaaggccctcttgcctagacatcctcttctgcatctggcagtgcctgcatgaagatgaggcagcctctgttagtgggctggtttcccagctgcatcaaatccagggtttgtgacacgctaat

SEQ ID NO: 549874 - DNA, 554 bp, Homo sapiens
caactttgtcaaagattagatatgtaagtatgtaagttttcagctttatttctgggttctgtaacctgttccattggtctatatgtctgtttttgtatcagtaccatactgttttggctactgtagtcttacagtatagtttgaagttgggcgatgtctccagctttgttctttttgcttaggattattttctgytgaggcatttactatgttcagcttgctttataaaatgtggatttttcaaccctgcaaggctataggcagagattgactatttcataagatcttattttccttaatccttgatttcagattgatcacttataacttacacactccaatgttttatatttatttttcttattatacattctagtactacatgcttcttcagcctatattctgagatccaatgtatagcagtaatagcttgatgaaatgttttgccaccacataaaatgagataccaactttcagctggggatggctatccattcactaacattgttttattatacatacagtaagctctacatgtaggttttataaattgt

SEQ ID NO: 549875 - DNA, 554 bp, Homo sapiens
caactttgtcaaagattagatatgtaagtatgtaagttttcagctttatttctgggttctgtaacctgttccattggtctatatgtctgtttttgtatcagtaccatactgttttggctactgtagtcttacagtatagtttgaagttgggcgatgtctccagctttgttctttttgcttaggattattttctgctgaggcatttactatgttcagcttgctttataaaatgtggatttttcaaccctgcaaggctataggcagagattgactatttcataagatcttattttccttaatccttgatttcagrttgatcacttataacttacacactccaatgttttatatttatttttcttattatacattctagtactacatgcttcttcagcctatattctgagatccaatgtatagcagtaatagcttgatgaaatgttttgccaccacataaaatgagataccaactttcagctggggatggctatccattcactaacattgttttattatacatacagtaagctctacatgtaggttttataaattgt

SEQ ID NO: 549876 - DNA, 553 bp, Homo sapiens
gtagagatggggttggtttcaccatgttggccaggctggtctcaaactcctgacctcaggtgatccacccaccttggcctcccaaagtgctgggattgcaggcatgagccactgcgcgtggctgaaatttttaataactccccccactccccgacatcccaaattaagattaaagactttgtttaaacaccagaatcagctaactttaggaaagaatcttaaattgaatcaagaatttaaagataagggtttcttgggaatgcacttcaataccatattaaaaataatgcagaatctccacccttacaagtccccaaaaaggaaaaccaaatatgtaaaccgggcagggttggagggrtgggagttccttccagttctgtaatctcaccagcagtgaaaatggagatttttacttcaccaatgtaatcttgtgtttatatatttacataaaaaactagaaggcaaagtttaaggccttgaattttacatgtttttgtggagtcttttcctgagacccctttgtccctatagagataacatccccattctgtta

SEQ ID NO: 549877 - DNA, 645 bp, Homo sapiens
gcaaaacataaaagaacttacaggggttttataaggttacattaggacaaaaggaaatgtactttttattaaaatttttattttagaaaattttaaacatatataaaagagagaggaaatatgataaactcccacatacttatcacccatctttgttcgtttgatgtatatgcctcagctactccccctaccaaactagatgaagtctcagacattatctcgttttgatttgtaaatacttcaatatgtactgtaagagacaggacttaaaaacataaccacaatgccatgatcataccttaaaataatcaattcttagcatcacctaatattcaartagcactaaattaaagcataaaaatgtctttgtacagttagtttaaatcaggatctaaataaggcctacatatttcatttggctgataagccttttaggtttcttctaataaccagcccctcccctcttttaaaattttttctagccatttgtttgttgagaaaacttggtatttgtgtagtagaatttcccctattctggactgcaccccgtggtcaatcaatttcccctgcatttcattgtaaactagtagttatatctagggatgtgatgaagtccatgtttgaatttttggtgaccatcacaga

SEQ ID NO: 549878 - DNA, 602 bp, Homo sapiens
aggataacaaataaaaggtgtaataatattttatcattcccacctagtagttaacatattacgcatctatttaacatatttaggttggtgcaaaagtaactgcggttttgccatttaatgtaatagtcttgaaagtaatatatttgttaaatgggcttcaagagattatttgtatacttgagttactttaataataataattatagaggcaagtattcactgagcaccatcaatatgccagatataaaatgcattatgagaatttacttgcgttcctaataacaacaaaaataaacctaattgtgtagatgaagaaagttgagtaaccacctaaggtcacacagatcataagtaatagaactggaattcaaaccaaggaatcttaggctctagaacagaggttttcarattggacatgactgacattttaggtgacaaaattctttcatgagggtaggggtgttctgtgcatcattgaatgttgagcagcctccctggcctctgcccactagattccagtggcatcttcctagctggggcaaacaaacatgtcaccagacatttctttcttttttttttttaattaaaaactttttaattgg

SEQ ID NO: 549879 - DNA, 1972 bp, Homo sapiens
tgacaatattattattggctaacaccagctgactctatgcttgtgactatgttaaccttatgggtaatatgatttggatactgcactcatagtctcttgcttgttacatcttaaagtcagtgatgcatatttacttgaaaaagtcagaaaaccctgacttcatgttttctcccaaatctcagtgacttcaataatatattttatttctcatctatgccacaatccatcatgctcagcaggtgagttcttctccatgaagtaattaaaaaatttcagctccttcaatataatacctatagcattttctaaaacattccagctccatttagaaatatacatctaaaaatatatatacacattctgtttagcttttttaacttttatttgccagataccaaagtaaaagaagaactaatggacacatgaaagatttttaagtatctggataagaagtagaatatgttacattggccccatttcaacagccagaacagtcacatagccccataaaactttaagggaggtttggagcttactttacgtattcacacagaggtaaaggaaatggcctttggagattacactgatgttttctcagacatagcacatgtgcagagtacaaacacttgaccgattcatgtgaaagaaaatatcaatagtgaatgactgtgtttgagcctcataatgctccagtgagattgatatgtattatcagattaagaaagtgagacacaagtgatttaccaaggtcccccgctgaaataaatgaagaatcaacattctacatcaggaattgtgaccttgaaattacaatgggcctatgcatttcactctcagttgctgcaagtgctgaatgataaggaattgcacctgcatccttcggcatgtatgagtagtggagtcctctgtggaaggcttcacagaatattgcctttgaaggaaggatatcacactacttggaggtatagccaatgattaatatatgcagtgatataacggctttctgggtgtgaaaactcacacaaatcactgccaaactctccatgggattgagctgagaccttacttgttgaaactgtgtatttacctagtttcttctcttgctcgatcctgcatcccttactcccttacaagtttctccacagaacgctctctttactaagctccacagaacgctcacatgctgatggatccatatattacaggttacttctcagccagttggtagcaatagtttcctatttctgttgtaacaaattacatatttattatcttatgtttaggtatgtccgaaatttaacatgtaatttcacaaaaatcgggtgttgtcagggttgcatkatattctcgtggctctaggggaaaatctgttttcttgccattcccagcttcttcaggtatggagcccacattccttggtttatggcctccatcttcaaagtcagcaatgaagactaaagtctttttcatattacatccctgtgaccactcttcttcctccctctttcacttttaagaacgccggtgattacatcgggcacacctggataacccaggttacttttcttgttttaaggtcagttgattagtgaccttaattacagttgcaatctcatttccccctttctagggaatgcaatatattcaaaggttctggggattagaatgtggacatctttgcagggggtgtgcattgttttgcctgtcacaccaactatagacagttggggataggagtaggaaaaagactctttaagtacaggatactgatcatggatcatttaccagcaagtagataatgaggactccatcactggtaataggtagagcattgataatctctgacccatagaacaggtagaagatggttcattaccttgtgcatagtctctgccatttgagggatataaggcagatattaatttaaaatgctgtggaactgagtggctattgataagaggcttttgttgag

SEQ ID NO: 549880 - DNA, 566 bp, Homo sapiens
tgctgcaataaacatgagagtgcagatatctcttcgatatactgattttatttcttttggatctatgcccagcagtggaattactagatcatatgatagttatatttctcattttttgaggaacctccatactattctccataatgactgtactaatttacatttctatcaacagtgtacaatggtcatcctcattggtattccttattgcctgtcttttggaaaaaagccattttaacaagggtgaaatgacatgtcattgtagttttgatgcgcatttctctgatgattagtgatattggccatttatatgtcttcttttcagaaatgtctattcagaccttgacccatttttaaattggattatttaatttttttcctattgtttgaacttcgtatacmatgtggttattaatatcttttcagatgggtactttgcaaaagggtaaactatgtattttaatgtatatgcgctttgcatgagtttttctcctgcttcagattttttccttcatattagcatccaacaaatttatattttttttatgaatcaattgttttagcac

SEQ ID NO: 549881 - DNA, 566 bp, Homo sapiens
tgctgcaataaacatgagagtgcagatatctcttcgatatactgattttatttcttttggatctatgcccagcagtggaattactagatcatatgatagttatatttctcattttttgaggaacctccatactattctccataatgactgtactaatttacatttctatcaacagtgtacaatggtcatcctcattggtattccttattgcctgtcttttggaaaaaagccattttaacaagggtgaaatgacatgtcattgtagttttgatgcgcatttctctgatgattagtgatattggccatttatatgtcttcttttcagaaatgtctattcagaccttgacccatttttaaattggattatttaatttttttcctattgtttgaacttcgtatacaatgtggttattaatatcttttcagatgggtactttgcaaaagggtaaactatgtattttaatgtatatgmgctttgcatgagtttttctcctgcttcagattttttccttcatattagcatccaacaaatttatattttttttatgaatcaattgttttagcac

SEQ ID NO: 549882 - DNA, 587 bp, Homo sapiens
ggttaagctcttcaatcctcagtccccttggcttggagagctgcccagatatgcgaggatgcaaaggttctcgatttctcatgtttgtgctgaagcttcccaattgtgtctgcagcctgctacctcagcattactcataaaagtattgttttagtttctagtgaagtgaaaaaggggaactatggttttccttcccataccagttgagaaattatttaaagacagagatccttaaatgcttgttttaaggaagcaygcttctaaaaatgacacacttcaccctcctttggcgatgagttcaggaaggcttcctgcaggtagcatctgacggtggctaagccagccatgcaggctcagacctgggggcagaaactgaatgtcaaaccccttcctgacatgtctaccacgttccttccagcaggtttgaattccgaagtctcagacaaatgaccacactctgggtggtttaaaacaacagggtcaggcgcagtggctcaggcctgtaatcccagcacttttggaagccgaagcaggcagatcacctgaggtcaggggttagagaccagccttgccaacatggtgaaaac

SEQ ID NO: 549883 - DNA, 638 bp, Homo sapiens
taatcctctcttggtccccactgaccttgtgctgtgtggttcagttcctaacaggtcaccatccggtactggtccacagcttggggattggggaaccctgctttacataaccagactccttctagagtagcctgattccagttcatctcccataacattactagactggtactcctaatgtacaaatctgaccatgttgctcgcctatataaagcatgtaggccaaacacattagcgtagtaataaagccctttatttatagctcactcctgccttctgttccagtcacatatgctgggcttctcttatttctaagacatagaagccaaaataaactatctagagtttctcaattttcagtgttcttcaattccaccaaaatgatgttttctctgcttagaatgtccagctccttttttttgtttttgttttggtagctaatccatacatgccttttatagtcaaattcacctggataacaaaaacatagtttttaatttaccagttttgtgttcaagatggcgttcatctttctgagattaagttattrcctgtgtaaaatgaggaaaattaaaaatggtctcatagaaaaaaaagagttagcaaagttttcctataaagggacattctgtaaacca

SEQ ID NO: 549884 - DNA, 1082 bp, Homo sapiens
gcaagaaacctagacatccttaaatgtaaaaaggctgtttaattagattttccttgatatttatcctaattttgaagaacaatgtattaaacatttcttattctcacattcttatcaaacattatttaaatataataagtttaacccatgaaacatgagtatcaaaattagttattatggattaaattaacttgtaatttgggaggttagataaccctccaatatatttctgtaatgtatttactttcatattcttctggctgaaactctacctattattgctttaagtcagcagtccccagcctttttgacactggggatcagtttcatggaagacaatttttccatagactgagattgcgggagagatggtttcaggatgattcaagcacattacatttattatgtacttcattattattattattattattaccattgacatatatagtgaaataattatacaactcatcataatgtagaatcagtggragtcctgagcttgttttcctgcaactagaaggtcccatctgggggtgatggaagacgtgacagatcatcaggcattagattctcataaggagcaggctgactagatccctggcatgcacaggtcacaataggtttgtgatcctctgagaatctaatgctgtcactgatctgaaaggaggtagagcgtaccagtaatgccagccatagggaccagctgtgaatacagaggaagcttcactcactcacctgctgcttaccttctgctgtgtgtcctggttcctaacaggccacagacccgtacaggtctatggcccaggggttggagatccctgttttaagtggctgtgataaagtattaaaatgttaagttccactaatgtatcaaagtgcaatagaagttatgttccaaagtgtgtttctacactaagaggaaatttattaaattatcaaattggtaactggttactagttttttatgatccacacctgtattaaacctataaaaggtttctgactttaagctgagaaattaaaggatgaattatggactggctagcttctgaaaacgaaatggcctagctggacagagg

SEQ ID NO: 549885 - DNA, 690 bp, Homo sapiens
gtagtttttgttgtggttttctagtttgactgaaaatgtagaagattgcaatagtcgtgttcctgagtttgacacataatcatcattgatccctgaaaggctgctgtttttctaatgtatttattcttttcattcctatagctcattccatttcttaatgcaaacattttaatgttttgtttacatgtattcttgagaatgtgtatcttttaactttacagaaatgtaaattatatgctttgttttagttctcatctcttttttcctactcagcactgtttttgaagttatctattactttgtatacatctagtcctttgcttccaactcttatrtaattctttgtgtgcgtctaccagtctttctactcctacattgctaggcatccagattgcctccagctccttgcaacacatgcagcattagacatttctcttctggacctctgtgagcatgtctttgacatatataaatgtctccttcatttaactaagtgtactgccaggttatctccaaaatagctgccctgctgtatattagtagagtttttttctctatcatacgagcactcaggattctctgcttgaagactctttaggaataagatgtttgctctcaaatatatgaagaaatacctattgtagagttagccttccataatttattgaacctaaagcacctctgttgtaa

SEQ ID NO: 549886 - DNA, 586 bp, Homo sapiens
gtgtaaattcagagatatttcaaatatctagcctattatatcagttagctctttctgcataaacgtacaatccagaatttagcrgcttaaaaaaatcacatttgatttagcttattcttttgtgtgaggtctgggatgacgcttctggtctgggtcaattcagctgggttgtgttttctgtgattgcttcatgatttgtctggtcattaggagactgccatcacaatggggctggggtttcaccaggcagttgtgttggttgtgaatcttgcatatgttaaccggtggacatatgcaacacattcttaggtgctatggactgagttatggtccctgccccaaattcttatgctgaaacattaaccctcaatgtgactgtattgagaaatagggcttttaggaagtaaagttaaatatgctcataaggatagggtcctaatccaatacaattggtggattcataacaagaggaagagattttctgtctctatttctctatgtctctctagcaagcaccaaggaaggccatgtgagaatacaatgagacaaccatctgcagtcaggaagagagccctcattagaaacc

SEQ ID NO: 549887 - DNA, 586 bp, Homo sapiens
gtgtaaattcagagatatttcaaatatctagcctattatatcagttagctctttctgcataaacgtacaatccagaatttagcagcttaaaaaaatcacatttgatttagcttattcttttgtgtgaggtctgggatgacgcttctggtctgggtcaattcagctgggttgtgttttctgtgattgcttcatgatttgtctggtcattaggagactgccatcacaatggggctggggtttcaccaggcagttgtgttggttgtgaatcttgcatatgttaaccggtggacatatgcaacacattcttaggtgctatggactgagttatggtccctgccccaaattcttatgctgaaacattaaccctcaatgtgactgtattgagaaatagggcttttaggaagtaaagttaaatatgytcataaggatagggtcctaatccaatacaattggtggattcataacaagaggaagagattttctgtctctatttctctatgtctctctagcaagcaccaaggaaggccatgtgagaatacaatgagacaaccatctgcagtcaggaagagagccctcattagaaacc

SEQ ID NO: 549888 - DNA, 781 bp, Homo sapiens
tgatgtgaataacacagaaaagttctaactcacagtgacattaaagaaaaaagcagaatggaataaaatcaaactagcaaagtgtataagtcataagaaaaaattgaccatgactaaagataagactagacaagggtatctacgctttgaaaaagttggtcacatgataagaagttcttttgaaaataagctttattttttattctttggtcaaaaatgggcaatgattaaaaatagcttattaatttttcaaaaaaatgcattaaaagagcaacataatagcagatccaaagcagtttatgcaaagttacccttataaaacgtcacaattaggaggctagtatgagtctcttatatactctggttrtatcactaatactgcacttagaagcctaaagctttcttctttatttgaagaaatgtatattccgttagggcacaattatttgattccatactgaaagtgtctgtaggtaattttatggaagaaaggaacttctagagacaaaatgaagctaagctgggcctagagttgatacctttggccagaaatattagggcagtccttttatttaaaaaaaaaaatcttgacatgaataaagcagcagaaaggacatagtatgattctacttctatgaggtacctagaatacgaacattcatggagttagagagtagaactgaggttacaagggactgggggacaggaaggttcagggagttattgtttaatgggttcagtatttccatttgggaggatgagaaagttctggagatgaaca

SEQ ID NO: 549889 - DNA, 781 bp, Homo sapiens
tgatgtgaataacacagaaaagttctaactcacagtgacattaaagaaaaaagcagaatggaataaaatcaaactagcaaagtgtataagtcataagaaaaaattgaccatgactaaagataagactagacaagggtatctacgctttgaaaaagttggtcacatgataagaagttcttttgaaaataagctttattttttattctttggtcaaaaatgggcaatgattaaaaatagcttattaatttttcaaaaaaatgcattaaaagagcaacataatagcagatccaaagcagtttatgcaaagttacccttataaaacgtcacaattaggaggctagtatgagtctcttatatactctggttgtatcactaatactgcacttagaagcctaaagctttcttctttatttgaagaaatgtatattccgttagggcacaattatttgattccatactgaaagtgtctgtaggtaattttatggaagaaaggaacttctagagacaaaatgaagctaagctgggcctagagttgatacctttggccagaaatattagggcagtccttttatttaaaaaaaaaaatcttgacatgaataaagcagcagaaaggacatagtatgattctacttctatgagrtacctagaatacgaacattcatggagttagagagtagaactgaggttacaagggactgggggacaggaaggttcagggagttattgtttaatgggttcagtatttccatttgggaggatgagaaagttctggagatgaaca

SEQ ID NO: 549890 - DNA, 606 bp, Homo sapiens
tgttgaattcaccccgcatctgttgggtattccaacaaaagcctggcttccctcatgcttgcttccagagcctcaccccacagtgtgacccaggaggcttgcatgacctggtttctgtaaattctaggtcmgttccaaagttcatgaagaggatgaaagttcccgactacaaagacaaggctgtctttggcgttcctctcatagtccacgtccaaagaacgggacagcccctgcctcaaagtattcagcaagcactgagatatctacgcagcaactgcctcgatcaggtagggctgtaacccccccgctgctgccccaccacccccaaccatgggattggattgaggggatgtcagactgagtcagatctgcccaatatcaggcaagacatgcctcaccaaaaataaaaggcattgtgacctttatgtagcaatatttaatttgaacaagacatgtcctatttgaggatgtttcctcattggcaacttaaatgatgacctggagtgactggggaaagttgacgttaacagtttgttcctgggatgtctaatttgcaatccctaaaaactagagttaagctatgtactgtactgcatttcctttgta

SEQ ID NO: 549891 - DNA, 448 bp, Homo sapiens
tctgctcatgaataggtcttctgaacttgattacaaactccccaaaggcatagattataccctgttatttccaagatataacaacagttctagtagtgtttagtacatgtaggctatttttttagaagttgaaagtagagaacaatgtcatagaatgacatcaacccaattttctgaagtactgtggtaggctgaataatggtatcccaaagatgtccatgtcccaatccctggaacctgtgaatgttacttgtrtggcaaaagggactttgcagatgtgattaatttaaggatcttgagatgggaagattactctggattatccaggtgggcccactgttatcataacagttcctataagaggatgcgggaggagtcaaatcagagaaggtgatgtgatcctggaaggagagataagagtgatgtgctttaaagatggaggaagggg

SEQ ID NO: 549892 - DNA, 822 bp, Homo sapiens
catcacttacttgcaattttggatttaacttctgaaaatctgaaagacaaaaaccaaccatgaggtttgttagttgtgataaacatcctatggcaatgtaagatgctaaccaaatgggaaactgggtgcaggagatacgagaaccatctgtactatctttgcaacttttctgtaaatccaaaaccaytataaagttaaaaggttattgtaaaaagaaaaaagacaaaatcagaggagagaattctgataggaagcatgccaggtgataaaacttaatgtaggtaggtagctggttctcatttaggaaattcacattgaaaatcaattctctttttaaagaatcaactgctctgcataagacactaacaacccagccagtcccaaaactgacttactgttcttacttttatttgctggcattttaaatacacttgattatttgtctccctccccattcccatggttggtatttttaaaaataaagttccatcattattattcaaaagaaaaagatgatcaaataatatattatatgatgatatattaatgacaaatgataagacccagcaatgtgcctagcagagtagccattcaatctttacaaattaaaaaactaaaataccacgcagtagaattttttcaaatctcaaatatctaagtgaaatgcatagcatgaaaaagaaatattttaagattgtgtgcaattgtttgaagagagaggagagtggctggcaaaagagatgccaaagacaaatgaagaaggaaacaaaaatctagagtgttatacaaaaatgatgtatcaaagtcacagtagatcagatc

SEQ ID NO: 549893 - DNA, 822 bp, Homo sapiens
catcacttacttgcaattttggatttaacttctgaaaatctgaaagacaaaaaccaaccatgaggtttgttagttgtgataaacatcctatggcaatgtaagatgctaaccaaatgggaaactgggtgcaggagatacgagaaccatctgtactatctttgcaacttttctgtaaatccaaaaccattataaagttaaaaggttattgtaaaaagaaaaaagacaaaatcagaggagagaattctgataggaagcatgccaggtgataaaacttaatgtaggtaggtagctggttctcatttaggaaattcacattgaaaatcaattctctttttaaagaatcaactgctctgcataagacactaacaacccagccagtcccaaaactgacttactgwtcttacttttatttgctggcattttaaatacacttgattatttgtctccctccccattcccatggttggtatttttaaaaataaagttccatcattattattcaaaagaaaaagatgatcaaataatatattatatgatgatatattaatgacaaatgataagacccagcaatgtgcctagcagagtagccattcaatctttacaaattaaaaaactaaaataccacgcagtagaattttttcaaatctcaaatatctaagtgaaatgcatagcatgaaaaagaaatattttaagattgtgtgcaattgtttgaagagagaggagagtggctggcaaaagagatgccaaagacaaatgaagaaggaaacaaaaatctagagtgttatacaaaaatgatgtatcaaagtcacagtagatcagatc

SEQ ID NO: 549894 - DNA, 822 bp, Homo sapiens
catcacttacttgcaattttggatttaacttctgaaaatctgaaagacaaaaaccaaccatgaggtttgttagttgtgataaacatcctatggcaatgtaagatgctaaccaaatgggaaactgggtgcaggagatacgagaaccatctgtactatctttgcaacttttctgtaaatccaaaaccattataaagttaaaaggttattgtaaaaagaaaaaagacaaaatcagaggagagaattctgataggaagcatgccaggtgataaaacttaatgtaggtaggtagctggttctcatttaggaaattcacattgaaaatcaattctctttttaaagaatcaactgctctgcataagacactaacaacccagccagtcccaaaactgacttactgttcttacttttatttgctggcattttaaatacacttgattatttgtctccctccccattcccatggttggtatttttaaaaataaagttccatcattattattcaaaagaaaaagatgatcaaataatatattatatgatgatatattaatgacaaatgataagacccagcaatgtgcctagcagagtagccattcaatctttacaaattaaaaaactaaaataccacgcagtagaattttttcaaatctcaaatatctaagtgaaatgcatagcatgaaaaagwaatattttaagattgtgtgcaattgtttgaagagagaggagagtggctggcaaaagagatgccaaagacaaatgaagaaggaaacaaaaatctagagtgttatacaaaaatgatgtatcaaagtcacagtagatcagatc

SEQ ID NO: 549895 - DNA, 822 bp, Homo sapiens
catcacttacttgcaattttggatttaacttctgaaaatctgaaagacaaaaaccaaccatgaggtttgttagttgtgataaacatcctatggcaatgtaagatgctaaccaaatgggaaactgggtgcaggagatacgagaaccatctgtactatctttgcaacttttctgtaaatccaaaaccattataaagttaaaaggttattgtaaaaagaaaaaagacaaaatcagaggagagaattctgataggaagcatgccaggtgataaaacttaatgtaggtaggtagctggttctcatttaggaaattcacattgaaaatcaattctctttttaaagaatcaactgctctgcataagacactaacaacccagccagtcccaaaactgacttactgttcttacttttatttgctggcattttaaatacacttgattatttgtctccctccccattcccatggttggtatttttaaaaataaagttccatcattattattcaaaagaaaaagatgatcaaataatatattatatgatgatatattaatgacaaatgataagacccagcaatgtgcctagcagagtagccattcaatctttacaaattaaaaaactaaaataccacgcagtagaattttttcaaatctcaaatatctaagtgaaatgcatagcatgaaaaagaaatattttaarattgtgtgcaattgtttgaagagagaggagagtggctggcaaaagagatgccaaagacaaatgaagaaggaaacaaaaatctagagtgttatacaaaaatgatgtatcaaagtcacagtagatcagatc

SEQ ID NO: 549896 - DNA, 822 bp, Homo sapiens
catcacttacttgcaattttggatttaacttctgaaaatctgaaagacaaaaaccaaccatgaggtttgttagttgtgataaacatcctatggcaatgtaagatgctaaccaaatgggaaactgggtgcaggagatacgagaaccatctgtactatctttgcaacttttctgtaaatccaaaaccattataaagttaaaaggttattgtaaaaagaaaaaagacaaaatcagaggagagaattctgataggaagcatgccaggtgataaaacttaatgtaggtaggtagctggttctcatttaggaaattcacattgaaaatcaattctctttttaaagaatcaactgctctgcataagacactaacaacccagccagtcccaaaactgacttactgttcttacttttatttgctggcattttaaatacacttgattatttgtctccctccccattcccatggttggtatttttaaaaataaagttccatcattattattcaaaagaaaaagatgatcaaataatatattatatgatgatatattaatgacaaatgataagacccagcaatgtgcctagcagagtagccattcaatctttacaaattaaaaaactaaaataccacgcagtagaattttttcaaatctcaaatatctaagtgaaatgcatagcatgaaaaagaaatattttaagawtgtgtgcaattgtttgaagagagaggagagtggctggcaaaagagatgccaaagacaaatgaagaaggaaacaaaaatctagagtgttatacaaaaatgatgtatcaaagtcacagtagatcagatc

SEQ ID NO: 549897 - DNA, 822 bp, Homo sapiens
catcacttacttgcaattttggatttaacttctgaaaatctgaaagacaaaaaccaaccatgaggtttgttagttgtgataaacatcctatggcaatgtaagatgctaaccaaatgggaaactgggtgcaggagatacgagaaccatctgtactatctttgcaacttttctgtaaatccaaaaccattataaagttaaaaggttattgtaaaaagaaaaaagacaaaatcagaggagagaattctgataggaagcatgccaggtgataaaacttaatgtaggtaggtagctggttctcatttaggaaattcacattgaaaatcaattctctttttaaagaatcaactgctctgcataagacactaacaacccagccagtcccaaaactgacttactgttcttacttttatttgctggcattttaaatacacttgattatttgtctccctccccattcccatggttggtatttttaaaaataaagttccatcattattattcaaaagaaaaagatgatcaaataatatattatatgatgatatattaatgacaaatgataagacccagcaatgtgcctagcagagtagccattcaatctttacaaattaaaaaactaaaataccacgcagtagaattttttcaaatctcaaatatctaagtgaaatgcatagcatgaaaaagaaatattttaagatwgtgtgcaattgtttgaagagagaggagagtggctggcaaaagagatgccaaagacaaatgaagaaggaaacaaaaatctagagtgttatacaaaaatgatgtatcaaagtcacagtagatcagatc

SEQ ID NO: 549898 - DNA, 1333 bp, Homo sapiens
gtgtgtgaatcccacaagagcagcggtgtgtcttgtagccccagcccccgaaaaggatgcccaacctgtctttgccgcccagtaaatactgggatgaatgggcctgccgctgactgcttcccacctccctggaaaagctgggactcagagagacccaggccattccctctgagctgtgtgctcctggtgcatctgacatgtttgctgctgtggtgtcctcggggttgttggtgtcatcatctctctgagatgtccagccagggaagggtgtcctctagggaagtggggggcgatgagaatggaagtagctataggtcctggctcccacctttcagtgagcttatgggaggcaatgcttcttagggggtgtggcctggtgccaggtatgagaacgtgtgagtagcatctttagggaccgctgataggacttgggactgactggttattgggctgcaggtgctgagcttgcagccctagcctaggggattgtctaccgcaggcctcaccagaggctccccagccatgcttcccagccttctgagaccttgaggcccggtagagcgtgtgctctgcaaggttctgctgcccttacactgggggattctgttactggaagcaagtcgggattaaatgtttctgaaatgcaattgcagttgacctgcataagtcacttggggaatggccaggagaacagggctcaccgtggatgttctgtgtggccccgagaggccagtgaagccgcagagctggggctgtccaggaagggctgtcgcagccctagagggccctggagtaccagcctgttctccaggctgagcccagggggtttcttggtagaaggatactctaagaggtctgtttagtgctggtatttatttcccctcttcaaagtttctccctgcgtctgggtcctgtgtctctggttcttaagaggacctgttgactgatactgagagaccttttgttkgttactcctgaccgagctgctgggaggccacgctcagggtggggtgtcttcaacccaggaaccctcaaagccaaagtgcttgtcaacagtgttgtttaaaagcaggcttctcccatttcctcttcccttgcctgtgtctggatctaggaaagctcacctgccctgtgttctggcaagctgttttcctctcgatgggacgctgatgtctgctgagcagattcacctctttgaaagcagcagggacgttgtatttctcaaaacatactgcagcttcgatctgattttaggtttctgcgggctgtggggagggttcctcagaggcaggtgagacaggaaggggccacggggcggtggtgtctgcttggc

SEQ ID NO: 549899 - DNA, 957 bp, Homo sapiens
tattaattgtaataggaaaataactatcaatgtgtaatgaaaattctgaagaatactcaagtactcaagggctgagtgagggtatccacggaaggaacaaacttagaagagggtccccactccccataactagggttcaggccttattggaattatggctgcagcccactggatggcaaagtagttctccctgtggttgctggggcttaaggggctcgaggttgagcatacacagtcagttgggacattgagaatctcattaccagcagggcctgcacaaggaaagccctcctgagtgtaagtagacatgcaggggaagttggaatattggcagctggctctccagaaggcaggcatgaggtctggggtgtgcagcctcatgctgggaaaactacagagaggaggtcactaagctgacgctggggctgtgagctagacaagggtctgtctgctcttggcacatacytggggcagaggacccctggatatccatagccacactactggcagccgtgcattcacagtaagaagaaacaaaaccataagcccgcccttgtgcactgtccttccagcactctccactcacaaaattaacatcacataaagaagaaatgccgaaggcaagcttgttcaacatcaacatgtggcccaggatggctttgaatgcgggccaatgcaaatttgtaaataaggtttttgttttgttctgtttttttgttttgttttgttttgcgattcagctcatcagctattgttagtgtatgttatgtgtggcccaagacaattctttcaatgtggcccagggaagccaagacattggacacccctggcctaaagggttaggctccaatattgcagatcaagtaatgaagaggtaatttagagctgggagagaatctggtaactggcacactcaatactcggggatcttcataaagaataaaacatggcagaagc

SEQ ID NO: 549900 - DNA, 957 bp, Homo sapiens
tattaattgtaataggaaaataactatcaatgtgtaatgaaaattctgaagaatactcaagtactcaagggctgagtgagggtatccacggaaggaacaaacttagaagagggtccccactccccataactagggttcaggccttattggaattatggctgcagcccactggatggcaaagtagttctccctgtggttgctggggcttaaggggctcgaggttgagcatacacagtcagttgggacattgagaatctcattaccagcagggcctgcacaaggaaagccctcctgagtgtaagtagacatgcaggggaagttggaatattggcagctggctctccagaaggcaggcatgaggtctggggtgtgcagcctcatgctgggaaaactacagagaggaggtcactaagctgacgctggggctgtgagctagacaagggtctgtctgctcttggcacatacttggggcagaggacccctggatatccatagccacactactggcagccgtgcattcacagtaagaagaaacaaaaccataagcccgcccttgtgcactgtccttccagcactctcyactcacaaaattaacatcacataaagaagaaatgccgaaggcaagcttgttcaacatcaacatgtggcccaggatggctttgaatgcgggccaatgcaaatttgtaaataaggtttttgttttgttctgtttttttgttttgttttgttttgcgattcagctcatcagctattgttagtgtatgttatgtgtggcccaagacaattctttcaatgtggcccagggaagccaagacattggacacccctggcctaaagggttaggctccaatattgcagatcaagtaatgaagaggtaatttagagctgggagagaatctggtaactggcacactcaatactcggggatcttcataaagaataaaacatggcagaagc

SEQ ID NO: 549901 - DNA, 957 bp, Homo sapiens
tattaattgtaataggaaaataactatcaatgtgtaatgaaaattctgaagaatactcaagtactcaagggctgagtgagggtatccacggaaggaacaaacttagaagagggtccccactccccataactagggttcaggccttattggaattatggctgcagcccactggatggcaaagtagttctccctgtggttgctggggcttaaggggctcgaggttgagcatacacagtcagttgggacattgagaatctcattaccagcagggcctgcacaaggaaagccctcctgagtgtaagtagacatgcaggggaagttggaatattggcagctggctctccagaaggcaggcatgaggtctggggtgtgcagcctcatgctgggaaaactacagagaggaggtcactaagctgacgctggggctgtgagctagacaagggtctgtctgctcttggcacatacttggggcagaggacccctggatatccatagccacactactggcagccgtgcattcacagtaagaagaaacaaaaccataagcccgcccttgtgcactgtccttccagcactctccactcacaaaattaacatcacataaagaagaaatgccgaaggcaagcttgttcaacatcaacatgtggcccaggatggctttgaatgcgggccaatgcaaattygtaaataaggtttttgttttgttctgtttttttgttttgttttgttttgcgattcagctcatcagctattgttagtgtatgttatgtgtggcccaagacaattctttcaatgtggcccagggaagccaagacattggacacccctggcctaaagggttaggctccaatattgcagatcaagtaatgaagaggtaatttagagctgggagagaatctggtaactggcacactcaatactcggggatcttcataaagaataaaacatggcagaagc

SEQ ID NO: 549902 - DNA, 1491 bp, Homo sapiens
acaaaaattatgtttagggctctcattgacttcaactccaaaccatatgttacttcttttaaaaacataatttctaaaaaaaaaaatatatatagagagagaggcaaatacagtatcttaagatgatactatatttgaaattccaagctaaaaccctggaacaagaagctggtaatattttgggaagcattctttatttttgagtagtctttctgtgtgtaggcctctaagttcccaaagatatcctttggtagcaactgacttactatgtagtagcattatttgattttaagtcatttgatttttttatctgaggagatacctttattataaaaaattttacttgaagaaatttatcttgataagcaaatgtaaggctgtcacttttgcttattggcattaaataaacatactacagtttttccatttaaaaatgtgggttatttgattatgccagagtagttacaatcaagaactaacaaacatttgtacttaatgtactgaaaggtctttgcccactttttaaaagttctcttgcagaactacaactctgtgaagtactacatttataagccaaaacatttttaacaaagaagaaaaattcccatcattcatttaaccaaatacagtagtaaactttgtctttaaaatggggaggcttgttattatagttgcttttgtttttgttatacctgtggtttttgctgtgtttttttagaagttgaagggagcgtgctctctctgggggttcagttaattgcagtgagtaaatcaatattcagcaatcatgtcttttaaagccctttctaatcttgagattttatgattctatatttacctttgcctctgctttttccttcagtgataagagtgcagggattatgtaggggttgagatggggaatgaattgggctagtggtttaggaggtgatgggcattaagtgggagttgaaaacatgttgtggttgattctaagagggrcaattgctattggcttctgctttttttgtagttttttttttcaatactaaatacatgttcttaattgtaattatttttcaaattaggggaaaaaaggaagaaaaagataaacccaaagataaaaataatttttgaaagtcaccttctcatagcttcctccaaacagacaatcccttaattcttagaaatgggccaatatataaatcatcaaaaagatgattaagaataggctttgaaaagaattttggaggagataaggtatttttcacgggattatgttatttattggctcataagtttcctgaaagatagaatttatttttggtgataagattgaatttaaggtagatattttatgtcccttggagctagacagtcttttttatcttttgtgttcccagccccaaatataccacctaacctatactaggtactcaaaaattgtttcctgagcttaacacagtactcattcttggtggaaataacagcaagataatcccggtgtaaaag

SEQ ID NO: 549903 - DNA, 1491 bp, Homo sapiens
acaaaaattatgtttagggctctcattgacttcaactccaaaccatatgttacttcttttaaaaacataatttctaaaaaaaaaaatatatatagagagagaggcaaatacagtatcttaagatgatactatatttgaaattccaagctaaaaccctggaacaagaagctggtaatattttgggaagcattctttatttttgagtagtctttctgtgtgtaggcctctaagttcccaaagatatcctttggtagcaactgacttactatgtagtagcattatttgattttaagtcatttgatttttttatctgaggagatacctttattataaaaaattttacttgaagaaatttatcttgataagcaaatgtaaggctgtcacttttgcttattggcattaaataaacatactacagtttttccatttaaaaatgtgggttatttgattatgccagagtagttacaatcaagaactaacaaacatttgtacttaatgtactgaaaggtctttgcccactttttaaaagttctcttgcagaactacaactctgtgaagtactacatttataagccaaaacatttttaacaaagaagaaaaattcccatcattcatttaaccaaatacagtagtaaactttgtctttaaaatggggaggcttgttattatagttgcttttgtttttgttatacctgtggtttttgctgtgtttttttagaagttgaagggagcgtgctctctctgggggttcagttaattgcagtgagtaaatcaatattcagcaatcatgtcttttaaagccctttctaatcttgagattttatgattctatatttacctttgcctctgctttttccttcagtgataagagtgcagggattatgtaggggttgagatggggaatgaattgggctagtggtttaggaggtgatgggcattaagtgggagttgaaaacatgttgtggttgattctaagagggacaattgctattggcttctgctttttttgtagttttttttttcaatactaaatacatgttcttaattgtaattatttttcaaattaggggaaaaaaggaagaaaaagataaacccaaagataaaaataatttttgaaagtcaccttctcatagcttcctccaaacagacaatcccttaattcttagaaatgggccaatatataaatcatcaaaaagatgattaagaataggctttgaaaagaattttggaggagwtaaggtatttttcacgggattatgttatttattggctcataagtttcctgaaagatagaatttatttttggtgataagattgaatttaaggtagatattttatgtcccttggagctagacagtcttttttatcttttgtgttcccagccccaaatataccacctaacctatactaggtactcaaaaattgtttcctgagcttaacacagtactcattcttggtggaaataacagcaagataatcccggtgtaaaag

SEQ ID NO: 549904 - DNA, 1491 bp, Homo sapiens
acaaaaattatgtttagggctctcattgacttcaactccaaaccatatgttacttcttttaaaaacataatttctaaaaaaaaaaatatatatagagagagaggcaaatacagtatcttaagatgatactatatttgaaattccaagctaaaaccctggaacaagaagctggtaatattttgggaagcattctttatttttgagtagtctttctgtgtgtaggcctctaagttcccaaagatatcctttggtagcaactgacttactatgtagtagcattatttgattttaagtcatttgatttttttatctgaggagatacctttattataaaaaattttacttgaagaaatttatcttgataagcaaatgtaaggctgtcacttttgcttattggcattaaataaacatactacagtttttccatttaaaaatgtgggttatttgattatgccagagtagttacaatcaagaactaacaaacatttgtacttaatgtactgaaaggtctttgcccactttttaaaagttctcttgcagaactacaactctgtgaagtactacatttataagccaaaacatttttaacaaagaagaaaaattcccatcattcatttaaccaaatacagtagtaaactttgtctttaaaatggggaggcttgttattatagttgcttttgtttttgttatacctgtggtttttgctgtgtttttttagaagttgaagggagcgtgctctctctgggggttcagttaattgcagtgagtaaatcaatattcagcaatcatgtcttttaaagccctttctaatcttgagattttatgattctatatttacctttgcctctgctttttccttcagtgataagagtgcagggattatgtaggggttgagatggggaatgaattgggctagtggtttaggaggtgatgggcattaagtgggagttgaaaacatgttgtggttgattctaagagggacaattgctattggcttctgctttttttgtagttttttttttcaatactaaatacatgttcttaattgtaattatttttcaaattaggggaaaaaaggaagaaaaagataaacccaaagataaaaataatttttgaaagtcaccttctcatagcttcctccaaacagacaatcccttaattcttagaaatgggccaatatataaatcatcaaaaagatgattaagaataggctttgaaaagaattttggaggagataaggtatttttcacgggattatgttatttattggctcataagtttcctgaaagatagaatttatttttggtgataagattgaatttaaggtagatattttatgtcccttggagctagacagtcttttttatcttttgtgttccyagccccaaatataccacctaacctatactaggtactcaaaaattgtttcctgagcttaacacagtactcattcttggtggaaataacagcaagataatcccggtgtaaaag

SEQ ID NO: 549905 - DNA, 1130 bp, Homo sapiens
gccgaggcaggtggattacttgagcctaggggttcaagaccagcttgggcaacatgtcaaaaccctgtctctacaaaaaatacaaaaattagcctggcatgatggcatgtgcccgtagtcycagctactcaggagtgaggtgggaggatcatttgagctcagaaggtcaaggctgcaatgagacataatttcaccatagtacttccagcctgggcaatagagcaagactctctctcaaaaaaaacagcacacacacacacacacgaaaacaattctgaactatgaaatctgaaacagccccttggtatctcctgggcatgatttgcaaatcttttttttttacagaaaaaaggcaaagagtaagcactttgccataggttacttggccgtgatcatctatctagtggaaaaggggactgggaagcccaagcagactgggaaaccagacagctaggaaaaggagcaaaacatagcccagcaacctacagatgaagaaagttgagaaatccatttattcaccatagagacgcaggaatttcaggcaatgcactaaaatgaaatgggggaaaaaagcttgatcagtatgggaaccatttttgtgcaaaagggaatattatggatcagccagtatttctttgagctctgcctgtggagtccatttgacctttagaaatatgaggtattctgtcagttttatcttcttggagaaatttctcctaaaatcttgatttgctttagtctggactggttcatagccatcatcttccatcagtaccccagagattcactttgtctcttatgtgggatctgtttccagttagatgccattattttccttttccttggtttactcttccacatattggtaaagctcttccaatagcttttggaaaggaaaaatgaaaagtaaatgttttgaatctctgtgtgtttgacaatgtctttattttacccttatacctgattgctgttttggttggcaaggtataggattctttagtggtctccatgcccagttttgaagacatctgctagctttcagtgctgttgctgtggagtctgaaaatctgtcttctggcttccagggtgactactggaaattgaatgccattctgttccttctcttttgc

SEQ ID NO: 549906 - DNA, 1130 bp, Homo sapiens
gccgaggcaggtggattacttgagcctaggggttcaagaccagcttgggcaacatgtcaaaaccctgtctctacaaaaaatacaaaaattagcctggcatgatggcatgtgcccgtagtctcagctactcaggagtgaggtgggaggatcatttgagctcagaaggtcaaggctgcaatgagacataatttcaccatagtacttccagcctgggcaatagagcaagactctctctcaaaaaaaacagcacacacacacacacacgaaaacaattctgaactatgaaatctgaaacagccccttggtatctcctgggcatgatttgcaaatcttttttttttacagaaaaaaggcaaagagtaagcactttgccataggttacttggccstgatcatctatctagtggaaaaggggactgggaagcccaagcagactgggaaaccagacagctaggaaaaggagcaaaacatagcccagcaacctacagatgaagaaagttgagaaatccatttattcaccatagagacgcaggaatttcaggcaatgcactaaaatgaaatgggggaaaaaagcttgatcagtatgggaaccatttttgtgcaaaagggaatattatggatcagccagtatttctttgagctctgcctgtggagtccatttgacctttagaaatatgaggtattctgtcagttttatcttcttggagaaatttctcctaaaatcttgatttgctttagtctggactggttcatagccatcatcttccatcagtaccccagagattcactttgtctcttatgtgggatctgtttccagttagatgccattattttccttttccttggtttactcttccacatattggtaaagctcttccaatagcttttggaaaggaaaaatgaaaagtaaatgttttgaatctctgtgtgtttgacaatgtctttattttacccttatacctgattgctgttttggttggcaaggtataggattctttagtggtctccatgcccagttttgaagacatctgctagctttcagtgctgttgctgtggagtctgaaaatctgtcttctggcttccagggtgactactggaaattgaatgccattctgttccttctcttttgc

SEQ ID NO: 549907 - DNA, 1505 bp, Homo sapiens
ctaacactatcaatattacttaagccatatcccatttcccttagttttctcagaggtttttctgtgaaccttgtctgaattttgacaaggtctttaaaaaaaaaaaaaaccacacacactttatttgttcaaaattcagacaatgctcacacactacatttgagtgatatctctttaagactttaaaaatcttgaccaggcatggtggtccatgcctataatctcaacactttgggaggccaaggtgggaggattacttgagcccaggagttcaagaccagcctgggcaacatagtggaatcccatctctacaaaaagttttaaaattagctgggtgtggtggtatgtgcctgtagtcctagctactcaggaggctgagttgagaggatcctttgagcatgagagttcgaggctgcagtgagctgtgatcacgccattgcactccaatctggatgacagagtgagatcccgtcttaaaaaaaaaaaacacttaaaaattctataatggtttccctttaaaaaacaattcttactgaggcatgacatatacagtaaagcacctaaatcacaagagcacaactcaatgattaaaaaaatactgcatgtacgcacagtcacacacagacacacatacacacttgtaattactacctagataaagaattccctttttttgtgaatgttatttatttattcagtgatacaatattaaggcaaaatgtttaaaccctcttgtgcctgtttgtatttatttcatgcaataataattcccagtagccttaactgttttcagctatttttaaaatgttgaaatgctaatggaaaagttgtattccactaacatagctaacatgtaggttaacctaaaacaacatttctttgaccttagaacttcatcaatttggtatggtaataagagttatcttctgagaatcacagctctaactagcaatcatagataccatttattagtaaaaatgtaaaacagttattaaataagttgtctttagctacaatgtatgtctctccttttatttagtcagtagtttaaaaacttttttagctttaacagtaggagttaattaggttttttacttacgcactctactcaccccccaagttttgaaataaatgcattttgttctgtgtacaaaagtttcagaaaatgggataactagctagcaggaatattgacgccattgtcatagaaccatagaatttagatttggaatctactttagggataatttaggccaacccgcctcatttaattggtaaagtgaggtagttgttaaaaatatttcctcagagcacaaagayagctagagacaaagatagctagagatttttatgtattatgcattgatacttctaaatcatcttcagtttcaaattggaactttttattagatgaaaaatgaatttttcagatatgatgaccctgcctgccaatctatgattctgtctgggtaccattgccatatttatcttagtgtagtatgtgc

SEQ ID NO: 549908 - DNA, 1721 bp, Homo sapiens
ttgttttctgaactctcaagttagagtggctggggacccttaggacactctatccctccctgagactagaatgggattgaggggtgctcatgaccctcccagcccagttagctccccgcctgctccacaccagccctgctggttcagggtcacgaagcctggccttgggccaggacagtccccttttctggtcagcagcccagtgggtgactaaggctgaaaggcacagatggaggatcccagcttcctccctggctctgtccccgccagggtatgtgacctccaacagcccctctgggactgtacccacctgaagttgtggtggtcctcctggcttgaagggtttctcacccctgccccgccctctcctccgctcagagtcagactcacagggccactggtggctctccccatcttctccagtgcctcatttccctcacacagggaaatctgtctcataggacctagagtaacgtacaaatatggaaaataaaaatactaagtggccrggctcagtggctcatgcctgtaatcccagcactttggaaggccaagggggccaaatcacctgaggtcaggagttcgagaccggcctgaccaacatggcaaaacccctgtctctactaaaaatacaaaaattagctgggcgtggtggtgggtgcctgtaatcccagctacttggaagctgaggcaggagaatcacttgaacccgggaggcagaggctgcagtgaaccaagatcgtgccactgcactccagcctgggtgacagaacaagactctatctcataataataataataataagtaagacccaggtttctgtctgtcttcatcagaagtacagaccacacagatggttacgaaatttgcaagacttatttgggatgatctgacttacaatatgggccaagtgacctttacaaaattcgttttgcaggtttcaggggtccctcaaacatctgggctgtcatccttcggagagactggaactgagacacaaggagagacctagtgatgtgggagagttaggagaagaagcagtgatttcaaacgcatgcccctcacacggaagaagggcagggggaaagccatgcaggtgtgggcgtggcacttgagcagcctctcccatgggcacccagtggttaatgcacaatgtttagcacgtcgcccagggaggccatccccttccgctacccctttcatggcaaatgctgaaacatcgttgaagactcctctcaagggtctcctcttccaggaagccttcggtcaggaataggtgccccttctggctcctcctagcctgaaagccaacatgaaatctccctgggctgagctgagtcgtcatattttgttgttgttgttgctgttgttttactatgcctgtgagacaagttcagagtcatgcttttgatcaagaccagaaaatatactaccttggctccatcagcatcttttcctcaccacacccagaatttgcctgtcccccgaaggaagctccaacggctgtcaagcctgagcatccagaccgtaaagcaaagagaaatgggccgggaggaatggagtgacagggcggggcccatttgcctagaggtgctttgggctgcccggtcacagagggtgactcactcccccagacaggaggggagtggcaccaggggaccattgggctgggcaggggagcctttgtggtgagagcctgtccctgccttaagtgcctact

SEQ ID NO: 549909 - DNA, 534 bp, Homo sapiens
gcataaagcttgagttattgtctgtgacaaaaagggtaaagtgatgtagtagcattatatatgttgtatacaaacatcggcatatayaccctgaatatatagacagatgtctccattttatctcattcgtttaatttaacttgatgtaagtttgtaggacttaaagcacagtaaatcatttgaatggtttcaggacaattctctcagagcaatgttatctgtttggcttaaagccactctgattactcccaatacttggtagaaaaaaatacttagccaaatgttccttattctcttgagattcatttttctgaaagtagacggcagaaaaacagactttgaataatataatggtacttcaagattttaatatttaatttcaatagttcttctaaatggggcaagaatttggcctgtgaacaagaatttggccttttgaattttctttctattttacctgaatttatattgacccgcaaaaacctggaacatcctctgggcaaggtaagatcttgcttttattttttagtagac

SEQ ID NO: 549910 - DNA, 1792 bp, Homo sapiens
  misc_feature 720, 721, 722, 723, 724, 725, 726, 727, 728, 729, 730, 731,732, 733, 734, 735, 736, 737, 738, 739, 740, 741, 742, 743,744, 745, 746, 747, 748, 749, 750, 751, 752, 753, 754, 755,756, 757, 758, 759, 760, 761, 762, 763, 764, 765, 766: n = A,T,C or G
  misc_feature 767, 768, 769, 770, 771, 772, 773, 774, 775, 776, 777, 778,779, 780, 781, 782, 783, 784, 785, 786, 787, 788, 789, 790,791, 792, 793, 794, 795, 796, 797, 798, 799, 800, 801, 802,803, 804, 805, 806, 807, 808, 809, 810, 811, 812, 813: n = A,T,C or G
  misc_feature 814, 815, 816, 817, 818, 819: n = A,T,C or G
agtcttgctctgttgcccaggctggagtgcagtggcacaatcttggctcactgcaacctccgcctcccaggttcaagcgatgctcctgcctcagcctcccaagtagctgggattacaggcgtgtgccaccatacccagctaatttttgtatttttagtagagacaggtttcaccatattggccaggctggtcttgaactcctgacctcgtgatccacccgctttggcctcccaaagtgctgggattacaggcgtgagccaccgcgcctggcaccactttaattttaaaaactcaataaatgatcaattggcatcgatgagaacagtacccccagatccatatggagtactcacatgtagtacttacagattcaggcacttacacttgttttgtarcaaatgtgatgatatatttcattttctaggtttggctgagttaaattgcaaaattattaaagaagataaaatagccttggtatagcatatgacagtatagtgtttttaaaacatagtttttttgctttcttaggatacaatacaatgataagcataattatttataaatttgacattaaggtcattgattatataaattgtatcataaattatatcccaatttatgtaaattaaaaaatagataaatgttctaaatacatgaaattcaaatgaacttattttcatcaaatggtgggggggtttttgaattcgtagaggtggttannnnnnnnnnnnnnnnnnnnnnnnnnnnnnnnnnnnnnnnnnnnnnnnnnnnnnnnnnnnnnnnnnnnnnnnnnnnnnnnnnnnnnnnnnnnnnnnnnnnttttttcatcaaatgcaatttttttataaggaacttgaataagtatcattttgttaaaaaatcccagcatggaatgaatgtgaaccaaagttcttttaaccccatgaactggcgccagctgtgcttatcaagtccaagtacagtgagcgtgtggcccattgaaagaagtaaccaggagcattgttcagagcaaggtaggagcctttgttacaacagtagcaacatggtggtctttgtttgcattcgtgtaatgtgattgggtcaatttgatgaattaagtggctttatacatacatatatatgcatacacacacatacacacacatacgttcagcttatcttgttataacatctttctacatgcgtgattaccttggagtggttgtttgcatttcaaaagaattctctatgacttgtttcccaattaatttatttaaaatattaagttctctgagagctttttccaacatgatctaattttctaaaattttatttgtccttactattttaaaacatgcctgttgtataaaaaggagagttaagacttttgctattactcagatgccctactggaatttcaaaaataagaaatggttagatatagaaagtatgcagattggccgagtgcagtggctcacgcctgtagtcccagcaatctgggaggccgaggcaggcggatcacgaggtcaggagatcgagaccatcctggctaacacggcgaaaccccgtctctactaaaaatacaaaaaattagccgggcatggtggcgcatgcttgtagtcccagctactcgggaggctgagacaggagaatcacttgaacccaagaggtggaggttgcagtgagccgagatcgtgccactacactccagcctagggacagagcaagattccatctagaagaaaaaatatgcagattatacattcagacacattatccgcaagcaaaagggtagttgtgtatagtggagcca

SEQ ID NO: 549911 - DNA, 518 bp, Homo sapiens
gcgcccgccaccgcgccaggctaattttttgtatttgttagtagaaacggggtttcaccatgttagccaggatggtctcgatctcctgacctcatgatccgcccgccttggmctcccaaagtgctgggattacaggcgtgagccaccacgcctggcctttttttgtttgtttgtttgtttgttttgttttgttttgttttttagtagagaaaatgtctctctatgttgctcaggctggtcttgatctcctggagtcaagcaatcctcccacctcagcctcccaaagtattgggattacagacatgagccactgttccctgccccatttttaatgtatctgtttggccagagggtgggatggaagaagctgggaatagaaccctggtccacattttatattgaagctgtggacagaggaagatgaggcagtgaagaaaactgaggctgggccagagtaataagagaactgggagtcattctctccagaaacagcctaaagaaggaaggcagatgaaagt

SEQ ID NO: 549912 - DNA, 396 bp, Homo sapiens
tttctccgagcacatagagtagagaggctgagagaggccgggagtgtgtaggggcgtggaggctgcagggtggaggagagtccctcctcctggcaatcaggaatgggaaaaagcatctcctttacacaccccaggtgatttgcatgatcaggaaagtctgggaagtgggtcttaggaagcctgcaatgttgtctcttgtctgtgctttccaccagcgttccagttttgcacttktggtatttctgagcaagctcagcttctgtgttttggggtactggctcctaagagcagctgggtgtgtgattagacaaggaactgcttcactagtttattttcattgtgagcacacttcaatatcactctttacatgaacatgagcaaatgggtttaattttg

SEQ ID NO: 549913 - DNA, 813 bp, Homo sapiens
tcctgatgggttttctcaccattgtatccctagtgtagactctccataaatactgttaaacaaatgaagctctaatggcttcatcaagccccatagtaacagcaaaacaggagctcaggctcagatctgtggaaggccagatctgcttgctagctgaatcaaggcatcttgctctgctatttcatgtggttgaaatctcagactcagcaaatgcacaattaactagatcatggactttgaagctactcacccacagaaaatccatgatccctcctctgacacatttgcattttctgttccttctggctgaaatgttcttccttctctcctcatctccacacaactcctcaaaatttgaagtcttccttggattatcccactagctccaatccccaggtgattgcctctcatagggccacagctcctgctcttgcaacatctgcagttggattttacatgttggtcacatggttacttggggactgtcttcaccccttgacaataacctgcttcaggccctagcatggtagcaggctgagagcaggctctcagtgtagacaagctaaataaatgggtatatgaatcaagtaaactccatcaattcaggcacacagaaaatgtgtttagacctggtggctgagggaagaccaaatatctgtgatcwttttggttttactttctagagcaaaacataaggccaagagaggaaaataaccagattcaaggaaattgatggatactcataaattaattgccagtttcagccactctcagaatcatgtgatgccataggctgccccatcagatttctcg

SEQ ID NO: 549914 - DNA, 813 bp, Homo sapiens
tcctgatgggttttctcaccattgtatccctagtgtagactctccataaatactgttaaacaaatgaagctctaatggcttcatcaagccccatagtaacagcaaaacaggagctcaggctcagatctgtggaaggccagatctgcttgctagctgaatcaaggcatcttgctctgctatttcatgtggttgaaatctcagactcagcaaatgcacaattaactagatcatggactttgaagctactcacccacagaaaatccatgatccctcctctgacacatttgcattttctgttccttctggctgaaatgttcttccttctctcctcatctccacacaactcctcaaaatttgaagtcttccttggattatcccactagctccaatccccaggtgattgcctctcatagggccacagctcctgctcttgcaacatctgcagttggattttacatgttggtcacatggttacttggggactgtcttcaccccttgacaataacctgcttcaggccctagcatggtagcaggctgagagcaggctctcagtgtagacaagctaaataaatgggtatatgaatcaagtaaactccatcaattcaggcacacagaaaatgtgtttagacctggtggctgagggaagaccaaatatctgtgatcattttggttttactttctagagcaaaacataaggccaagagaggaaaataaccagattcaaggaaattgatggatactcataaattaattgccagtttcagccactctcagmatcatgtgatgccataggctgccccatcagatttctcg

SEQ ID NO: 549915 - DNA, 832 bp, Homo sapiens
gctacccagagtcagggccacggagcttaggagaccttgggtcagctctgcaaaggggttgtttactgaatgcttctggtatctgcagccccgctggggttcggacagggggtctggaatagggcttcacaactacagcagggctaggaccctcttgggctggaaggagctggagaggcctctgcaagctgtcacaggctcttggtgctggcactggctcaggctttcacacacacacacgcgcacacacacacacacacacacacggacaggcacccccttggtggccttcacagtttcaccttcaggtaaatgggctcatcctttgagccatgaggatgggaagcgaagcaaggaatgaaaaagctagtgtgtttgtgtgtgtgtgtgtgtgtgtgtgtgtgtgtgwgcgcgcgcgcgcgcgcgcgtgtgtactcgtgcgtgtgcctgtgtgtgcctgggagtgacctcacagctgccggaacataaagactcacaggtccgcctcccaggctcaaagctggctctgcaggggacatgagaggcacaccgaagacccacctcctggccttctccctcctctgcctcctctcaaaggtaaggaggcccgggccctggaatgcactgctgactatttgggtgtggagggggtggggatgtaaaatcgcagccaaggacccccttggcagaattcctccagggccccacattgggcacagtctggcccccatgcctaagcagggcttctctccctggaactcagagctgcctccggccagccctgctgtgtgacctcagatatgtgtcttgccttctctgggcctcagcatct

SEQ ID NO: 549916 - DNA, 832 bp, Homo sapiens
gctacccagagtcagggccacggagcttaggagaccttgggtcagctctgcaaaggggttgtttactgaatgcttctggtatctgcagccccgctggggttcggacagggggtctggaatagggcttcacaactacagcagggctaggaccctcttgggctggaaggagctggagaggcctctgcaagctgtcacaggctcttggtgctggcactggctcaggctttcacacacacacacgcgcacacacacacacacacacacacggacaggcacccccttggtggccttcacagtttcaccttcaggtaaatgggctcatcctttgagccatgaggatgggaagcgaagcaaggaatgaaaaagctagtgtgtttgtgtgtgtgtgtgtgtgtgtgtgtgtgtgtgagygcgcgcgcgcgcgcgcgtgtgtactcgtgcgtgtgcctgtgtgtgcctgggagtgacctcacagctgccggaacataaagactcacaggtccgcctcccaggctcaaagctggctctgcaggggacatgagaggcacaccgaagacccacctcctggccttctccctcctctgcctcctctcaaaggtaaggaggcccgggccctggaatgcactgctgactatttgggtgtggagggggtggggatgtaaaatcgcagccaaggacccccttggcagaattcctccagggccccacattgggcacagtctggcccccatgcctaagcagggcttctctccctggaactcagagctgcctccggccagccctgctgtgtgacctcagatatgtgtcttgccttctctgggcctcagcatct

SEQ ID NO: 549917 - DNA, 832 bp, Homo sapiens
gctacccagagtcagggccacggagcttaggagaccttgggtcagctctgcaaaggggttgtttactgaatgcttctggtatctgcagccccgctggggttcggacagggggtctggaatagggcttcacaactacagcagggctaggaccctcttgggctggaaggagctggagaggcctctgcaagctgtcacaggctcttggtgctggcactggctcaggctttcacacacacacacgcgcacacacacacacacacacacacggacaggcacccccttggtggccttcacagtttcaccttcaggtaaatgggctcatcctttgagccatgaggatgggaagcgaagcaaggaatgaaaaagctagtgtgtttgtgtgtgtgtgtgtgtgtgtgtgtgtgtgtgagcgcrcgcgcgcgcgcgcgtgtgtactcgtgcgtgtgcctgtgtgtgcctgggagtgacctcacagctgccggaacataaagactcacaggtccgcctcccaggctcaaagctggctctgcaggggacatgagaggcacaccgaagacccacctcctggccttctccctcctctgcctcctctcaaaggtaaggaggcccgggccctggaatgcactgctgactatttgggtgtggagggggtggggatgtaaaatcgcagccaaggacccccttggcagaattcctccagggccccacattgggcacagtctggcccccatgcctaagcagggcttctctccctggaactcagagctgcctccggccagccctgctgtgtgacctcagatatgtgtcttgccttctctgggcctcagcatct

SEQ ID NO: 549918 - DNA, 832 bp, Homo sapiens
gctacccagagtcagggccacggagcttaggagaccttgggtcagctctgcaaaggggttgtttactgaatgcttctggtatctgcagccccgctggggttcggacagggggtctggaatagggcttcacaactacagcagggctaggaccctcttgggctggaaggagctggagaggcctctgcaagctgtcacaggctcttggtgctggcactggctcaggctttcacacacacacacgcgcacacacacacacacacacacacggacaggcacccccttggtggccttcacagtttcaccttcaggtaaatgggctcatcctttgagccatgaggatgggaagcgaagcaaggaatgaaaaagctagtgtgtttgtgtgtgtgtgtgtgtgtgtgtgtgtgtgtgagcgcgcgcgcgcgcgcgcgtgtgtackcgtgcgtgtgcctgtgtgtgcctgggagtgacctcacagctgccggaacataaagactcacaggtccgcctcccaggctcaaagctggctctgcaggggacatgagaggcacaccgaagacccacctcctggccttctccctcctctgcctcctctcaaaggtaaggaggcccgggccctggaatgcactgctgactatttgggtgtggagggggtggggatgtaaaatcgcagccaaggacccccttggcagaattcctccagggccccacattgggcacagtctggcccccatgcctaagcagggcttctctccctggaactcagagctgcctccggccagccctgctgtgtgacctcagatatgtgtcttgccttctctgggcctcagcatct

SEQ ID NO: 549919 - DNA, 278 bp, Homo sapiens
gctttgagatcagcatggaggaagaaggaataggaagaagctgctctgaactccctccagaaacacctacatttacatccaaggcaccagctgttgagtttccctgacttgagaaatggcatcgctcttggccaacatcycccaaggagactaaatagaatattaatgtattagtagaatattaatattaatatattagtagaatattactaacagattagaatattaatattaatatattagtagaatattactaagtaatagattagtagaatatt

SEQ ID NO: 549920 - DNA, 2050 bp, Homo sapiens
agaaaattagatgacgcactccagaaatcctcacttagtcaggaatcatatgcttcatgtatccacaaccctggccactgcagactgctgcccctccccgatgaaactcttgccccacccttgatctccacagctcctcccatcccggttttcctctcaccttcctggcttccacttccctgactttttcgcatctgcaagcatgcagctgaactggaaatgctgatgtttcccaggaatttttcctaggttctcttttttctcactctaaatgtcctcccagggaagtctgacaaggctttaacgacaactgtggacaggctcaaaaatgcatgtcaacatttttcagaccactgggcacctgatcttacctctatttccataccaacaagcataatgaagtcataactgtatgcatctgcaagaataggcctgaattagcatggaggaaacctgaacagccaggaaacatttttccttaattagtccagccccagaggaaagaggaacagaagcatccagtattgaatgagtcccttgactccttcagcaacctgtgacccagccatcactatcactgatggaggccaacagccagcctaaccttgggtctcttctctgtgaaacaacctcaggaagggagcaacacaggtcacttgtggaaggtgtgagatttggctttatttgggcatgagctaatagagctgtggtggcctcctttgatcacagcacccattgaggactgggtaagaaggtgcctatgaaggaaaaatgcatttttgcttccaataacaagaaaataatttggaggcaggaaagataaagtgtgtggaggtatgtgtgtttgtgtgtgagagagagagacagtgtgtgctctgacaatatgaattactgtctcagctaatacaggaaaggcaggaatggtgaaagaggaaaagggaataagaggaaagacctctgtaattttattttcaaaaataagatgcacatctattatgagctgaaatgtgtccccccaaatttatatgcagagccagtacctcagaatgtgactgtgtttggagatagggtatttaaaatggtagtgaaggtaaaatgaggctctaccctaacccaatatgactgatgtccttttaagcaaagagtaaggcacacatacacagggtgaagaccatgtgaggacacagggagatgacagccccctgcatgcccgggagagaggactcagaagacaccaaccctgtggatgccttgatgtattctagaactcccggcctccggaactgcaaggaaataaatctccgacgttgaagccacccagtctgcggtacattgttatgacagcctgagcaggctaatacatcatcttatctcggggttcctcagattcagagattaccttattcaaaaggaaatggtttgattttttttctacataaaggatttatttccctactgaagagtgggctgaatgaagtctctggaaaatctaatattgaaaaattccagttaagacttccctccctagttcatcactccacaatttcagggacagtgtggggaattcctgtttcccacccaacccttggaacaagaccctctctcccagcmacaatggagcagacagagaggctcctgacctgctgcaacctccctgggtgcagctgagactcattatgtctctttattataaatagcacttattgccatgggtacttatagaatctgaaaaacgaactcttttcaaaggaatgaattagaatggcaatgtggaaaaatgtaacaaccaattactgcaagaaactcccttcttttttctccttttgacttatttcattaaatcaggcagcttatatactgaatcttccaatttttaaaaaattaattataagtgcctaaaggtattgaagccctgaacatttatgagactacacaaccggacaaaaacaaaaggacggctgatttcccaaccaggcaacttaatttcccaattatcttccttcggcaaattgcggatctaaatataacatattgtaacctttgccatttt

SEQ ID NO: 549921 - DNA, 1791 bp, Homo sapiens
tgacgtgataactgaaaataacttccattagcactataaaaactccagctgataccaaatgaatttcatttgataccagcagagaaaaatattggctactgagatattctttgttcatggttatttacggttagctagaatccatgtacaattcagccagccagaaggccccagatgattcccttycctggaggaccttgtgtggaaggtcttacatgaaaactggctcaccttcatttggcaaaatacgaggaccgctcttctcacacctggtccaccataatacaaggaaatgtctggtgattaaatttcttggggtaagaaagatgtcaacagatgtttgagagatgtgcagtacctccctctccacctccaacccatcaccaggcgatcctgtaaatgttggaaatggtcgactaaattatcaggaaatttccccaaaccatggtcctggtgatttctttaatgtaaatatttcaaaggtgcatgtaccaccgctaagaattatgtatcgatattttgttatgtttccttcagatctttgacttttaagaaatatcacacgcagttgaggcttcccacttggctctttccctctccggtaaaaccactgtcttgcaactgtgtacaccctggccattcatgagttatactttcaatacatatgcatgtatcataaacaatcttagttatcttaaaatatatatacctttctacaaatttctttctccactccacgttatggatttttaatgtttttattgtaaatatacataagatgcctattttaactatttttatgcatccaatttagtaacatcaagtatatccacaatgttctgtagccatcacatccatttctagaactttttcatcattctaaatagaaactctgcacccatcaaacaatactcccctatttcttccctctccatagcccctggcaatcgccattccactttctgtctctatgaatttgactattctaggtacctcacataaatgtaataatcacacaatttctgtccttctgtctctggcttatttcatttagcatatcaacattgtttttaacatcagcccaggttggtacatactgatataggtcattcatcttaaatattgtataacattcaggagattccagataataatttatccttaactctgttggtggacatctaagttccaattttttgctataacaaaatccatcttgcagcgagcatcagaggcactcagctgaagtagaaatgctgggtgtgtacctcctctgctttaccaggaagctgcccaattgctctcttaagtcacgatagtaatcaacattcctgtcagcagcagaagtgagttcctgcttccccatgtccttatttgtactgacaaattttcctttttaatgtttgataatttgatgggtgtgaaatggtatctcaatgttttcttacttgacattttttcaatgagcagagtgaggctgagcatattttcatgctcattaaccattaaagtttctgttcatgtgaaatgcttgctcataaattttactctcttttatataattttttgcttttttattgatttccaaaggggagagatacatagatacatacatgcgtagatacctagatatgctgcataataatcatttgaccagcatagttcattaatttctgactttatccttattgtattttcccttctgcttgggtttactctgtttggttttagtttgattttttgtccattttcttgatttggatacttatttgtttattttattttttgttt

SEQ ID NO: 549922 - DNA, 642 bp, Homo sapiens
gcaggagttgtgctggttacaaggtctgtgtgtcttgttttggtgtctatcttgggtcttttgtgttgtcccatgttgatgttggggttaataaagccactttatgccagaccttgctcttattaattggactctgtaagtggcaagcagccggattccatttggttacgactgtatactaataggtcggtctatctatctatgtatctatgtatctatgtatctatgtatctatctatctatctatctatctatctatctatcttattttatttttttgagaaaaattttatttttttgagatgcagactagctatgtcacccaggttagagtgcagtggcacaatctcagctcactgcaacctctgcctcccgggttcaagcaattcttctgcctcagcctcctgagtagctgggattacaggcacctgccaccatgcctggctaatttttgtattctttagtagagacggggtttcaccacattggccaggctagtcttgaactcctgacctcaagtgatccrccagcctcagcctcccaaaatggtgggattacaggtgtgagccaccgtgcctggctggcttgtctatatttgataattaaatttgatgattgacttaaaagtcaataatattttta

SEQ ID NO: 549923 - DNA, 509 bp, Homo sapiens
acccaggctggagtgcagtggcacgatctcccctcgctgcagtttccatctcccaggcttaagcgattctcccgcctcagcatcatgaatagctaggattacaggcacgtaccacaacatcccactaattttttgtgtttttagtagagatggggtttcaccatgttggctaggctggtcttgaactcctgggctcaagcaatctggctgccttagccttccaaagtgctgggatcgcagatatgtgccackgcgcccctacatgtttttattaacgttacttattttaattatccctctcacatttgcctcatgtcacaggcaatatctgcagtgtaaaaataattaaaatacaggaaaataaaagaggcaaaaacataatctttaaaatatccagttcattctttcaatgaatttgtattgagcaactgctatatgatatgaaacagggctggggatatagtagtaaaaaataagacaacattctgatcttgttacttaaataccaa

SEQ ID NO: 549924 - DNA, 806 bp, Homo sapiens
cgttacttccagcatcttacttctggcaacaaattctgcgttagttgggaggctttccactgaaatttaaaaagcactcaaaagaagagtaaccaaaggaatttattgtctcacacaacaaagagttgaaaagttccagagttggccaaatctgtggcttaaaaatcttaatgctctcggtcaacttttaacaacaatctggtgagggagcagggctgctgacatggaataactattttataagcaatccacgttggctgccataatcagtcagtctgcatataatgatttgctgcctgtgatatcccacatattagcctaggcattacagagaccacatcaaacaagacaaacccaattcttaccttcaggagcttacattctagaatgcaagaaattcttacttgttaaagaatgatgaattatgattggtttcataagaaaataaatataatcctatgttattatacctaaacttttccaaagagaatatttaagccatcaagataatgttaaatcttttttcttttactctacagaacctcaaatcatactctattttagtttctgaatacattggctgggcatggtggctcatgcctgtaatcccagcattttgggaagctgaggcaggcagatcacttgaagccaagaatttgagaccagcccggccaacacagcgaaactccatctctaccaaaaatataaaaattagcygggcgtggtggcacatgcctgtaatctcagctacttgggacgctgaggcaggagaatcacttgaacctggaggtagaggtttgagtgag

SEQ ID NO: 549925 - DNA, 924 bp, Homo sapiens
ctaacttaccgccttttttctactctgctgtgcctgctttggctaccctcctatctcccattgctatgcacctaccaaagggagaggcccacacagacaacctgggttcatcctagtctcctcctcctgatgycccgtgtccaagcccagcccgccataccctctaattgactcacaagccagccctcctgtccaccccaggcgcatgttgtcttagtctcaagtactcattatttctgttgccttctctcaggttgcccagactctggtcttggtaccctctgacttttcataacaggtcagtcttgctaaaacagtcttctacttggacagacatggtgcctcatgcccataaccctaacactttgggaggccaaggcagaaggatcttttaagaccaggagttcacgaccaacatagcaagaccccatctctaccaaaaaataaaaaactatctgggcacagtggcatacacctgtagtcccagctactcaggaggctcaggcaggaggattgtttgagcccaggagtctgaggctgcagtgagccatgatcatgtcactgcactccagcctgagaaacagagcaagaccctgtctgcaaacaacaataacaccaaacaaacaaacaaacaaaaacaatcttctactaaacccttcagcggtgaacgcacgtgaaaccctctcttcaaagggtggccataaactgagagacctgggctttgccccaaggcaccgaactatagtgtgcacagcattttaaaataacgattttaaaagcttagcatgtacttagcaagactaattagttcaaataggaagctgccagatggtgcatattattaatgacacccattggaagtgccccccgagaacgctctgagttgatgtgaaagtgcatttcaagttgctgcccctgcaccca

SEQ ID NO: 549926 - DNA, 1002 bp, Homo sapiens
gctttctgcttcttgatctcagaggtggaatcattatctagtaagcattaggagtcctttttttttctttttttttttttcctttttaacctttttggtggccctctggtgaatatgagggaattgtgaatagagaaacagggaggagaaatagttatttttcaacttaatctttcagtaaatgtttatacccttatgatctaccccactcctcagaatattacttgtatatatggtgtttcctatttcctatgctcttcaaatgcgagagataatctagtcggatcctggtacccaagagcaagcaataaacttgagacaagagttgaaatttcctttcatttatagaactcacgcctgtaatcccaacactttgggaggctgaggtgggcagatcacttgaagtcaggagcttgataacagcctggccaacatcatgaaaccccatctctactaaaagcacaaaaataagccaggcatggtggcacgtgcccgtaatcccagctaatcaggagctgaagcagaagaatcgtttaatcgagaggtaaaggttccagtgagccaagatcacaccactgcactccagcctgggcaacagagcaagacttcrtctaaaaaaaaataaagcacttgttctggggtcactacatagtctggaatgtgagggagtgaaagcagacttcatcttcatggacgcttcaagtgatccatactttctactcacagagccaggaaacaataaacagattaaccttgatgtctgagctaaagacaagatggagttgaccaaggtgatcaaagctcggattttctgtagctgggtgcaaaggtatttctagggccctgaggctaagtggcctatggttaatcatagaatcacttattagaatcaactccaactctcaattaagagacaagaacatttacatcccaagagactgagacaagtgccccagcagttgattagagtttgattcttggctcagtattttttgtcttgag

SEQ ID NO: 549927 - DNA, 1144 bp, Homo sapiens
tctctccatcctttgctttttcttatttccttacttttttcttaaacacttattgagcacctgctttgtatgctagccagtgggctacaggctgaagatacaataattaatgaaagaaatatagttttttcctcttaatgatctaagggagaaagcaggtaagtagctaattacattacagaagggtgatgttttgatcagagtgcacatcatacgctatgaaataatagggcaaggccattgaaaccagccttgaggagataaggaaagcctttgctgtaaaagcagccttttagccaagtcttgaatgaccagtagcaattagtcaggagaaaagtattgagagaacgttgcacaaagaagaagcaacatatacaagagcccatagatgggaaagacatggcataattggaccctgcaagtaattcagtagagtttaagtgaagcagttttgaaggttgagacaggaacagtaagtaatggagaaatactgaatcagcatttggtaccatttacaaataaatttatataaaaataaatttatgcttggaaaaataagtcatattaaaatcaagatagaaatgacaaacttggaaaaaatattaagaactcagagcagaaatagctagtttccttaatatagagagttctatgaatcagtgtgaaaaggccagtaagatagtagaaaaatgcacaatggactagagttgaaagaaaaaaaatgtagccattatttaaaaaagcacgtattggtgaacatatgcagaaactggaacccttgttggtaagaatgtagaatgaacagccactatggaaaacaatatggagtttcctccaaaaattaaacatggaattatcatatgatctagcaatccaatcccgcttctgagtatatatcccaaaacaccctgaaatcaggctcttagagagatatcagcatttccatgtttattgcagygtttttcacaatagccaagatatggaagaaaatgtggtctatacaggcaacttaatattatttggtgttaaaaaagaaggaaatcttaccatgtgctgcaacatggatgaacctgaaggacattatactaagtgaaataagcatgccataaaaggacatatactacatgattccacttatatgagg

SEQ ID NO: 549928 - DNA, 594 bp, Homo sapiens
tatactttttaaagttgtagatctgcttttatacctgcaagtataacaaaaactgtgagacaaacatattacgagggattgccctggaatctgtgcatgctgctttgatcccccatggagtcttctctagtcacaaagaattgattgtaaagacaagggtggttgtggttttgtttgtttcaaattgtataaaagttggatatctatgttatttaagatcaaagtgagattgccactattatttgctctacaaatagaactttcacattatttttccttttaaaaatgtagcataggatwttatgagtggaaaagatgaaaaagctatgtatgtttttgcatttcggactgatcaaacttaagaaatgaacaaaaatcaggaaattctttctatatttaaagatgactagaaaagaactttaatcagaactctaatgcctatctaatacataacaactttactttcggaaataaatgacctatgacctaacataattctcttgcatggtactgtaaacctctttacccactttgcagggagaaaaagccatcttataatgaagctaatattaagtaagtcatttctaagctgaa

SEQ ID NO: 549929 - DNA, 951 bp, Homo sapiens
aaaaaagaaacaaaaacaagcaaaaacaataaaatggatacataagttttggtgtgttctcacaatggaatactcttgtagaataatgacagtgattaaacagctaatgcatacaaaaacatagacaaatctccagccacaaataaaactagaattttatttccatttgcctgttttcccctgggaaaacactgtttccttgcagaggactttcctgttagtgaccccgcggggaaagcctcccaggctgaaggcacttcacctatctcagcagttagaacaagcccttcagggtcctcataaaagtccctggcctgcgtcagggagaggctgatcccccagggccgactggaatctgagctcagaccattaggaagcaggctcaaagcataagatcctcggtgaacaggctgtgcaaacgccaggtcgagctcagttggcgccgagcgcccttaaccgcacctagaggcccgacctgctgaggccctcaaagcaggagctgaggcgggggatcctcaggcaggcactgaggacaaggaggacttccatgggattacggccgcctacagaagaagtggacgcccaccaataaagaccaggcctggaagactctgacggagcactacagcatcctgaagttgctggatgggtatcccgcaacccctgcctcaggctgaggctgcctgctctctggcctggagaaggggagatgaagagaggaggcaagcctgcttcctggggctttgccagaagccacagcctgcagctgctctgtcaaatggcwacagtctctagaggactgaaacccttctctgaggccttttggcccagctctgtgaaaacaggacatggaggccctgctgggctggtgctcagtctctgcttggtccccagtgtgtaagtggcttcttttctgggcctttctcttccccctctttactaacccctaat

SEQ ID NO: 549930 - DNA, 576 bp, Homo sapiens
gttgatgtcctcggatgaagctggaaaccatcatcctcagcaaactaacacaggaacagaaaaccaaacaccgcatgttctcactcataagtgggagttgaacaatgagaacacatggacacggggaggggaacaacacacaccggggcctgtcgggggtggggtaaggggagggagagcatcaggacaaatagctaatgcatgtggggcttaaaacctaggtgatgggttgataggtacagcaaaccactaggcacaygtatacctatgtaacaaactcgcacattctccacatgtatcccggaacttaaagtaaaaataaataaataaatacatacatacatacatacatacataaatgtcgatgccctacatcccctccaaagggcatctcccccaccccaccaccaagggcagcccagtggtctccctgctctgaatctgtcacccacattttcatctcggtgccctccactcctctctcaggaaacatttcacagttccagcaggtgagtcagacacagaacctaataatcagtcatttattcagttattcatttattcaggtgatagctc

SEQ ID NO: 549931 - DNA, 576 bp, Homo sapiens
gttgatgtcctcggatgaagctggaaaccatcatcctcagcaaactaacacaggaacagaaaaccaaacaccgcatgttctcactcataagtgggagttgaacaatgagaacacatggacacggggaggggaacaacacacaccggggcctgtcgggggtggggtaaggggagggagagcatcaggacaaatagctaatgcatgtggggcttaaaacctaggtgatgggttgataggtacagcaaaccactaggcacatgtatacctatgtaacaaactcgcacattctccacatgtatcccggaacttaaagtaaaaataaataaataaatamatacatacatacatacatacataaatgtcgatgccctacatcccctccaaagggcatctcccccaccccaccaccaagggcagcccagtggtctccctgctctgaatctgtcacccacattttcatctcggtgccctccactcctctctcaggaaacatttcacagttccagcaggtgagtcagacacagaacctaataatcagtcatttattcagttattcatttattcaggtgatagctc

SEQ ID NO: 549932 - DNA, 576 bp, Homo sapiens
gttgatgtcctcggatgaagctggaaaccatcatcctcagcaaactaacacaggaacagaaaaccaaacaccgcatgttctcactcataagtgggagttgaacaatgagaacacatggacacggggaggggaacaacacacaccggggcctgtcgggggtggggtaaggggagggagagcatcaggacaaatagctaatgcatgtggggcttaaaacctaggtgatgggttgataggtacagcaaaccactaggcacatgtatacctatgtaacaaactcgcacattctccacatgtatcccggaacttaaagtaaaaataaataaataaatacatacatacatacatacatacataaatgtcgatgccctacatcccctccaaagggcatctcccccaccccaccaccaagggcarcccagtggtctccctgctctgaatctgtcacccacattttcatctcggtgccctccactcctctctcaggaaacatttcacagttccagcaggtgagtcagacacagaacctaataatcagtcatttattcagttattcatttattcaggtgatagctc

SEQ ID NO: 549933 - DNA, 761 bp, Homo sapiens
aaaatttaaaaataaaactgactttaccaagtgctagtgaagatgtagggcaagtgccactctcaaacatagctgtggggagttcagactgtgcagcagctttggawaactgtttagctgaacatatgtacatactgtgacccgcatacttccactcctaagtatatacccaacaaaaatgagtatacatgtgcatcacaagacatctacatgaacgtccacagcaggaatgcaggtaatagccccaagcagaaaccaacacataagtgtaacaaaagtgaaatggatttgtttaaaatggggcatattcatgtaacagaacactgtacatcaatgaagaccagtatattcaaccacgtagacaatctcacggatacgagacaaagcaaagagcaaggcttaaaagagtagacactgaatgatttcatttatgtaaagttcaaaaacagcaaaacccagtgtggggcaccagcagtcagaacggtggtgaccttgggagaggaatgactgggagggccatgggggcttctggagggctcacatggtctatatcttgatttgggtggcagttccttttttcttgatctagcttgagtaggtgtctgtttcttataaactcatgctccttgaccaagctaatgttccatcctccctttcctgcactctctcctgcaactcccagtatggcacctgttgcttcatccactagattataagctccatggtcacaggaaccagccacctctgtcttaaacactttg

SEQ ID NO: 549934 - DNA, 761 bp, Homo sapiens
aaaatttaaaaataaaactgactttaccaagtgctagtgaagatgtagggcaagtgccactctcaaacatagctgtggggagttcagactgtgcagcagctttggataactgtttagctgaacatatgyacatactgtgacccgcatacttccactcctaagtatatacccaacaaaaatgagtatacatgtgcatcacaagacatctacatgaacgtccacagcaggaatgcaggtaatagccccaagcagaaaccaacacataagtgtaacaaaagtgaaatggatttgtttaaaatggggcatattcatgtaacagaacactgtacatcaatgaagaccagtatattcaaccacgtagacaatctcacggatacgagacaaagcaaagagcaaggcttaaaagagtagacactgaatgatttcatttatgtaaagttcaaaaacagcaaaacccagtgtggggcaccagcagtcagaacggtggtgaccttgggagaggaatgactgggagggccatgggggcttctggagggctcacatggtctatatcttgatttgggtggcagttccttttttcttgatctagcttgagtaggtgtctgtttcttataaactcatgctccttgaccaagctaatgttccatcctccctttcctgcactctctcctgcaactcccagtatggcacctgttgcttcatccactagattataagctccatggtcacaggaaccagccacctctgtcttaaacactttg

SEQ ID NO: 549935 - DNA, 578 bp, Homo sapiens
aaatttgttatacttcaaaagccataacttgaaaaatactggtggcgtcgatggtgagtgatttttatcccacgtgggccttttgctcagttccatggcaattttgtaaattgaccctagccagagaatagatcagtatttcactgataccacgaggaaaagaacaaacaaaacttaaaagtattcatacaccttgctaacctaaaagacagcagggacaagatacatatgaggacaaggtatacacccagttctgaataacttgaagaacaggcttggcaaagaagtaagtttatccaaatcttgaatttctgccaggcatggtagctcatgcctgtaaccctggcacttaaggggccaaggcaggaggatcacttgaggccagtgagctgtgatcactccagtgcactcgagcctgggtgacagggcaagaccctgtctcaaaaaaaaaaaaaamaaccaaaaatcttgaatctcccatcaaagccttttcattaaaaatacaatttcatctactccctactgtacctttcactgatgtcaagtggctatcaattcatatagctgaaaattagtga

SEQ ID NO: 549936 - DNA, 1410 bp, Homo sapiens
tttttgtatttttagtagagacagggtttctccatgttggtcaggctggtcccaaactcccgacctcaggtgatccacccgcctcggcctcccaaagtgctgggattacaggcgtgagccaccgcccctggcctataccacattttctttatccactcgttggtcgatgagcatttaggttggttccatatctttgcaattgtgaattgtgctataaacatgcatgtgcctgtgtctttttcatattggacttcttttcttctgggtagatacccagtagtgggattgctgaatcgaataaggaatcgccatacggttttccatagtgtttgtagcaatttacattcccaacagcagtgtaaaagcgtttccttttcaccacgttcacgccaacgtcatccctcacctgtcgcgtatcagggctgctccactgcaaacttctgtgcaggaaatgatttgaggttctggaatgacctacgggagagccacttctcgaacccaagtctctggctccttgtctggtgctcactccattgcctcattctgtcctgtcacattggaatacggcattcgaagggccatttggtggcttggtctcatccgccactatttgccttgtgctaattgccatttcccattgcttctgagctgtgccgaccagactggaagggtaaactccagcttatgaaacgttccttggaggggcatcaattcgttttactgagagcagccccaaatatttgaccaagttttcttttgagctctgggattcctcttaaatgtagaaacattcctaatggagtttcctctgcatgaaggaaaaccagatttgtctggaaagtcatttaatgtctaaccagcgtgcaaaccctccactccagacttccttcctgtctgcaaaatctcctttccgtaaggagatgagctttctcatttggctgacatcaaaatgagacaggatttggtgccaccttctggcccagtcacttctctgactctttgggaattgttggtgagcacccctgagagaggacagccttttcrttattaatgagggtgggtgctggtgagcgtgggcaattaggggagacagtcagctgcacacttggctagactccggcttcgatgtgtttaaattatgcaggtgtgcttcttaattaacaaggcattttgccagagggaaaaaaacaactgaatctctgcaatgtgctttctgcctcagggggtggctggtagtctttttacactaagtaggttggcctctaaaggcttcctacttaaaaaaaaatggaaaaagtatttgttgatcctctatcagcagaggagaggaaatgagtctgttgtatcaaagaaggataactggtgataactttcatttttcacattctaatggcttcatggtcacgctcc

SEQ ID NO: 549937 - DNA, 1385 bp, Homo sapiens
ttttttgtgtgtgtaccgaacatctaatcgctatccagtcataggaaagtaaagctagacagattttggtctttttcttttcagaagtttgaatttatccattaaaagggtgtgtccatcttatcaaaattgctcttggatattaggcacacattttagactttgaggtttggttattttctaaacacatgctagtgtttcctttattaaatggtgtacactttcaaatcctttgaaaatgtgtttttatgatgaaatgayggcgatcttccccccaccctcacccccattttactcctcgcatcagaaacagctcaggctttgggctcagacctgggcgtgcctcttggctttgctgctttctagctgtgtgaccctggctaagttacctgcctctctgagcctcagtatcagcaccaacaaaatgaagaagatttctgtgtgtgtggtttttttttttgaagattaaataaaatgaaaagagaaaatggcatgatggactcgaacggtgcaaattgagatctctgcagatagttttcagcgcacagtgtctggcacctgaggcatgaagaggatttaaataaacatgaaattaaataagtttgtcaatttaaagcaactggaatggtgcttggtgtacggtggcctcccagcacatattaattctctttatggttatagtcattactgtttgccacaatccctcacctcagagaatagaaagatattagaatcacatcttcctaactgttgtgggagctttaatacagtgctaaatcgagtgctgcaggagtgacatgactgtctgagccttggttttctcctttgtagaatgggaatgttatactctgtttgcaaggttgttgttgagattagaagtaacacctgagaagattccagcacaatgtggttgcttgagaaattgtaaatattaacactaacaggtgtttcttgagcaaagatagagcatgcattaaactatgtatctattttctcggcaagagaggccaccagagagatgctctaggtttctcttaggtacaccagtgtgaggtaagaggctcccttgatcaggggaaaggggagaacagagtttttgtaggacttcacaaccttagcaaggctgatcttacttctggaatacagagcatgtgggtgagaggaccagttaacataacaggccatgggggcttctggaagggaaaaggttgacaacacagttgcttctccctgggattttttttttaatgcaatgattttatgtatttttatagccaattacagtaaaatctagcaaattccatgattattttgagagatctttatcatgaacaggaatagatggataatgatgcacatagatctccacagaatgatcaggaaga

SEQ ID NO: 549938 - DNA, 1385 bp, Homo sapiens
ttttttgtgtgtgtaccgaacatctaatcgctatccagtcataggaaagtaaagctagacagattttggtctttttcttttcagaagtttgaatttatccattaaaagggtgtgtccatcttatcaaaattgctcttggatattaggcacacattttagactttgaggtttggttattttctaaacacatgctagtgtttcctttattaaatggtgtacactttcaaatcctttgaaaatgtgtttttatgatgaaatgatggcgatcttccccccaccctcacccccattttactcctcgcatcagaaacagctcaggctttsggctcagacctgggcgtgcctcttggctttgctgctttctagctgtgtgaccctggctaagttacctgcctctctgagcctcagtatcagcaccaacaaaatgaagaagatttctgtgtgtgtggtttttttttttgaagattaaataaaatgaaaagagaaaatggcatgatggactcgaacggtgcaaattgagatctctgcagatagttttcagcgcacagtgtctggcacctgaggcatgaagaggatttaaataaacatgaaattaaataagtttgtcaatttaaagcaactggaatggtgcttggtgtacggtggcctcccagcacatattaattctctttatggttatagtcattactgtttgccacaatccctcacctcagagaatagaaagatattagaatcacatcttcctaactgttgtgggagctttaatacagtgctaaatcgagtgctgcaggagtgacatgactgtctgagccttggttttctcctttgtagaatgggaatgttatactctgtttgcaaggttgttgttgagattagaagtaacacctgagaagattccagcacaatgtggttgcttgagaaattgtaaatattaacactaacaggtgtttcttgagcaaagatagagcatgcattaaactatgtatctattttctcggcaagagaggccaccagagagatgctctaggtttctcttaggtacaccagtgtgaggtaagaggctcccttgatcaggggaaaggggagaacagagtttttgtaggacttcacaaccttagcaaggctgatcttacttctggaatacagagcatgtgggtgagaggaccagttaacataacaggccatgggggcttctggaagggaaaaggttgacaacacagttgcttctccctgggattttttttttaatgcaatgattttatgtatttttatagccaattacagtaaaatctagcaaattccatgattattttgagagatctttatcatgaacaggaatagatggataatgatgcacatagatctccacagaatgatcaggaaga

SEQ ID NO: 549939 - DNA, 1385 bp, Homo sapiens
ttttttgtgtgtgtaccgaacatctaatcgctatccagtcataggaaagtaaagctagacagattttggtctttttcttttcagaagtttgaatttatccattaaaagggtgtgtccatcttatcaaaattgctcttggatattaggcacacattttagactttgaggtttggttattttctaaacacatgctagtgtttcctttattaaatggtgtacactttcaaatcctttgaaaatgtgtttttatgatgaaatgatggcgatcttccccccaccctcacccccattttactcctcgcatcagaaacagctcaggctttgggctcagacctgggcgtgcctcttggctttgctgctttctagctgtgtgaccctggctaagttacctgcctctctgagcctcagtatcagcaccaacaaaatgaagaagatttctgtgtgtgtggtttttttttttgaagattaaataaaatgaaaagagaaaatggcatgatggactcgaacggtgcaaattgagatctctgcagatagttttcagcgcacagtgtctggcacctgaggcatgaagaggatttaaataaacatgaaattaaataagtttgtcaatttaaagcaactggaatggtgcttggtgtacggtggcctcccagcacatattaattctctttatggttatagtcattactgtttgccacaatccctcacctcagagaatagaaagatattagaatcacatcttcctaactgttgtgggagctttaatacagtgctaaatcgagtgctgcaggagtgacatgactgtctgagccttggttttctcctttgtagaatgggaatgttatactctgtttgcaaggttgttgttgagattagaagtaacacctgagaagattccagcacaatgtggttgcttgagaaattgtaaatattaacactaacaggtgtttcttgagcaaagatagagcatgcattaaamtatgtatctattttctcggcaagagaggccaccagagagatgctctaggtttctcttaggtacaccagtgtgaggtaagaggctcccttgatcaggggaaaggggagaacagagtttttgtaggacttcacaaccttagcaaggctgatcttacttctggaatacagagcatgtgggtgagaggaccagttaacataacaggccatgggggcttctggaagggaaaaggttgacaacacagttgcttctccctgggattttttttttaatgcaatgattttatgtatttttatagccaattacagtaaaatctagcaaattccatgattattttgagagatctttatcatgaacaggaatagatggataatgatgcacatagatctccacagaatgatcaggaaga

SEQ ID NO: 549940 - DNA, 662 bp, Homo sapiens
atgctgctaaggttattttttttcaagaaaaatgttacaaaaatttcagaaataaatttgcatagactgcttttgcacacatcaaaaaaatcaacatgtcaagctattctctcttaatcaaaatgtcccatattttacatgacattgaactagagagagaggacaaaaatctctcatctctctgattctcaaatgctcgtattttattttattttgaaaggaaaatagacagttgaaggaaacaaattttgctgttgatgtcttagaaaatttgaattaatcacattttggatttccatttctgctataaaacagaaattcacaataagaactctaaatcctatttatgttcagctgagcattctgggaagagattgaacattgactagtgcacacgtgtgcacacacacaccatacagcacctttatttccatcttacttatcttttattttctagctaagttttggaccttttactacctctatgactgttaattatcaaggtcgttagctggcataatcctaactaggttattcaaaaattctacttaaaaatatttctaaaaatgaactttattccattttatctttttaacctcttggattgttattcttgaataaaaaccawagcattctattacatccatgatgctcattacaac

SEQ ID NO: 549941 - DNA, 1979 bp, Homo sapiens
gaggctaaaaaaacaaaacaaaacaaaaaaaaaaactcatgtacataaagggctgagtgtggacaccctcctgccctccatacagtaagtgtttaataagcacatctaagcagtattgtcatcgtcactgtagaaaatatctctttttataacactgttgtccctactggccattggatagtactcaaaatgtgtttattgattgactgaatgagtggacgaatgaattgttgacagtctttctggagcaagcatcatcggaccaggcaaaattaagtaatgaaaaaactactgtgcaaggaagaatccaggactcttgggctggaattctgtctagtaggtttgctggttgtatgatccggcataattctaaaaagtctccgtgcttttgttattctatattttaaatgggaatgaaaayatcctgcctgcaaaagcagacagcttttcctgagaatgtgtcaggctctgagacctacggttttaggcaaagctacataaagcaattttacttgctttatttatatatcctgcttcattaccaaacatacatgaggcaccttataacccagcaataaaactttatgacaaccagataagacctcctagcacaacacttaggtcaatgtcagatacctgcattttccttgcacttgctatagtagctcttagcaagttacacccctgacatagctatgcaaacacaaagagtcatgtaggaaccactgaaaacccatgcaggatccttgttagaatgtcaacctagataagaaatggtagcaaacatcattcagagaatagattaaatgattccagataaaaaaaatggtatttaaaaaacatacacactaaggcaatggtgtcaaccagaggcctatcagtctttcaaaatgtaaatcagaaaaaaaaaaaacaaacacctacaacttcaaaggatttgtcttcattaaaatcttcaaaacagaatttcaaagcagctcttggtttcttttaaataagtgttacttattcctccttgatgttaatttttaccattttttagatatttataacataggacaaaacagaactttctggaatacccattagcaccttccctccccttttaaattagcttctgggatcctggcacagaacagaaagtaaacggaatgcctaatactggaggagccttctgcatgggattctacttctaaactttctcaaattcgctttcctattttttcttcctgccttccttctctagagaacaaatgaaaaggagctccaaaacttagaaacgatgaagtctctatttcccacttaagttgaaatttgagaagtctgatgaatgtgtcaaactcttgtttttgtactgaacattcaagctcatcctttagtaagattattaggaaacagtaaatttagcagacaggtatgagacaagcatatatccttactctagcacttacaaggtttggtctctagacagctgaggtttgattttttttttcccccactgtttagcagcgttttatgattttgtatctctcgcttgctgttaccattgacagctgttacagtcaaatgttgacaaacctccatctctgtgcctcctggaatttgctacctcaaacttggaaaacagatctcttgcttgctctaattgtgtttgcaaagagtaaacaggatctcaggaaaaacatgaggtgttttctaatgagaacatttgtgagctttagggcctggcatccatgaatatccttttggttgcttcttttggttggcattttaaacctaattctttctctctggttatgtcatgaataaacaaggctacctggtcgtgcatagaggaaatcctattatatgttcataattcagtagtacatggctcatcaagactgaaaagtatgaaactgagttagattttgatcccacttctaaatgatttttagagaagataaaacaagtcaaaatatatgttttacagaataaag

SEQ ID NO: 549942 - DNA, 678 bp, Homo sapiens
tgcaagaagtatctttagaaayggaatgtatagctcagaatcctataaccttacataagacatggcacacagaggccgagactgtaaaatacagcttcaagaatcattcagccgagataacagtggtgcttcaaggaggcctggtggtggagggtgctgggacaggatgggggacggggcatctgtaacttgaggtcccagcagacagctattctcccagcaaagcatgtagtgttcttctggcccaggctgggtgatgtttgggtgtttctcaatgtggtagatgctatggaatttgtttcttctagaaaatagaggggaaagcaagccactaggacagattagtccattgttgtgtctcttcctctaatgctttgctttagccgtttaaaaatgcccctgggcagcagatcacccgacagctcaataaatccagactccctgtgggggatctcccagcagccccaactcccaccttctccttcccccgcttcacagccctgagtctcagcccctttttcaacttctcaaccactccatgggctttcctgtcttgggagtccttgcagcccttccttctgcctggaatgttctttctcttgcccttcacttggctggcttcttatcaccctccagatctccatttaaatgccattatttgtgtgtgtgtgtgtgtgt

SEQ ID NO: 549943 - DNA, 678 bp, Homo sapiens
tgcaagaagtatctttagaaacggaatgtatagctcagaatcctataaccttacataagacatggcacacagaggccgagactgtaaaatacagcttcaagaatcattcagccgagataacagtggtgcttcaaggaggcctggtggtggagggtgctgggacaggatgggggayggggcatctgtaacttgaggtcccagcagacagctattctcccagcaaagcatgtagtgttcttctggcccaggctgggtgatgtttgggtgtttctcaatgtggtagatgctatggaatttgtttcttctagaaaatagaggggaaagcaagccactaggacagattagtccattgttgtgtctcttcctctaatgctttgctttagccgtttaaaaatgcccctgggcagcagatcacccgacagctcaataaatccagactccctgtgggggatctcccagcagccccaactcccaccttctccttcccccgcttcacagccctgagtctcagcccctttttcaacttctcaaccactccatgggctttcctgtcttgggagtccttgcagcccttccttctgcctggaatgttctttctcttgcccttcacttggctggcttcttatcaccctccagatctccatttaaatgccattatttgtgtgtgtgtgtgtgtgt

SEQ ID NO: 549944 - DNA, 678 bp, Homo sapiens
tgcaagaagtatctttagaaacggaatgtatagctcagaatcctataaccttacataagacatggcacacagaggccgagactgtaaaatacagcttcaagaatcattcagccgagataacagtggtgcttcaaggaggcctggtggtggagggtgctgggacaggatgggggacggggcatctgtaacttgaggtcccagcagacagctattctcccagcaaagcatgtagtgttcttctggcccaggctgggtgatgtttgggtgtttctcaatgtggtagatgctatggaatttgtttcttctagaaaatagaggggaaagcaagccactrggacagattagtccattgttgtgtctcttcctctaatgctttgctttagccgtttaaaaatgcccctgggcagcagatcacccgacagctcaataaatccagactccctgtgggggatctcccagcagccccaactcccaccttctccttcccccgcttcacagccctgagtctcagcccctttttcaacttctcaaccactccatgggctttcctgtcttgggagtccttgcagcccttccttctgcctggaatgttctttctcttgcccttcacttggctggcttcttatcaccctccagatctccatttaaatgccattatttgtgtgtgtgtgtgtgtgt

SEQ ID NO: 549945 - DNA, 1046 bp, Homo sapiens
tctgtctgtccagccatccatatccttagcaagttataagacaaggggcatgtggaataagatgaggtgaaacctctatctaactatgccacatgccaggtggcagcacacccacatacccaaaaagggaaagtgtgactgtgatgccacgtctgagttgtcaggaaaccactccaggtttaggagacagaaattcccccaagcgccaaagagagggagagcatggccacagtccccctggtgccaccacagctgagggtggacagtgctttggggattggcactgttatttttttctttcaaaactgaagcaataagatctcagactctgaagtttctcttgaagtcctattaaggtccaccagaaaaggtccttctctggaagcccagcctggccctgctrctgggatggaactgtggccctgtgggcctaatctgggatgggccacatctaaaataaaagctcccatgggttccctctggtttatttcaaatccgctgatgcagtggtgtccggggcagtggctcctccaggacctggcaagccgtgttattgtggtcccaggcagtcccacatcggttcccaaagccaggcatacctgagccctgtgggccccagtcacatgtgaggggcaggtttgagtcactcacacaggcagagaagctgggcagtgggcaagaaagcctcggagctcatttagtcatgaggggattctagaataaaggaaggatttggcaagagtgcccaggtatcttagatgggctccccagaagccccctgagataaggatttgggtgatttgggtgcatgtagcttgcatgggaagtgatgccagaaagcactggaagtggagtgggaagtgagcttttagggaggctggccaacacacacttcgtcatcagccgttcccagctgggcaatgggccccagtccacctctgagttactggtggtccatcctccacctctgtccattaaggctgcgactgctcctgggctctgacctccccccacagcctgccaagcctgttgcccacaggagcgtg

SEQ ID NO: 549946 - DNA, 1046 bp, Homo sapiens
tctgtctgtccagccatccatatccttagcaagttataagacaaggggcatgtggaataagatgaggtgaaacctctatctaactatgccacatgccaggtggcagcacacccacatacccaaaaagggaaagtgtgactgtgatgccacgtctgagttgtcaggaaaccactccaggtttaggagacagaaattcccccaagcgccaaagagagggagagcatggccacagtccccctggtgccaccacagctgagggtggacagtgctttggggattggcactgttatttttttctttcaaaactgaagcaataagatctcagactctgaagtttctcttgaagtcctattaaggtccaccagaaaaggtccttctctggaagcccagcctggccctgctactgggatggaactgtggccctgtgggcctaatctgggatgggccacatctaaaataaaagctcccatgggttccctctggtttatttcaaatccgctgatgcagtggtgtccggggcagtggctcctccaggacctggcaagccgtgttattgtggtcccaggcagtcccacatcggttcccaaagccaggcatacctgagccctgtgggccccagtcacatgtgaggggcaggtttgagtcactcacacaggcagagaagctgggcagtgggcaagaaagcctcggagctcatttagtcatgaggggattctagaataaaggaaggatttggcaagagtgcccaggtatcttagatgggctccccagaagccccctgagataaggatttgggtgatttgggtgcatgtagcttgcatgggaagtgatgccagaaagcactggaagtggagtgggaagtgagcttttagggaggctggccaacacacacttcgtcatcagccgttcccagctgggcaatgggccccagtccacctctgagttactggtggtccatcctccacctctgtccrttaaggctgcgactgctcctgggctctgacctccccccacagcctgccaagcctgttgcccacaggagcgtg

SEQ ID NO: 549947 - DNA, 1046 bp, Homo sapiens
tctgtctgtccagccatccatatccttagcaagttataagacaaggggcatgtggaataagatgaggtgaaacctctatctaactatgccacatgccaggtggcagcacacccacatacccaaaaagggaaagtgtgactgtgatgccacgtctgagttgtcaggaaaccactccaggtttaggagacagaaattcccccaagcgccaaagagagggagagcatggccacagtccccctggtgccaccacagctgagggtggacagtgctttggggattggcactgttatttttttctttcaaaactgaagcaataagatctcagactctgaagtttctcttgaagtcctattaaggtccaccagaaaaggtccttctctggaagcccagcctggccctgctactgggatggaactgtggccctgtgggcctaatctgggatgggccacatctaaaataaaagctcccatgggttccctctggtttatttcaaatccgctgatgcagtggtgtccggggcagtggctcctccaggacctggcaagccgtgttattgtggtcccaggcagtcccacatcggttcccaaagccaggcatacctgagccctgtgggccccagtcacatgtgaggggcaggtttgagtcactcacacaggcagagaagctgggcagtgggcaagaaagcctcggagctcatttagtcatgaggggattctagaataaaggaaggatttggcaagagtgcccaggtatcttagatgggctccccagaagccccctgagataaggatttgggtgatttgggtgcatgtagcttgcatgggaagtgatgccagaaagcactggaagtggagtgggaagtgagcttttagggaggctggccaacacacacttcgtcatcagccgttcccagctgggcaatgggccccagtccacctctgagttactggtggtccatcctccacctctgtccatyaaggctgcgactgctcctgggctctgacctccccccacagcctgccaagcctgttgcccacaggagcgtg

SEQ ID NO: 549948 - DNA, 1072 bp, Homo sapiens
gaaataatgactcgggcagtgcgacggctcatgtctgcgggcacctacgtgcaggctgtactcctcgtgtacacatctattaatttgtttagscctgatggccaccctatgaggcaggcactgttgccatccccctttacagaggggaaactgaggcacagggcagttaagtcagggtcctgcctgagctagtgagcagcagagccagggtgcagacctgaggagcttccctctagacccagagcttcctctgtcacagatggccatgagcctggcggcgtaaaacaacacccacatgtcaccctacagctgaggttggatgccagctgtgcccttctcttttctggctgctccgaggcctcatccccatcttcgcctctcagagcgcatttcccttgcatctccagtcccttctccctccatgggtgctgctgtgtccccgtctgcgtgctccttccctgtgtctgtctgtaggcgtctctatgcatctccatacgtgtttctgtctccaccccacccctgccctgcgctgtccctttgagtggagcaggatggccaggccctcccatgtggacagatcttgctgttcctcatggaaattcaatgtccctgggccttggatctccttccaatgtggaccaagcctgggtcttgctgtgtctccgggtataccggctgcagccgcctaacctgagaccctgctgagggactcagccctgatctccggggcaccctctgcccagctgtcctatccccccctttgttcctgcctggtcacccccacctcagtgacaccccccacccgccactcagtagaagcctcagaccttccctgcagatgaaggggagtgggggcaaagggaggcctggaatcagggggttgtaaaatcgtgtcctggaatttgctggaagcagaaaagtcccccataaaagtctttggatccctcatattcggtttcacgagccagtcatccgggaaatggctaagagcagaccagcatcaaagcagcggcctctgctcccccagtcccagcccggtgggcggtcaggcatgggagaggccagggcctgg

SEQ ID NO: 549949 - DNA, 658 bp, Homo sapiens
gcatgagatatactaaaaaaattattcattgtttatctgaaaatcaaaattagttagaagtcttgtatttttacctgcatgggatatagttatgctacaagagtatttgttgtttatctaaaaatcatatttaattggggktgccatatttttatttgctaaacctggtaacccaaaatgggcaggagtggctacataattattaagaattattaaagatttccagatggtgccaggagagttttaaaccaagcctggagaacttgtgagcatggccctgtgcaactgccagagttgtacaccctggaagccagccaccctgagccctgcccgtcctccctctggtcacatggagggagtgtcctaggcactcccactctctgtcaagcaggacaggggatatggcacctagataggtgacagaattcaggtgatatctcaagaacccaaggaagaaaggtgagctcaagagtttcccaccggctcccgtcccattaatgtcggatagatggcaatttcgagtcttgtgcttgctattataagctgcttcaaatccttcaggaaagcagctttagataatgataattcctaaaggggccatgggcatgggattagggagggagtatgggggcctcagctgtttctgtaaggatttaat

SEQ ID NO: 549950 - DNA, 577 bp, Homo sapiens
taggctatggagattctgcagtaagtgataaaatcccctgctttcattgagctaatattccagaaccagtgcatgttacttttttgtttttgtaatttttaaagtttgtttgtaaaatgtgctaggagctccatttttagatagtctctggaaatgcagacacagtggaatcattttgtgatcacatactgaattattagagacagttcagaaaatgatgtggctttccaaaaaggaagctgacgctgattcccttctgataatcaaggaaaggcctatattaaggcaaaatatcagataaatgtattattttgttgttatcaattccatgactttttatatttaatctttgtgttttattttgcttcttttcagartgactattattattttagaacaaacaaaacactctacagtaaagttaacataaagatataaaattttatttactcattgctctttctttaataagaaaacttaaatttttaattgcaaaagcaatatgtgctcattattagaaaaattggcaacagaaaatgcaggtaattaaattttaaaaatcataactacttccata

SEQ ID NO: 549951 - DNA, 611 bp, Homo sapiens
taaaaaaagtatatattttttaaaagcaaggaaattctgacacatgctacaaaatgaatgaactttgaggccattatgctaagcgatataagcctgtcacaaaaaaaaaacaaaacactttttattccacttctatgagatacctagagcaggggtccccaacccctggttaagaactgggctgcactcttttgattaatgaaaccttatagcattatgaaatggctctctttgttcctagcaatattcttttctctgaaatstactttgtctaatattattattacctctttggctctcttttgattagtgttggaatgggatttttttcccccatccatttacttttaacctatttgtgtcttcatattcaggactagggctgggcatggtggctcacacctgtaatcccagcaccttgggaggccattgtgggcagatcacttgagcccaggagtttaagaccagtctgggtaacatggcaagaccccttctttaaacaaaaaattacattaaaaaaaaagaagaagtactgggctgcacagcaagaggtgacagcaggatgagtgagcattactgcttgagcatgccagggatttaggttgcatact

SEQ ID NO: 549952 - DNA, 1942 bp, Homo sapiens
ggccggctctggatgtaatcgtgtcagtatttccagataaggtaggataatcagaagtgatcataaaagatttcactccctgattcacatttgctttactaagtatagagctccattacccatttccacactggggtctctttaatgatgggggcagatgtcataaggctcccctggtgcagaaaactccagaactaaagaaactccaactctgtcttttagtttactgcatgtatccagaacatcattgaaaactcctcagggctgttctcaccagtgtatttccagatgatatttccaagctatctttattatcttccacaagttttaaatttttaacagattagcaattcatactgattgctttaaaaaccaaagcaaaagtccttttagttgcaacagttaaactgactcatgggtttcaatattaaataatctttaatatatgctattttaatgattaaaaagctcaagccagcgggtgcggtggctcatactgtaatcccagtactttgggaggccgaggcgggtggatcacctgaggtcgggagtttgagaccagcctggccagcatggtgaaaccccatctctactaaaaatacaaaaattagccaggtatgctggtgcgtgcctgtagtcccaggtactcaggaggctgaggcagaagaatctcttgaacctgggaggcagaggttgcagtgagccaagatcatgccactgcactccagcctgggtgacggagcgagactctgtctcagaaaaaaacaaacaaacaaactcaggtcaaccccattctatgttaaatttcataatatctgaaaaacgtcttgcaatatgatctttggatgttttataaaaatgtggctcaaagccctatttaatggctggcacatacacaacaaggtccactctgctgttgctgtctccacctggttaaaaagtcatatttctcatgagtgtttactacayaagaatcgtgcatttaagaaagtagacagaaaaatatattactgtagaaggagaagtaatgactgataattatataaatggcaccggaagggatttttttccctgcatgctatatattaaaagatctattaaatttacagctggttctagctggaatttatttcattgaattgtgctgatgtgctaatttggtcatttatctggacaataaatggcttgtcattttttcctatgagagcaaatgagagatatgtacttaaacttccctatccccttcagtagcttggaaatcattctcagggtggacagttggcaaacagcatatgcataaacttgcagataaaacccttgaagcaagcaggctgccagcacatggcaatgatggctctgaagcaaatgaacaaagaatccgaagcagacaattaggaaactctccccaggtcaaacaggctgtggatggtgaagtcaggatgggtccttgaaaaacaaaatgcctggtttgttcctctatgccaaataataaataagtaaaacaagtgttggaaggcaggaaagtaagcaggtactaatcacatccctctagtgcctcacatccaaacctcatcaactctcttgttgaaggaggaactggctaaagctggagctcataattctgtttcattttgacaaagagcttttcagcacagcacattttacaaacactggtaatactgagatcttgtctggagggctccatttaatagcacaatcgtcccaaagcaggtttgataatatgcagtaattatctcaaaaggaaaaatctagaaagacacaggccaaattagtttttgttttacatttcaaatctgtatttagatgagcaattgcttagtgtactatctagaatggaggctctagcctaatttttttttgagacagagttttgctcttgttgcccaggctggagtgcaatggtgcgatctcagctcaccac

SEQ ID NO: 549953 - DNA, 1942 bp, Homo sapiens
ggccggctctggatgtaatcgtgtcagtatttccagataaggtaggataatcagaagtgatcataaaagatttcactccctgattcacatttgctttactaagtatagagctccattacccatttccacactggggtctctttaatgatgggggcagatgtcataaggctcccctggtgcagaaaactccagaactaaagaaactccaactctgtcttttagtttactgcatgtatccagaacatcattgaaaactcctcagggctgttctcaccagtgtatttccagatgatatttccaagctatctttattatcttccacaagttttaaatttttaacagattagcaattcatactgattgctttaaaaaccaaagcaaaagtccttttagttgcaacagttaaactgactcatgggtttcaatattaaataatctttaatatatgctattttaatgattaaaaagctcaagccagcgggtgcggtggctcatactgtaatcccagtactttgggaggccgaggcgggtggatcacctgaggtcgggagtttgagaccagcctggccagcatggtgaaaccccatctctactaaaaatacaaaaattagccaggtatgctggtgcgtgcctgtagtcccaggtactcaggaggctgaggcagaagaatctcttgaacctgggaggcagaggttgcagtgagccaagatcatgccactgcactccagcctgggtgacggagcgagactctgtctcagaaaaaaacaaacaaacaaactcaggtcaaccccattctatgttaaatttcataatatctgaaaaacgtcttgcaatatgatctttggatgttttataaaaatgtggctcaaagccctatttaatggctggcacatacacaacaaggtccactctgctgttgctgtctccacctggttaaaaagtcatatttctcatgagtgtttactacataagaatcgtgcatttaagaaagtagacagaaaaatatattactgtagaaggagaagtaatgactgataattatataaatggcaccggaagggatttttttccctgcatgctayatattaaaagatctattaaatttacagctggttctagctggaatttatttcattgaattgtgctgatgtgctaatttggtcatttatctggacaataaatggcttgtcattttttcctatgagagcaaatgagagatatgtacttaaacttccctatccccttcagtagcttggaaatcattctcagggtggacagttggcaaacagcatatgcataaacttgcagataaaacccttgaagcaagcaggctgccagcacatggcaatgatggctctgaagcaaatgaacaaagaatccgaagcagacaattaggaaactctccccaggtcaaacaggctgtggatggtgaagtcaggatgggtccttgaaaaacaaaatgcctggtttgttcctctatgccaaataataaataagtaaaacaagtgttggaaggcaggaaagtaagcaggtactaatcacatccctctagtgcctcacatccaaacctcatcaactctcttgttgaaggaggaactggctaaagctggagctcataattctgtttcattttgacaaagagcttttcagcacagcacattttacaaacactggtaatactgagatcttgtctggagggctccatttaatagcacaatcgtcccaaagcaggtttgataatatgcagtaattatctcaaaaggaaaaatctagaaagacacaggccaaattagtttttgttttacatttcaaatctgtatttagatgagcaattgcttagtgtactatctagaatggaggctctagcctaatttttttttgagacagagttttgctcttgttgcccaggctggagtgcaatggtgcgatctcagctcaccac

SEQ ID NO: 549954 - DNA, 1942 bp, Homo sapiens
ggccggctctggatgtaatcgtgtcagtatttccagataaggtaggataatcagaagtgatcataaaagatttcactccctgattcacatttgctttactaagtatagagctccattacccatttccacactggggtctctttaatgatgggggcagatgtcataaggctcccctggtgcagaaaactccagaactaaagaaactccaactctgtcttttagtttactgcatgtatccagaacatcattgaaaactcctcagggctgttctcaccagtgtatttccagatgatatttccaagctatctttattatcttccacaagttttaaatttttaacagattagcaattcatactgattgctttaaaaaccaaagcaaaagtccttttagttgcaacagttaaactgactcatgggtttcaatattaaataatctttaatatatgctattttaatgattaaaaagctcaagccagcgggtgcggtggctcatactgtaatcccagtactttgggaggccgaggcgggtggatcacctgaggtcgggagtttgagaccagcctggccagcatggtgaaaccccatctctactaaaaatacaaaaattagccaggtatgctggtgcgtgcctgtagtcccaggtactcaggaggctgaggcagaagaatctcttgaacctgggaggcagaggttgcagtgagccaagatcatgccactgcactccagcctgggtgacggagcgagactctgtctcagaaaaaaacaaacaaacaaactcaggtcaaccccattctatgttaaatttcataatatctgaaaaacgtcttgcaatatgatctttggatgttttataaaaatgtggctcaaagccctatttaatggctggcacatacacaacaaggtccactctgctgttgctgtctccacctggttaaaaagtcatatttctcatgagtgtttactacataagaatcgtgcatttaagaaagtagacagaaaaatatattactgtagaaggagaagtaatgactgataattatataaatggcaccggaagggatttttttccctgcatgctatatattaaaagatctattaaatttacrgctggttctagctggaatttatttcattgaattgtgctgatgtgctaatttggtcatttatctggacaataaatggcttgtcattttttcctatgagagcaaatgagagatatgtacttaaacttccctatccccttcagtagcttggaaatcattctcagggtggacagttggcaaacagcatatgcataaacttgcagataaaacccttgaagcaagcaggctgccagcacatggcaatgatggctctgaagcaaatgaacaaagaatccgaagcagacaattaggaaactctccccaggtcaaacaggctgtggatggtgaagtcaggatgggtccttgaaaaacaaaatgcctggtttgttcctctatgccaaataataaataagtaaaacaagtgttggaaggcaggaaagtaagcaggtactaatcacatccctctagtgcctcacatccaaacctcatcaactctcttgttgaaggaggaactggctaaagctggagctcataattctgtttcattttgacaaagagcttttcagcacagcacattttacaaacactggtaatactgagatcttgtctggagggctccatttaatagcacaatcgtcccaaagcaggtttgataatatgcagtaattatctcaaaaggaaaaatctagaaagacacaggccaaattagtttttgttttacatttcaaatctgtatttagatgagcaattgcttagtgtactatctagaatggaggctctagcctaatttttttttgagacagagttttgctcttgttgcccaggctggagtgcaatggtgcgatctcagctcaccac

SEQ ID NO: 549955 - DNA, 1205 bp, Homo sapiens
aatatgaaaccctcacttttgagtttagaaataaagaaactaattgacatacccatatttacagaataaactatatactacaaataatatactacatttatcattttctaatttctattgcagaacttcttctacccactatagaaagcagcattttagataataaggtgatttactatatcctttaataataataaatgttctaagtttyttagaaataaaatattctcaaactatcctaattctcatgtatgaagtcataaaattgagttgcaaccagtctacttaaaattaatgtgtagtagtggaaaagactgcatttctgcagaatttcaattcatatatatgactagaaaaatatttgacaatgctttaagccatttagtttttatgaatttatcgctgtatagatcctatgctttattcttatatatttacaaccaaccagtgtgaccattttcagttaattgagtgagttcagcttcatttaaccacttaatgagttactaatatcattttttataaaatgaatttctgcaatggtaagcaggtagaaattggggagtacattaataatgcaaatgatttacagacattttcttttttatgttagatttttttaaaaaaataaaagctatcttttttttaacccaactgtagattatctgggaaatgtaaaaaaaaaaataatggacaaatcaaactcaagtaataattttgtaaggatagtaaaagaaatgacaaataactgtattttgtgttaattcaggtattaaattgtaatagcagtgtggatgcttgtctttgacaagttttctggtagttcaagaacaaactttcttcaaaatacatattcatatatatgtctgactgcaataactttattcaaaagttaattttaaagccatattttcattatgactctggattattttcataacagtatattcattatttagataggtagacagatgtataatacatgttggtaaagaaaactgtaagtttgaattctagatccagatttgtcccatacaagttctatatacttggacaaatctcccaatacttcggttagcttttctttatttttttttttttttttttgagacggagtctcactctgtcggccaggctggagtgcagtagtaagatctcagctcactgcaagctctgccttcttggttcacgccattctcctgcct

SEQ ID NO: 549956 - DNA, 616 bp, Homo sapiens
ctgacaaatcctcagctacaatgacacttgcagaggatttctctcttttgaggagtggaaagctggcatctatgtgccacattctctagaattaacatcctttccataaaattactcaagatatttcagagcaatcactcagaaatagttatttatacaacttacttaataatataagtgatggaccacctctaatttaagtgtgttccagtgctttccaccgtgtcctgccttggctacagatattccaccctatcctgtcagtgaccaatctatcctacttgagagaatsagcactggcatatggagggaaccatctggaatttctgttgctcaatgggtggctgatgggggagctgatctggaaagaggctccaaaaagaattaatgagttccagatgtaattaaagactgcttttccccccaaaggggctcaggactagccatggggtggtgcctcttggttccgaattacaccctttaaccacttgttcatccatcaagcactaaacaccaccatctttatcctagtgtgttttgccaagcagtgttttggctttttggtctttttttcctgaaagtgttctatttttacaattagaacactaaagcttta

SEQ ID NO: 549957 - DNA, 1929 bp, Homo sapiens
ttataccaagtgttggtgatgaagtagagcaactggtactctcatatgatatttctaagaatataaaatagaagttcctgatgcaatggcagcctttgccatggaactccaggtgcctgcattaggatctgaaccaatgatgctggcttcatctccaaagccaggagttaatgcccagttcttacctggattttgaatgtggaatttgccagccctggtgactccacaatctcgatcaattagtggcccttcagtaggagtagtggaaatgagatcacctttacttgcaggtgggtcaccaccacaaccagttttactagctcataaagataaaagtggcgctccacaagttagaagtatatatgatgacatttctagcctgggatttggatcaacacctttaacttcaagaagacagccaaacatttcatgatgcagagtcctcttactggagttacatctactcctggaacagggcaaagtacgtttagtccagcaaatgtcggtcagtcatgaaagatgacattttctccttcccggttggatcctttttatactcaaggagattctttgacttcagaaggtcaccttgatgacacttgggtgactgtgttcgggttttctcaagcctctgcttcctacatattattacaatttgcacagtatgggaatatcttaaaacacatgatgtctaacacaggaaattgaatgtatattcattatcagtctaaactgcaggctcggaaagccttaaccaaagatgggaggatttttagagaattcatcatgattggtgtaaaatcctgtattgactaaactgtaatgggaagcactgacagacgtgctttatcatctccatctttcgcctttacaccaccaatcaaaactttaggtacactagcacaacctgaaagtactcctaggatttctgccatgagacctcttgctacagcatacaaagattctactagtgattatcaggttatttctgacagatgaaaatcttgtatccaaagcaatggagtacatgtctggccggtagtagaagaccaaggaggaggttgttacactaaaacagagttagcagagtgctgctggttccttcggttagttatataactgttcctgcagtattggacagttatacttcttttaggaagaagcctttttcattaaagatacagcctatttgtagctcacactttagaagatgcttgagatacattttaaagaaaactaaaaatccctgtaaatagaattttgtgctttctgtaacagtgcatgcttcaacacagaaaactcagcattgattattgtaaattaagtaactgaaattctggtgagacttcatagtcttcatgagaaggtgggggtgaatttcataaaaggggactatagttatttctaccaagacacaaaggttataattagcaatttgaattatggtgttttaatttagatagtatttaatattataattatccttgtttgtatatgtcctgtcacagagtgttctcttggtgtattaaaaaatcagcattcttttaaaaaaacctactactacagtttcttcataataaacattgtcaatgattttaaaaagaatataaaatgggacactttgcacaacagtttggtagtttcttaaaaacttaaacacataggatccagcaattccactcctaggattcacttaagaaaaataagtatataaaaatatacctaggatttgttttaacagttttgaaggctgggggtggtgactcatgcctgtaatcccagcactttgggaggccgaggcgggcggatcacgaggtcaggagatcaagaccatcctggctaacayggtgaaaccccgtctcaaaaaaaaaaaatgcaaaaaaattagctcggcgtgctggcagacccctgtagtcccagctgctcagg

SEQ ID NO: 549958 - DNA, 2292 bp, Homo sapiens
ttttaccttaaaatgctaaaataactttaagaatcatcatcattgaatggtggtgagaaatgggtagagaaggacaggatacaagaagggcagaatgctgtacccgcgggggatgaggattcactagacattgctgtctttcatatgcctgaaatgttgtataataaaaagttgaaagaaagaggcattggatttttgtttgtttgtttgagacaggtcttggtctgttgcccaggctggagtgcagagatggaatcatagctcacttgagcctcaaactcacaggttcatgtgatctacccacctcctaatagctagggttacaggtgtgtgccacaatccctggcttctttttaaaacatttttttgtttcttttattattttttgttttttcttttttacaaacccttgtgttgagggctttcaatagatctcagcgaaggagctgctctgctgcataccaaaaaaatattttctagagacatggtcttactatgttgtcaaggctggtctcgaactcctggcctaaagtggtcctcctacctcagcctcccatggcactgagattacagacatgagccactatttctggctttgcactgggttttcattataacctttaatctgactctgatctttttttcatagaaatcaaatagtgagctatttctttgagaaagagtattttgaattaattaaacagtatccattgctaaaaatattctacttattcagaccaggaacttggagagtggacgaatttaacacagtgatcaatttcttccatatatttgcctaattaccctagaacaggcttcctcagcctggacactattcacatttgaggccagataattctttgccacaggggctgtcctgtgccctgcaggatattcagcagcatccttgacctctgttctcgagatgccaatagcaccccctgttacacatgcacgcacacacacacacacacgcacacttgtgacaaccaaaaatgtctccagacattgctaaatgtcccctggggggtgcaaaactgcccagtggagaaccactgccctagaacatgcattctcatatgccccctgaggagatgaaaattggtaattggttcctggggagatcttaaaatcttagaaatgacagttatttagggaaaaaatcattagggaaaaaaaaaaaacatgaggggctcttgcctagtatgctgatgtcccttaacatgactgtgaacctagatgcttatatttttaagacataaacagatatacaatatatctgcagcattaacattttatggtggggaattattttttaaaaatctaaaaaggctccatggggaggagggagtgataaaaaaacaaaacaaaacaaaaaaacaacaagttgagaaacattgccctccaaagaggtctgattcagctttaaacaaccattccctccagggacttggcatgcccaaagcaagcctcccaggatctagggggagtcttcctttatttggcaaaacaactgttgttacttcccagaacctccgcaattgtcttggaagcttgagatgtagggttataaaaattcagggaaaaaaccatgaggggatcttgccaagttcgctgataccccttgacatatcagtgaatctgggagctttcatttgtaagttataagagaaaccatacaagttgaggtgacctcagacacatggccaccaatgtgtcctgttggaacaaatgacctaagcagcccatgccattttatacaattcttaaaagaaaggagagtggcggccgggcgtggtggctcacgtctgtaatcccagcactttgggaggccgaggcggacggatcacgaggtcaggagatggagaccatcctggctaacacggtgaaaccccgtctctactaaaaatacaaaaaattagccgagcatggtggcaggcgcctgtagtcccagctacttgggaggcggaggcaggagaatggcgtgaacccggcaggcggagcttgcagtgagccgagatcgcgccgctgmactccagcctgggcgacagagtgagactccgcctcaaaaaaaaaaaaaaaaaaaaaaacggagagtggtatttttcaaatttcccatctaccagcaaaaccccttgacagcaatttcattccattaaatgaagcaaaacaaacaaatcttgcaatttcctctactttcctgtttcctctttctttatgcaaaggcctgcccaaccactctaagaaccagctggtttataataatgaatattcatgctcgatggcattaaa

SEQ ID NO: 549959 - DNA, 635 bp, Homo sapiens
tttgggaggctgaggtgggcagatcacctgaggtcaggagtttgagaccagcctggccaacatggcaaaacctcatctctactaaaaatacaaaaattagctcggcatggtggagggcacctgtaatcacagctacttgggaggctgaggcaagagaatcacttgaatctcagaggcaggttcaaaaaaaaaaaaaagaaaaaaatagaagattgtatagcccatttggtaagtctgcctgggtttaaattccagctctttactccctacctggatagtgtacttctgtttcctcagccataaaatcaagataataataacagtaaagtcatggaatcattgtgataattaactatatggaacacttagccaatgcttgatacatagtcagtgccgaaatagtgataactgtaataatggctcacagtgctgttagcagtagagcatctttaattccytgtgtagtatagatctgctgtagggttttctgaccattggtcactatcagacacctcacaaaaaaaggaaagttttctctccaaggatattggagatgaataaattggaaggctggattccctacattgaagtagatggttgccgagggaagtggcctgggggagcttccagttcca

SEQ ID NO: 549960 - DNA, 635 bp, Homo sapiens
tttgggaggctgaggtgggcagatcacctgaggtcaggagtttgagaccagcctggccaacatggcaaaacctcatctctactaaaaatacaaaaattagctcggcatggtggagggcacctgtaatcacagctacttgggaggctgaggcaagagaatcacttgaatctcagaggcaggttcaaaaaaaaaaaaaagaaaaaaatagaagattgtatagcccatttggtaagtctgcctgggtttaaattccagctctttactccctacctggatagtgtacttctgtttcctcagccataaaatcaagataataataacagtaaagtcatggaatcattgtgataattaactatatggaacacttagccaatgcttgatacatagtcagtgccgaaatagtgataactgtaataatggctcacagtgctgttagcagtagagcatctttaattccttgtgtagtatagatctgctgtagggttttctgaccattggtcactatcagacacctcacaaaaaaaggaaagttttctctccaaggatattggagatgaataaattggaaggctggattccctacattgaagtagatggttgccgagggaagtggcctggsggagcttccagttcca

SEQ ID NO: 549961 - DNA, 681 bp, Homo sapiens
ctttgtctaaccatcagtctttagctctgcatggcagctgtactattgacattagcttgtgcactgggtgaaattgaagtgagttaaatgtgaccttggcttagttgttgaagtagaaatgaactctactgggagtgaaaaaaaataagaccagtttctctaacttcattttttctttaatgagtttaacagcactcttaggatttgatacattttataaaaacgctttatttccttttctattatatactgggtaatcagcatttagtaaggttagcttgcccttttgttatgaaatccttgtcttaggtatttatatgctatattcttttttaaatggcacacttattttccctttcctcccyttattagtcgtaaccacataaatatgaactgaaagttttcaggcatatatgtccagtgacttcttaatacatgctagaccactgaaacatttttaaatgctcagtgtttctgatgacattgcattgtcttgtccactaggttacatgtgctctcactaaacaacctgctggtaaatcaagtgcagtgaatatgtgagacctgcaggtagacaggctaggctggaacacttctaacactgcagctcctttgtttttcaaaaacagcaggagatagtgtttgcatcacaggtaaaacagcatcgattatattttctga

SEQ ID NO: 549962 - DNA, 681 bp, Homo sapiens
ctttgtctaaccatcagtctttagctctgcatggcagctgtactattgacattagcttgtgcactgggtgaaattgaagtgagttaaatgtgaccttggcttagttgttgaagtagaaatgaactctactgggagtgaaaaaaaataagaccagtttctctaacttcattttttctttaatgagtttaacagcactcttaggatttgatacattttataaaaacgctttatttccttttctattatatactgggtaatcagcatttagtaaggttagcttgcccttttgttatgaaatccttgtcttaggtatttatatgctatattcttttttaaatggcacacttattttccctttcctccctttattagtcrtaaccacataaatatgaactgaaagttttcaggcatatatgtccagtgacttcttaatacatgctagaccactgaaacatttttaaatgctcagtgtttctgatgacattgcattgtcttgtccactaggttacatgtgctctcactaaacaacctgctggtaaatcaagtgcagtgaatatgtgagacctgcaggtagacaggctaggctggaacacttctaacactgcagctcctttgtttttcaaaaacagcaggagatagtgtttgcatcacaggtaaaacagcatcgattatattttctga

SEQ ID NO: 549963 - DNA, 681 bp, Homo sapiens
ctttgtctaaccatcagtctttagctctgcatggcagctgtactattgacattagcttgtgcactgggtgaaattgaagtgagttaaatgtgaccttggcttagttgttgaagtagaaatgaactctactgggagtgaaaaaaaataagaccagtttctctaacttcattttttctttaatgagtttaacagcactcttaggatttgatacattttataaaaacgctttatttccttttctattatatactgggtaatcagcatttagtaaggttagcttgcccttttgttatgaaatccttgtcttaggtatttatatgctatattcttttttaaatggcacacttattttccctttcctccctttattagtcgtaaccacataaatatgaactgaaagttttcaggcatatatgtccagtgacttcttaatacatrctagaccactgaaacatttttaaatgctcagtgtttctgatgacattgcattgtcttgtccactaggttacatgtgctctcactaaacaacctgctggtaaatcaagtgcagtgaatatgtgagacctgcaggtagacaggctaggctggaacacttctaacactgcagctcctttgtttttcaaaaacagcaggagatagtgtttgcatcacaggtaaaacagcatcgattatattttctga

SEQ ID NO: 549964 - DNA, 560 bp, Homo sapiens
agaggcagggtctcattttattgcccaagctggtctcaaactcctgtcctcaagttatcctcctgcatcaggctctcaaagcactgggattacaggcatgagccaccacacccagcctaacccctgttctggataagaaactttattctctaatagaggcactggacatgaaatggctaaggaacattactaagctacataccagcaagaacaatcaagctagaggttgcactgtggggctttttttttctactaaaaaaattcttgtgggttccaattcttcctgctgaagaacatacagactctcttggtatgcaaggtcagcatgatagagctcccttataacccaacaaaactggcctacttactgctcctagaacatgcctcayccttccctgcatctgtgcctctgtttggaggtattccaacctcctagactcccttttcttcctaccccagccccacagcctggaggccaacataagccagcaatacctcatctcctggcaataaatgaccctggttacaattgtgcaaaaaggaaactcattcacttcttt

SEQ ID NO: 549965 - DNA, 560 bp, Homo sapiens
agaggcagggtctcattttattgcccaagctggtctcaaactcctgtcctcaagttatcctcctgcatcaggctctcaaagcactgggattacaggcatgagccaccacacccagcctaacccctgttctggataagaaactttattctctaatagaggcactggacatgaaatggctaaggaacattactaagctacataccagcaagaacaatcaagctagaggttgcactgtggggctttttttttctactaaaaaaattcttgtgggttccaattcttcctgctgaagaacatacagactctcttggtatgcaaggtcagcatgatagagctcccttataacccaacaaaactggcctacttactgctcctagaacatgcctcatccttccctgcatctgtgcctctgtttggaggtattccaacctcctagactcccttttcttcctaccccagccccacagcctggaggccaacatmagccagcaatacctcatctcctggcaataaatgaccctggttacaattgtgcaaaaaggaaactcattcacttcttt

SEQ ID NO: 549966 - DNA, 1190 bp, Homo sapiens
agattagactcaggggcttatttgccttcttaatgaaggaaaacacgcttagatttgctcaacaaagtttatgggaggccattgtttgaaataaccaaaccagaatggagttcctggaactaggtgtcatgtaatcgatttttaaaatgggccagtcctccaaaaagcagaaaattcacagcggccagtctgaagggactcctgagccgccataaggcagtctcttctgtgtcatccatataaggtgattcactttgaaatgattcaagaaaaagccaattatatgtttataacaaattttttatgattttgatttttgttttttatcaggtttcaagtgactaggacgtataaaagtatacgggtgaagtaatgaagacagggctattttattacagtctgtttatgcatactcatcttgatgttgtctctgtcttcaatgagaacagtagctcttctctccctgatttgaggaaggaacctttctcaaaggcaatacatgccttacttttaggcagataaagccttaaagggtagaaaacttttcttgtcctgttgagtctcaattgtctttagctcagagtaattcttatgccaatgtagcataattttggagtggcatattctgattcctttcagaggaagctcagataggcaatagaaacaataaaccttcaacaaatagccaacaattttttctcatgtcacacaacttcgacaaatataaatatactctggaaatgtactgccaacatcagcattgacttcaggttgctttctcaaacagtgacttcgtgagatcttgatctcactttggccttcatgtaactcattacttacactcaaaccgagttctggacttgaatctaatgttccttggctatgtgttcctagatgtgcccttgtctctaccattgcccaagaccttcccttgtcctgagctgaccagccttcttcctggtccttgtcaggataacgtgcctaggcccaagctgtactgaagacaccaaaatgtctctcttagccaggtatcagttggactcataggctgacttgactgattattctgaagakgtatttgatgtagattatgcagggggaaaaaaaagtactaccttatccatgcccatgtatgcatggcaggacagccacagtccattttgctaaatcaagtgtatctttacaaagcc

SEQ ID NO: 549967 - DNA, 546 bp, Homo sapiens
aggtatgtctttatcagcaccataaaaatggactaatacaccctgggagccatcttagtccctgaaggctcacatggtgccatggcattagtggggagggagcttttagtgcttggttgtcagagtgggccgagctgtaactcttactccctgattcttgtgcacctcaggtagggtttacccatctgcygatgtaggatatggtggactttcattctttatgggatgtctgaactccttttacctggtagtagtgaccagcatatcactactacctcttccaaccctctttcaactaacttcttctgtcttctagaaagcagatatctctagtgttgagggataatctttgaggttgccttaggctccctctgagaaacaacactcaaaacagccacttatattcttgccatatttgcacagcaaacttatttaggctacagacatataggtatcagacaagaagaacagaaatctatgctactcaagaattgtcccatgcttctctgaggatgcccatttgcttaccaattactgtaacagttg

SEQ ID NO: 549968 - DNA, 839 bp, Homo sapiens
cactgttgtgtttagaatgacttttttttatcattagtggttctttttcagaaatattcccatattctactttgtgtttctctaaatatttatctaaaattgaaactatagctcaaggataacaaccttytaatctatactgcttcatggtccagcctttgtcctcaaccaggacttgtgaaaaaataaatactccaacatgaaacacaatcgttttgctaagaacttaatggatccacaagaaaaatatgaagaccgggctgtcagaaggacatcttaacatggcaataccactgtcttagtaacagattcagtaacataagggatttatgagatacttagcacagaagggaataaattgtgctaaagcagagtaaaaatatgcaaaaataacaaaaataattaacaagtagagaaattactacagattacaaatataaaggaatatgtcacacaatagcaatattgccccttcaggttattaggtaccatttagtaagaactaattatatatactcattggtaacgtattaaattaaagtaacagaatatcctcgaagtttatcttgttttgatggatgccatttctattacccagagttgaccaaattgtaaaagctaatcaaaatgactaagaaagtaatgacgacttattgataattaaacttggttcagttattcatttgatgaatagtcactgaaaaccaactgtgtgccaggcaccattagctaggtgattcttgtgaaatgaacaaaattaagtacctgccatcacggagcacacatcctagtggcaagaagataatagacaatacgttacagagaaaaaataaagcaga

SEQ ID NO: 549969 - DNA, 839 bp, Homo sapiens
cactgttgtgtttagaatgacttttttttatcattagtggttctttttcagaaatattcccatattctactttgtgtttctctaaatatttatctaaaattgaaactatagctcaaggataacaaccttctaatctatactgcttcatggtccagcctttgtcctcaaccaggacttgtgaaaaaataaatactccaacatgaaacacaatcgttttgctaagaacttaatggatccacaagaaaaatatgaagaccgggctgtcagaaggacatcttaacatggcaataccactgtcttagtaacagattcagtaacataagggatttatgagatacytagcacagaagggaataaattgtgctaaagcagagtaaaaatatgcaaaaataacaaaaataattaacaagtagagaaattactacagattacaaatataaaggaatatgtcacacaatagcaatattgccccttcaggttattaggtaccatttagtaagaactaattatatatactcattggtaacgtattaaattaaagtaacagaatatcctcgaagtttatcttgttttgatggatgccatttctattacccagagttgaccaaattgtaaaagctaatcaaaatgactaagaaagtaatgacgacttattgataattaaacttggttcagttattcatttgatgaatagtcactgaaaaccaactgtgtgccaggcaccattagctaggtgattcttgtgaaatgaacaaaattaagtacctgccatcacggagcacacatcctagtggcaagaagataatagacaatacgttacagagaaaaaataaagcaga

SEQ ID NO: 549970 - DNA, 839 bp, Homo sapiens
cactgttgtgtttagaatgacttttttttatcattagtggttctttttcagaaatattcccatattctactttgtgtttctctaaatatttatctaaaattgaaactatagctcaaggataacaaccttctaatctatactgcttcatggtccagcctttgtcctcaaccaggacttgtgaaaaaataaatactccaacatgaaacacaatcgttttgctaagaacttaatggatccacaagaaaaatatgaagaccgggctgtcagaaggacatcttaacatggcaataccactgtcttagtaacagattcagtaacataagggatttatgagatacttagcacagaagggaataaattgtgctaaagcagagtaaaaatatgcaaaaataacaaaaataattaacaagtagagaaattactacagattacaaatataaaggaatatgtcacacaatagcaatattgccccttcaggttattaggtaccatttagtaagaactaattatatatactcattggtaacgtattaaattaaagtaacagaatatcctcgaagtttatcttgttttgatggatgccatttctattacccagagttgaccaaattgtaaaagctaatcaaaatgactaagaaagtaatgackacttattgataattaaacttggttcagttattcatttgatgaatagtcactgaaaaccaactgtgtgccaggcaccattagctaggtgattcttgtgaaatgaacaaaattaagtacctgccatcacggagcacacatcctagtggcaagaagataatagacaatacgttacagagaaaaaataaagcaga

SEQ ID NO: 549971 - DNA, 1054 bp, Homo sapiens
ctgcctttgtaaaaaagcttgtctatgagaaagacctccggcttcatgaggtatgttgaaaatcacttcttgttatgaataagtcytgttcatagaacaattactatgattttcatcatgcctttataaacttcagaaagcctaacttatcccttgtgaattaaacagaaagaaaaaccttttacaaatcacaaaagcagctgataaggcaatattttattttctcaaaaagtgacataaaagtcacttaataagtgcttttgaaaaacaacatctgaataaaatatgagtacaatgataattcctggagtaattttttgcccaagaaattacctataggacttaggatctaacagaggaagtttaaataacaacaataacaactgttcaggcagagagattgttggcatggtaactaaaataacccaaatgtagatatagatagagctataaacatagacatagacatatggcatatttcggctctcacaaagaaaattctctttccagtataccttgtctccttcaattaccttctccatttcccactgactcctgacttatagaaactaagaatttcatgttatgctactgattgggttagtaaccatatcacaatggaagacagaaccaggagtgtgatgcatgacctctttctgggcacgttcttcatcattaaccccaaatccaaaatatcttacttctttttagaatttatgataaagcattatgtgatttttagattgtatttgagtagaaattattttatctacttatcccataatgagtcccttcttatactcactcatggagtggaaacaaaggtgaaacatttcaaaactggggcacaataattattgcaaggcctggctgaattctgaaataatgaggttagaggaacccgtccatccacttgtccttttcagacttaccttgccaatgcttttagacaattgatcatttctccctataagatacaagttgctgctacatatttctgttagttcagcatcaggctttcagggttgtccccgtatttgaacttatatttttt

SEQ ID NO: 549972 - DNA, 1054 bp, Homo sapiens
ctgcctttgtaaaaaagcttgtctatgagaaagacctccggcttcatgaggtatgttgaaaatcacttcttgttatgaataagtcctgttcatagaacaattactatgattttcatcatgcctttataaacttcagaaagcctaacttatcccttgtgaattaaacagaaagaaaaaccttttacaaatcacaaaagcagctgataaggcaatattttattttctcaaaaagtgacataaaagtcacttaataagtgcttttgaaaaacaacatctgaataaaatatgagtacaatgataattcctggagtaattttttgcccaagaaattacctataggacttaggatctaacagaggaagtttaaataacaacaataacaactgttcaggcagagagattgttggcatggtaactaaaataacccaaatgtagatatagatagagctataaacatagacatagacatatggcatatttcggctctcacaaagaaaattctctttccagtataccttgtctccttcaattaccttctccatttcccactgactcctgacttatagaaactaagaatttcatgttatgctactgattgggttagtaaccatatcacaatggaagacagaaccaggagtgtgatgcatgaccwctttctgggcacgttcttcatcattaaccccaaatccaaaatatcttacttctttttagaatttatgataaagcattatgtgatttttagattgtatttgagtagaaattattttatctacttatcccataatgagtcccttcttatactcactcatggagtggaaacaaaggtgaaacatttcaaaactggggcacaataattattgcaaggcctggctgaattctgaaataatgaggttagaggaacccgtccatccacttgtccttttcagacttaccttgccaatgcttttagacaattgatcatttctccctataagatacaagttgctgctacatatttctgttagttcagcatcaggctttcagggttgtccccgtatttgaacttatatttttt

SEQ ID NO: 549973 - DNA, 1054 bp, Homo sapiens
ctgcctttgtaaaaaagcttgtctatgagaaagacctccggcttcatgaggtatgttgaaaatcacttcttgttatgaataagtcctgttcatagaacaattactatgattttcatcatgcctttataaacttcagaaagcctaacttatcccttgtgaattaaacagaaagaaaaaccttttacaaatcacaaaagcagctgataaggcaatattttattttctcaaaaagtgacataaaagtcacttaataagtgcttttgaaaaacaacatctgaataaaatatgagtacaatgataattcctggagtaattttttgcccaagaaattacctataggacttaggatctaacagaggaagtttaaataacaacaataacaactgttcaggcagagagattgttggcatggtaactaaaataacccaaatgtagatatagatagagctataaacatagacatagacatatggcatatttcggctctcacaaagaaaattctctttccagtataccttgtctccttcaattaccttctccatttcccactgactcctgacttatagaaactaagaatttcatgttatgctactgattgggttagtaaccatatcacaatggaagacagaaccaggagtgtgatgcatgacctctttctgggcacgttcttcatcattaaccccaaatccaaaatatcttacttctttttagaatttatgataaagcattatgtgatttttagattgtatttgagtagaaattattttatctacttatcccataatgagtcccttcttatactcactcatggagtggaaacaaaggtgaaacatttcaaaactggggcacaataattattgcaaggcctggctgaattctgaaataatgaggttagaggaacccgtycatccacttgtccttttcagacttaccttgccaatgcttttagacaattgatcatttctccctataagatacaagttgctgctacatatttctgttagttcagcatcaggctttcagggttgtccccgtatttgaacttatatttttt

SEQ ID NO: 549974 - DNA, 1054 bp, Homo sapiens
ctgcctttgtaaaaaagcttgtctatgagaaagacctccggcttcatgaggtatgttgaaaatcacttcttgttatgaataagtcctgttcatagaacaattactatgattttcatcatgcctttataaacttcagaaagcctaacttatcccttgtgaattaaacagaaagaaaaaccttttacaaatcacaaaagcagctgataaggcaatattttattttctcaaaaagtgacataaaagtcacttaataagtgcttttgaaaaacaacatctgaataaaatatgagtacaatgataattcctggagtaattttttgcccaagaaattacctataggacttaggatctaacagaggaagtttaaataacaacaataacaactgttcaggcagagagattgttggcatggtaactaaaataacccaaatgtagatatagatagagctataaacatagacatagacatatggcatatttcggctctcacaaagaaaattctctttccagtataccttgtctccttcaattaccttctccatttcccactgactcctgacttatagaaactaagaatttcatgttatgctactgattgggttagtaaccatatcacaatggaagacagaaccaggagtgtgatgcatgacctctttctgggcacgttcttcatcattaaccccaaatccaaaatatcttacttctttttagaatttatgataaagcattatgtgatttttagattgtatttgagtagaaattattttatctacttatcccataatgagtcccttcttatactcactcatggagtggaaacaaaggtgaaacatttcaaaactggggcacaataattattgcaaggcctggctgaattctgaaataatgaggttagaggaacccgtccatmcacttgtccttttcagacttaccttgccaatgcttttagacaattgatcatttctccctataagatacaagttgctgctacatatttctgttagttcagcatcaggctttcagggttgtccccgtatttgaacttatatttttt

SEQ ID NO: 549975 - DNA, 1103 bp, Homo sapiens
tcagttaattagtatgcttttctgtttcttgagaaattayatgtggatgacttacaggtgtatcaaatgaaataaatgtgctttctaaaagataatgtcaatgaagggaacatttggactgaagaatagtttcaaattataagacacatgcagaggcacatacttagcctttgcttcctgcagcagatgaccactttctaataaaagtcctcaatgccatggaggccacaattatattccccaaaagaaaagaaatgagaactatgacagaggacaaattagcctccagttccagaattatacaaacatcagagattatctttcctgactttgagagccaggcaaatgtttaattaaaagttctgttcctagagatttttttctgtaagcaaaaactgttgaaatgactactccatgatttatatatcattttactctatgcttccttaagtaaatggtgtttccagaggtataaattaactgtcagaaagagaagagacaataaaagttattttcaaaagagcccaatcccacaaagtcgtgtcaagcaacatgattttttaagcatatcctatgttaaggattgggggaggaaatctactattacagactcttagccatcaagtccaaattaattaactcagaaactctccccaaaagcagtttctcagcacctgaaagactcagagtcacgtaggttagacatgttttccattgagggtaccataaagagcggcagctccttttttttccttttttttttttttccttttttttatgactattgtctctacttcaacatgtctaataacaaggagtgaactaccttacttggtaatcttgtccattgttagccccgattacaagaagaattttaccttgctgaacatgaactgaaattgtagaagttacttcttgaaaacaatttctggtggggaggtggaatactcatcaccatgctatcaagagagttctttcacattcttcaaagtacttttgaaatagagaattcgatttggtttaatgaatattttatatcttaaaaaaggaggcttaaatttccttagtgttttttgaatttagaatgaaactttagagttgaa

SEQ ID NO: 549976 - DNA, 625 bp, Homo sapiens
ctgtatctctcctacttctcctgtttgggtaagctgctgattaagcaatgaaagaagaattaatagaattaaatgcccctagacacaaataggacttaaatctcattagctaaattacaattgtcttggggtttcatttgacatgagtgatgactaacaacacattgcacttgctagtccatagactgcaaagtataatacttttgaaaattaatgttgttattaatagtaatacctaaaattaataagcatttattgggtgccaagtgtcatgctttctaatttacatatgtgatctcatttacataaaaatgaaagctttagaatgatgagaaaatgtgtatacatgtataaatttatgtattgactatatgagtatatgtagcattatgaagtgcatataccttcatgtatacttacttatatttatctttttatagatgtataaggacacacacataatattgtttctatcttaagctaatacaggtaayacaggctgatataatcaatgcttagcataacaaatctttctgccctgaatacatggtagtaacccttaattagcaattgtagctaatgcaggaactctgtctctagatctatttaattgccccccaaattg

SEQ ID NO: 549977 - DNA, 562 bp, Homo sapiens
gaattttctgatgttcttttgccagtctgtggtgtccttcacattctaaatgaattggaatagattgtacaatgttcttttatagtagtagctacaagaaaggccgtccaccaatccattcattcaacaaatagtgtaagtgctatggagagaagcaggataggggtgggggtgtcaagggtgccctccctgtcaggtgacagtcacaagacctgagggctgtgagggagttagccgtgccatgcaaacacccactttaagaatgttctaggccactgaattctaggatgtaaatatgcataacatagggttttttgtatagtagatgcttaaaaaagcttctgtgaagggataartgattaagatttcatgagttttaatgttcaagtgtccctcatggtggactaggcacttcggtttctaatgaacttattttatactgtaggttgtgacccaggggcagtattcaacatgcagattgtttggagcatatagtatttttaaaaaccaggacatttgatatcgaagtccaaatttacaatgtatttggaaaaatatgagc

SEQ ID NO: 549978 - DNA, 569 bp, Homo sapiens
ctgggagacttctcacctgcagagtggatgatgggggaccttgaggactgaacaggagaaagcacactgaaccgagcctggtacctagtaagcactcagtaagtcttggcacttactgtgataattgcattttaagcccagctaccaaaatttccagacctacgttaccatcttcaaatgagtgcccctacccgtttccctaacgttgctcaaacttgcattttctgaggagcgtctgttggatgcctttggcccttgcaccacgtacagctttccacgcttattggctggccactgggtaccaaggaccatggcgggcactctggaatgctctgttttggcaaactttcttccccaagaacrgatttgacttttgaaaagtggtctgaaagtcagcctccccagccctggtcacagcagaaatagttttggacccaggtgagttgagtccacaaaataacaggccgtgtctacttgagctgaagccttatcagttggcccagtaggtcccatctgaagaagccctgtatttttgaaaaatgttaactctccctaaaaggttacattga

SEQ ID NO: 549979 - DNA, 607 bp, Homo sapiens
gctcacccagtcaccctaatcagtgcattctatacatctgctcgccgtctttctccattcccagctacttagagaagcagatcataaggcagtagttttgcattctggctctgcaatttgctacctgtgagaccttggcaaagttacttagcctctttttgcctgggtttccatatttgtaaagtggcgataatgacgacagctgctcataaagttgtaagtattaaatatataaccttatcgtgcctgaaatgtagtaaagcactcaacagcatgacgataatcatgatgatacyttttcattatcaaagtcaactacttttcttaaaaagagtactcctctaccccggccctctctaacatttacaatcccctcatctaacagtgggcagagtggcctcctactcccaaaccacaactagctagaacaaactgagccattagtaagcaggctgtaggataaacacgtttgggcaaaataatagatgaaggcaaagtaaagatgaatgttagcgctccccaaaccatctgtgctccatcaaactagacattctaaacacgtaggctatggttcagaatccattcaaagttggggtattttaaggtg

SEQ ID NO: 549980 - DNA, 627 bp, Homo sapiens
aggtgattcagatatgggtgctctccaagatcacacttagtgaaactttgcattttcttatctttaattgttctctacactctctcccatgttaccaattttaaaatctcttcttctatttttgtttgtttktttttttttttttgagatgaagtcttgctctgtggccaggctggagtgcagaatacattgtgcaggatcttgtctcactgcagacttcacctcccaggtccaagcaattctcctgtctcagcctcccaagtagctgggattacaggaatatgccaccacacatgtttcactatgttgaccaggttggtattgaactcctccctgcctcagcctcccaaagtgcagacctgaaccaccatgccgggtctcttcttttccttaactagtgtttcattattggaatgctaagcatgtgggagttatttatatcctactgctcaaggtcatcaccaacgtctgattgcaaaaattcaaaaaattgcaacctcaggcataaatgggttaaaccccagtattcactatctacagatgaccttgcctgttacttaacagataacaaggtaactaaagtacatttcttcagtttccattctttaagtgtctctctcttttttt

SEQ ID NO: 549981 - DNA, 627 bp, Homo sapiens
aggtgattcagatatgggtgctctccaagatcacacttagtgaaactttgcattttcttatctttaattgttctctacactctctcccatgttaccaattttaaaatctcttcttctatttttgtttgtttttttttttttttttgagatgaagtcttgctctgtggccaggctggagtgcagaatacattgtgcaggatcttgtctcactgcagacttcacctcccaggtccaagcaattctcctgtctcagcctcccaagtagctgggattacaggaatatgccaccacacatgtttcactatgttgaccaggttggtattgaactcctccctgcctcagcctcccaaagtgcagacctgaaccaccatgccgggtctcttcttttccttaactagtgtttcattattggaatgctaagcatgtgggagttatttatatcctactgctcaaggtcatcaccaacgtctgattgcaaaaattcaaaaaattgcaacctcaggcataaatgggttaaaccccagtattcactatctacagatgaccttgcctgttacttaacagataacaaggtaactaaagtacatttcttcagtttccattctttragtgtctctctcttttttt

SEQ ID NO: 549982 - DNA, 546 bp, Homo sapiens
cttagaaatgaaaactaacttctggaacaaggagaaatgtcaatgtttttagacattgccagataaatctcaatttttttttccacagccaagcagtaaagcgtctcatcctgcagacatgttgacttcttggtctgctctttgtgctcccttccatgtagcggtgacagtgcacctgttgacctgggagcatcatcagccaaggggatccctacaygtgctgtgatcacatctccaatacgtgtttcccttagtcctaattcaattttgaatctgagactcatgggcttttgctaacttgcacagctggagaagaggaagaagtgcatataggatccaatagcagaatcagaggtaaagcagatggtcagcattagggtaagaggtggccagtgtgcatgtggcacctgtttccaccagcactcccttttcaggttctagctccaaagaaagcaggccaggactcatggacatagaggtggccaaccatgagcgctgaagctgtctcagggccacagctcccctaaaagtggaagggagagccct

SEQ ID NO: 549983 - DNA, 592 bp, Homo sapiens
tcaaatttgtrccaactatatagtttatgaaactcttaacttggggatgaagttaaaaatgtttaagatgattgcagatgcatacaagtgcaggtgcacgctatacagttccctctgttttccccaagattaataccagccaaaaattaactcacaatccaaaattagagaccatggatggaggcaaaccagctcaggcataagtcagcagagaaaacaacagcagtgctcaagccttatggatttcagatattgatagtatcagatataaaacacactgataagtgtgtttaaagaaataaagaattaaatcaaacatgagaaaatatcaacagtcatgagtaattttttcaaaaataatccaaataggcctttagaaatagaaaatagaagcattcaattgaaaacttattggatgggcctaaaagaagattagataccactgagggggaattagtgaactagaagatatagccaaaaattattcagaaaatagtggagagagacagcacagaaaatatagaagagggattgagagacatttcagaagatgtcttagttatttattgctgcataacaaattacctccgaa

SEQ ID NO: 549984 - DNA, 592 bp, Homo sapiens
tcaaatttgtgccaactatatagtttatgaaactcttaacttggggatgaagttaaaaatgtttaagatgattgcagatgcatacaagtgcaggtgcacgctatacagttccctctgttttccccaagattaataccagccaaaaattaactcacaatccaaaattagagaccatggatggaggcaaaccagctcaggcataagtcagcagagaaaacaacagcagtgctcaagccttatggatttcagatattgatagtatcagatataaaacacactgataagtgtgtttaaagaaataaagaattaaatcaaacatgagaaaatatcaacagtcatgagtaattttttcaaaaataatccaaataggcctttrgaaatagaaaatagaagcattcaattgaaaacttattggatgggcctaaaagaagattagataccactgagggggaattagtgaactagaagatatagccaaaaattattcagaaaatagtggagagagacagcacagaaaatatagaagagggattgagagacatttcagaagatgtcttagttatttattgctgcataacaaattacctccgaa

SEQ ID NO: 549985 - DNA, 406 bp, Homo sapiens
ctattaaagaaggataacaaacattcctgtcaaagaaaaaaaccccacaactctggggaaaaaaacactaaagataaaattttaatccaaaagatttttaaaagagtagaattgataaacctaagaactggtccttatctaaacataaatacaaataagagcattaagaactaaggactatattgtgtgttttgtttgtttgttttgttttgtttttcagatggtcttgttctatcccccaggctggagtgcaatggctcgatctcagctcactgcaacctccaccactgggttcaagtgattctcgtgcctcagccacctaagtagctggaattgcaggcrcacaccactacatttggctaatttttgtatttttagtagagacagggtttcaccatggtggcca

SEQ ID NO: 549986 - DNA, 918 bp, Homo sapiens
attattattatttagatacaggttctcactctgtcacccaggctggaatacagtggtatgaccacagctccttgtaacctcaaactcctgggctcaatcaatcctcgcacctcagcctcccaaagtactgagattacaggtgtgagccaccgtgccctcccataatatatgatatttttatcagccagaaacttcccggatgttcctttgtagccagccccccatccctgccctatgcagccactgatttgatatctagcactacagattaaccctmcttctcctagaacttcatacaaatggaatcaaacaacttttatgtttatgttgacttctttcactcaacgtaatataaatatccaaacttatgccccaggctaacattttcttttcttttttttttcatttttaattaactttgaagttccagagtatatgtgcagatttactatgtaggtaaaccagtgtcatgggggtttgtcatacagattattttgtcaccccagggattaagcctagtatccactggaaaccacaggacactttgaaactccttcaggacagaggtaattcacctgctgtgttgcatatatcagtattttgctcttttacattactctgtagtattctattatatgaatatatccaattttctgttgacagatatttgggttgttctcagttttttagcttttatcaattaggcttctatgaacatttatgtataaatctctttatggacatatgttttaatttcttttgagcaaatgcctgagggtgaaattgcttagctatgtttaactttgtaggcaacggccaattgttttccagagttgttgttcaccgaaaatctatgagggttttagttgttccacctgcttgccaacacacacagaccataagtctttaattttagcc

SEQ ID NO: 549987 - DNA, 918 bp, Homo sapiens
attattattatttagatacaggttctcactctgtcacccaggctggaatacagtggtatgaccacagctccttgtaacctcaaactcctgggctcaatcaatcctcgcacctcagcctcccaaagtactgagattacaggtgtgagccaccgtgccctcccataatatatgatatttttatcagccagaaacttcccggatgttcctttgtagccagccccccatccctgccctatgcagccactgatttgatatctagcactacagattaaccctccttctcctagaacttcatacaaatggaatcaaacaacttttatgtttatgttgacttctttcactcaacgtaatataaatatccaaacttatgccccaggctaacattttcttttcttttttttttcatttttaattaactttgaagttccagagtatatgtgcagatttactatgtaggtaaaccagtgtcatgggggtttgtcatacagattattttgtcaccccagggattaagcctagtatccactggaaaccacaggacactttgaaactccttcaggacagaggtaattcacctgctgtgttgcatatatcagtattttgctcttttacattactctgtagtattctattatatraatatatccaattttctgttgacagatatttgggttgttctcagttttttagcttttatcaattaggcttctatgaacatttatgtataaatctctttatggacatatgttttaatttcttttgagcaaatgcctgagggtgaaattgcttagctatgtttaactttgtaggcaacggccaattgttttccagagttgttgttcaccgaaaatctatgagggttttagttgttccacctgcttgccaacacacacagaccataagtctttaattttagcc

SEQ ID NO: 549988 - DNA, 918 bp, Homo sapiens
attattattatttagatacaggttctcactctgtcacccaggctggaatacagtggtatgaccacagctccttgtaacctcaaactcctgggctcaatcaatcctcgcacctcagcctcccaaagtactgagattacaggtgtgagccaccgtgccctcccataatatatgatatttttatcagccagaaacttcccggatgttcctttgtagccagccccccatccctgccctatgcagccactgatttgatatctagcactacagattaaccctccttctcctagaacttcatacaaatggaatcaaacaacttttatgtttatgttgacttctttcactcaacgtaatataaatatccaaacttatgccccaggctaacattttcttttcttttttttttcatttttaattaactttgaagttccagagtatatgtgcagatttactatgtaggtaaaccagtgtcatgggggtttgtcatacagattattttgtcaccccagggattaagcctagtatccactggaaaccacaggacactttgaaactccttcaggacagaggtaattcacctgctgtgttgcatatatcagtattttgctcttttacattactctgtagtattctattatatgaatatatccaattttctgttgacagatatttgggttgttctcagttttttagcttttatmaattaggcttctatgaacatttatgtataaatctctttatggacatatgttttaatttcttttgagcaaatgcctgagggtgaaattgcttagctatgtttaactttgtaggcaacggccaattgttttccagagttgttgttcaccgaaaatctatgagggttttagttgttccacctgcttgccaacacacacagaccataagtctttaattttagcc

SEQ ID NO: 549989 - DNA, 516 bp, Homo sapiens
aagtaattgacaaatatacagctgttgtgaagatgattgattctggagacaagctgaaacttgaccagactcatttagagacagtaattccagcaccaggtaaatctgtttgcagaccatttaatacatatgccatcaaaatgagcggttccattttcaaaccactgtattttgacagtacttgttggttgttatttttctgtcttggcgrcattaactgccagcgtaactcatctctgtttggattcaagggcatcgtagtttactggctctctgatgaagctgttttgtggcatcaatggattttcctttcctggaatacttttttttttttttcctgaagcaaaacgtagacatatatggatagcatttgttatattaggcttatggttataggttgagaatctctcatctgaaatgcctggaccagaagagtttccaattttggattttggaatttgcatatacataattggatatcttagggttggaacccatgtcttaacacaaaattga

SEQ ID NO: 549990 - DNA, 546 bp, Homo sapiens
gaagcagatgaaaaagcacgtgagtcttttcattttgctggacagttttgccaagctccccaaagcagatggtctggggaggatatcacttcttcctactgaaccaagttcaaaggaacagcagaggagtacagttcgctttaagaaagaagaaaaaagaagaaaaaactctctaactttgttcaaaattgggacaaatatttgttctggagctcaaacttgagctgtgtgggtggatcgaacacccagaggttattcaaacagcaaagtcagaagcagttgcttactgtgaggacaagtcaggggcagatggatgtgcttgaatgtgcttgtgtgcttttattttatttttattttttattttttggcttttgctgatttctattgatcttaaaatcagagagacctacagataattgtcatcctttctaaaggaccaagtgcrgaactattccaagaaacaaaatcctttgatctaaatgaaagcaggaaaaatttagaaaaagtgggagaagacacagaagggtttttctgagcaaagaattc

SEQ ID NO: 549991 - DNA, 542 bp, Homo sapiens
ggactagttgagcgcccaccttggccagtgagtgcctcagtggacccctcatggaaaaatcctgccacagctttgcattcttgactgagatactgtttctggagaattaagacccaatggcagctgggmgcggtggctcacacttgtaatcccagcactttgggagactgaggcgggtggatgacctgaggtcaggagtttgagaccagcctggccaacatagtgcaaccccgtctctactaaaaatacaaaaattagccaggtgtggtggcatgcgcctgtaatcccagctacttgggaggctgaggcatgagaattgcttgaactggggaggcggaggttagagtgagctgagatcacgccactgcattccacctgggcaacagggcaagacttggtctcaaaagaaaaaaataaataaataataaaaaacccaatggcatgttctcccaaaaacagcagtgactttcaaaatcatacctccttccattgatcatttcctttctgattattttaatctgatattcagaattatctcagaa

SEQ ID NO: 549992 - DNA, 542 bp, Homo sapiens
ggactagttgagcgcccaccttggccagtgagtgcctcagtggacccctcatggaaaaatcctgccacagctttgcattcttgactgagatactgtttctggagaattaagacccaatggcagctgggcrcggtggctcacacttgtaatcccagcactttgggagactgaggcgggtggatgacctgaggtcaggagtttgagaccagcctggccaacatagtgcaaccccgtctctactaaaaatacaaaaattagccaggtgtggtggcatgcgcctgtaatcccagctacttgggaggctgaggcatgagaattgcttgaactggggaggcggaggttagagtgagctgagatcacgccactgcattccacctgggcaacagggcaagacttggtctcaaaagaaaaaaataaataaataataaaaaacccaatggcatgttctcccaaaaacagcagtgactttcaaaatcatacctccttccattgatcatttcctttctgattattttaatctgatattcagaattatctcagaa

SEQ ID NO: 549993 - DNA, 542 bp, Homo sapiens
ggactagttgagcgcccaccttggccagtgagtgcctcagtggacccctcatggaaaaatcctgccacagctttgcattcttgactgagatactgtttctggagaattaagacccaatggcagctgggcgcggtggctcacacttgtaatcccagcactttgggagactgaggcgggtggatgacctgaggtcaggagtttgagaccagcctggccaacatagtgcaaccccgtctctactaaaaatacaaaaattagccaggtgtggtggcatgcgcctgtaatcccagctacttgggaggctgaggcatgagaattgcttgaactggggaggcggaggttagagtgagctgagatcacgccactgcattccacctgggcaacagggcaagacttggtctcaaaagaaaaaaataaataaataataaaaracccaatggcatgttctcccaaaaacagcagtgactttcaaaatcatacctccttccattgatcatttcctttctgattattttaatctgatattcagaattatctcagaa

SEQ ID NO: 549994 - DNA, 531 bp, Homo sapiens
aggcttactctacaccctggcattttcttgtaggtgctggaaaagataggctgcaaaagataggcttgcaccatgaagctctaactccattagagaagacacacatttagccatcacaaggtggtatggacacttaaaggtctccatttacttgatcaaaaagtctaggagaggggtcagcaaactagactttctttccataaaaggctggatagtaaatatcgtaggctttggtgccacatagactatgacaactactcaactctaccttcatattttgaaagcactcatagacaatgtttaaacaattggcatgttccaataaaactttatggacactgagctttgaatttcctatacagtttcccaccgaataacaatgtttgggtcaasaagggactgtattatacaacagcgatctcataagattataacgaagttcaaaaattcttatcacccagtgtttaccatacttttaaaatttattttatagtctattccttctacttattttaaaagttaactgtaaac

SEQ ID NO: 549995 - DNA, 429 bp, Homo sapiens
aaactaaygataaaccaagggctatgggaattaagaactatggctaaaaaagaaatgtttagagtgatgcaaaatggccgattaaaagcagctgcactccccagcactcaaggagaggaatgaaaaggggcaggtgaattcagcaccttcaactgagatacccaggttctcccattgggactgactggaagaacagctcgccccatggagaatgaagaaaagtggagagagggtgtgatggcccagccgagagcagcgtggagccaaaggaacccccactcccagccaagggaagcagtgagtgattgtccaatcgtgctcaggaaacagtgcttctcctattgatctttgcaacccatggatcaggggatccccttgtaagcccatgccaccagggccttgtgtctgatacacagagctgtggagtct

SEQ ID NO: 549996 - DNA, 2543 bp, Homo sapiens
cttctgataataagttctttccccagtgaatgctggaaactcatacttacctaatagcctcaggagatatttccactactcatgtaaattatctattactcaatggaattgtacatgtgggcaagaaaaatagtcagtgcatggctttacaaatccagataaccagtactaaagatacacaccctgccacacacaccatgagtatatactgggactatgatgatcaattatcttaacaaaagtagaaatccaatatctttactttaatattgtcatccttgaacaaaaaattaataaaaagacaagagacagagaaacaaaacaacaaacatgagtattactgatgaggaaaaagaaaatgacaaagttcacagaaacaatattttttaaatttttttgagccatttttgttttctgtattttaattgaatacagctacaagaagatatgggatgattaaagatctaatagaccaaagcctatcatctacttaaaaaatcttatcctttagtagaattcaggctacattttccatagtctgcgcaatctgtctctcagtctttttcgatcacaccctctgccttttgcggagagttgttattttattccaagaaaacttgagactttccctgatcagtgcaactcctaaattttaccctgatatattcctatattacatagcagttacatgccattttaatggtagagccttatggtttgcacattcctagctatacacataggagtggaaaaccttcagaagcaaacaaagcagaatccttttatccattcattagccaaagtagtagagagaagaaatataacacatcagagcaacagaccytacaaatcatctgaataaaatattctatgtcttttctattcaaagtgtagttctggaatcatagcaaagatatcaccctggagcttgttaaaaaagcagaatctccacctcccagatctggtaatccaattctgcatctcaatatgatctccaggtgattcacatgcatattaaagtttaagatgcactgctctacactatttaaggaactgggaactcccaagtacttgtcagatcttcagtcagaaaaacataaataaataaaacaatctccaccctcctactcctcaaaacctcaccattgctcttcaaaaacaaacaaaacatgactgagggcggtggctcacgcctgtaatcccagcactttgggaggctgaggagggcggatcacgaggtcaagagatagagaccatcctggccaacatagtgaaaccccgtctgtactaaaaatacgaaaattagccgggcgtggcggcgggcgcctgtagtcccagctactcaggaggctgaggcaggagaatcgcttgaatccgggaggcagaggttgcagtgagccgagatcgcgccactgcactccagcctgggcgacagagtcagactccgtctcaaaacaaaacaaaacaaaaccaaaacacacacacacattgatagttctgattgggaaattctgaactagattaactttatgctacaccttgggggaaacattgagttagttctgggaggctagtttgttcatctgcagatcaatgcaagcaaggatgaggtttcctgagttgaagacacacattaaatgattttatttttaattgcagtctcaccagagaaggggaattgtcctggctccttctcttcctaggatagtttgatcattctgctctttctagtcattaacagactactaccttcattttcttaaaaatactagtcatgtgttctacgtgttttctttgacatccagtaagatttattctggaagtgtaattagaaaactctaattgtctaaatgctttctcaacagagatagaaggacaatttggatattttatatgcatgtggatggtatgatagttaaggcaaggggttaaatgtttaacaaattcaggaattataaattttttttcttttcttttttctttctttttttttttgagaggttgtctagctctcatagcccagactggagtgcagtgatgagatctcagctcactgcaacctgcgcctcccaggttcaagcgattctcctgcctcaacctcccgagtagctgggattacaggtgtgtgccaccatgcctgcctaattttcctgtttttactagagactgggttgcaccatattggccaggctggtctggatctcctgacctcaggtgatgcgcccccacctcggccttcccatagtgctgggattacaggtgtgagccaccacggctggccaggaatgataaatttctgtaggaaaagaagtctagctccacccttagcaaataagttcataaagcaaggactttgtgcctgtcttgttactgtatttccagtgtagtcttagcaaataccgtgtgctcaattaatagttttataattggattcagttgaattaaaacaaattccttcagtctaatcagacaataaggtctttatattcaatttgacagtcttgtattataaaggacaaaatatatgacagtaggaagagccc

SEQ ID NO: 549997 - DNA, 2543 bp, Homo sapiens
cttctgataataagttctttccccagtgaatgctggaaactcatacttacctaatagcctcaggagatatttccactactcatgtaaattatctattactcaatggaattgtacatgtgggcaagaaaaatagtcagtgcatggctttacaaatccagataaccagtactaaagatacacaccctgccacacacaccatgagtatatactgggactatgatgatcaattatcttaacaaaagtagaaatccaatatctttactttaatattgtcatccttgaacaaaaaattaataaaaagacaagagacagagaaacaaaacaacaaacatgagtattactgatgaggaaaaagaaaatgacaaagttcacagaaacaatattttttaaatttttttgagccatttttgttttctgtattttaattgaatacagctacaagaagatatgggatgattaaagatctaatagaccaaagcctatcatctacttaaaaaatcttatcctttagtagaattcaggctacattttccatagtctgcgcaatctgtctctcagtctttttcgatcacaccctctgccttttgcggagagttgttattttattccaagaaaacttgagactttccctgatcagtgcaactcctaaattttaccctgatatattcctatattacatagcagttacatgccattttaatggtagagccttatggtttgcacattcctagctatacacataggagtggaaaaccttcagaagcaaacaaagcagaatccttttatccattcattagccaaagtagtagagagaagaaatataacacatcagagcaacagaccttacaaatcatctgaataaaatattctatgtcttttctattcaaagtgtagttctggaatcatagcaaagatatcaccckggagcttgttaaaaaagcagaatctccacctcccagatctggtaatccaattctgcatctcaatatgatctccaggtgattcacatgcatattaaagtttaagatgcactgctctacactatttaaggaactgggaactcccaagtacttgtcagatcttcagtcagaaaaacataaataaataaaacaatctccaccctcctactcctcaaaacctcaccattgctcttcaaaaacaaacaaaacatgactgagggcggtggctcacgcctgtaatcccagcactttgggaggctgaggagggcggatcacgaggtcaagagatagagaccatcctggccaacatagtgaaaccccgtctgtactaaaaatacgaaaattagccgggcgtggcggcgggcgcctgtagtcccagctactcaggaggctgaggcaggagaatcgcttgaatccgggaggcagaggttgcagtgagccgagatcgcgccactgcactccagcctgggcgacagagtcagactccgtctcaaaacaaaacaaaacaaaaccaaaacacacacacacattgatagttctgattgggaaattctgaactagattaactttatgctacaccttgggggaaacattgagttagttctgggaggctagtttgttcatctgcagatcaatgcaagcaaggatgaggtttcctgagttgaagacacacattaaatgattttatttttaattgcagtctcaccagagaaggggaattgtcctggctccttctcttcctaggatagtttgatcattctgctctttctagtcattaacagactactaccttcattttcttaaaaatactagtcatgtgttctacgtgttttctttgacatccagtaagatttattctggaagtgtaattagaaaactctaattgtctaaatgctttctcaacagagatagaaggacaatttggatattttatatgcatgtggatggtatgatagttaaggcaaggggttaaatgtttaacaaattcaggaattataaattttttttcttttcttttttctttctttttttttttgagaggttgtctagctctcatagcccagactggagtgcagtgatgagatctcagctcactgcaacctgcgcctcccaggttcaagcgattctcctgcctcaacctcccgagtagctgggattacaggtgtgtgccaccatgcctgcctaattttcctgtttttactagagactgggttgcaccatattggccaggctggtctggatctcctgacctcaggtgatgcgcccccacctcggccttcccatagtgctgggattacaggtgtgagccaccacggctggccaggaatgataaatttctgtaggaaaagaagtctagctccacccttagcaaataagttcataaagcaaggactttgtgcctgtcttgttactgtatttccagtgtagtcttagcaaataccgtgtgctcaattaatagttttataattggattcagttgaattaaaacaaattccttcagtctaatcagacaataaggtctttatattcaatttgacagtcttgtattataaaggacaaaatatatgacagtaggaagagccc

SEQ ID NO: 549998 - DNA, 994 bp, Homo sapiens
tcttaagaatgaagcaagtactaaagtgcaggtttccctgaactagaattaatttatcttctgtatttgctttctccttcaggagttatcttgtgatgactgagcaaaacattattttatggtcttgcaacatttgcattcgttagcactccattatagataaatatagtctttgcctctaaagtgaagtaaatgaaaaataatgtaagctcccatgatggatcaggtcaaggccttaatctaagtttccttcagcaacttgccttctatactgtaaaatttcttgtggcatggtaaaatgtttcatatttcatgatttttggtatctccaaaatccctatatcctagggtgctacatcattgaaacttgcagttgcttgttgtttagatttttttttctttttttttttttttagtaggagtctcactctttcacccaggctggagtgcagtggcgtgatctcggctcactgcaagctctgcctcccgggttcacgccattctcctgcctcagcctcccgagtagctgggactacaggygctcgccaccacgcccagctaactttttttctgtatttttagtagagacagagtttcatcctgttagccaggatggtcacgatctcctgacctcgtgatccgcccaccttggcttcccaaagtgctgggattacaggcgtgagccaccgcgtctggcctagattttttttcttttaatttgttgggtgagttaaagaaaagtaagatgagctacacacttgccttttagtatgattaatccaaataaattccccatgtcttttaattccttagaggtctagtttgtgcttttggaatttacatcctgtggcttttttcttttggcatattcttttggtattctttcttgagaagtatcagatctttccaggtccccttttgcatttggataagatctctgcagaaatctaagtctctagaaagaagattaatagaaaagaacacagtcataatg

SEQ ID NO: 549999 - DNA, 994 bp, Homo sapiens
tcttaagaatgaagcaagtactaaagtgcaggtttccctgaactagaattaatttatcttctgtatttgctttctccttcaggagttatcttgtgatgactgagcaaaacattattttatggtcttgcaacatttgcattcgttagcactccattatagataaatatagtctttgcctctaaagtgaagtaaatgaaaaataatgtaagctcccatgatggatcaggtcaaggccttaatctaagtttccttcagcaacttgccttctatactgtaaaatttcttgtggcatggtaaaatgtttcatatttcatgatttttggtatctccaaaatccctatatcctagggtgctacatcattgaaacttgcagttgcttgttgtttagatttttttttctttttttttttttttagtaggagtctcactctttcacccaggctggagtgcagtggcgtgatctcggctcactgcaagctctgcctcccgggttcacgccattctcctgcctcagcctcccgagtagctgggactacaggtgctcgccaccacgcccagctaaytttttttctgtatttttagtagagacagagtttcatcctgttagccaggatggtcacgatctcctgacctcgtgatccgcccaccttggcttcccaaagtgctgggattacaggcgtgagccaccgcgtctggcctagattttttttcttttaatttgttgggtgagttaaagaaaagtaagatgagctacacacttgccttttagtatgattaatccaaataaattccccatgtcttttaattccttagaggtctagtttgtgcttttggaatttacatcctgtggcttttttcttttggcatattcttttggtattctttcttgagaagtatcagatctttccaggtccccttttgcatttggataagatctctgcagaaatctaagtctctagaaagaagattaatagaaaagaacacagtcataatg

SEQ ID NO: 550000 - DNA, 994 bp, Homo sapiens
tcttaagaatgaagcaagtactaaagtgcaggtttccctgaactagaattaatttatcttctgtatttgctttctccttcaggagttatcttgtgatgactgagcaaaacattattttatggtcttgcaacatttgcattcgttagcactccattatagataaatatagtctttgcctctaaagtgaagtaaatgaaaaataatgtaagctcccatgatggatcaggtcaaggccttaatctaagtttccttcagcaacttgccttctatactgtaaaatttcttgtggcatggtaaaatgtttcatatttcatgatttttggtatctccaaaatccctatatcctagggtgctacatcattgaaacttgcagttgcttgttgtttagatttttttttctttttttttttttttagtaggagtctcactctttcacccaggctggagtgcagtggcgtgatctcggctcactgcaagctctgcctcccgggttcacgccattctcctgcctcagcctcccgagtagctgggactacaggtgctcgccaccacgcccagctaactttttttctgtatttttagtagagacagagtttcatcstgttagccaggatggtcacgatctcctgacctcgtgatccgcccaccttggcttcccaaagtgctgggattacaggcgtgagccaccgcgtctggcctagattttttttcttttaatttgttgggtgagttaaagaaaagtaagatgagctacacacttgccttttagtatgattaatccaaataaattccccatgtcttttaattccttagaggtctagtttgtgcttttggaatttacatcctgtggcttttttcttttggcatattcttttggtattctttcttgagaagtatcagatctttccaggtccccttttgcatttggataagatctctgcagaaatctaagtctctagaaagaagattaatagaaaagaacacagtcataatg

SEQ ID NO: 550001 - DNA, 560 bp, Homo sapiens
cagtgaattaaaaccttatcaataggtagtgctctctctatcctgatttttttttgccttaaagtcttttatctatctatctatctatttatttttgagacagggtctttctctgttacccaggctggagttcagtggcatgatcttggctcactgcaacctccgtctcctgggttcaagcgattctcatgcctcagcctcccgagcagttgggattacaggtgcaggccagcaygcctggctaatttttcatatttttagtagagacagggtttcgccatgttggccaggctggtcttgaactcctggcctcaagtgatctgcctgcctcagtctcccaaagtgctggggttacaggcatgagccaccacacccagcccttaaagtctattttgactgatatcaacaaagctacatagctcctttttgattggtatttgctcgaatacgaattgttaaatgtgtatttctctaaacactgtatagctgaattggtattatattttttaaaaaatcttaatgtttactctattttttagccagaaagtttaggcaattta

SEQ ID NO: 550002 - DNA, 560 bp, Homo sapiens
cagtgaattaaaaccttatcaataggtagtgctctctctatcctgatttttttttgccttaaagtcttttatctatctatctatctatttatttttgagacagggtctttctctgttacccaggctggagttcagtggcatgatcttggctcactgcaacctccgtctcctgggttcaagcgattctcatgcctcagcctcccgagcagttgggattacaggtgcaggccagcatgcctggctaatttttcatatttttagtagagacagggtttcgccatgttggccaggctggtcttgaactcctggcctcaagtgatctgcctgcctcagtctcccaaagtgctggggttacaggcatgagccaccacacccagcccttaaagtctattttgactgatatcaacaaagctacatagctcctttttgattggtatttgctcgaatacgaattgttaaatgtgtatttctctaaacactgtatagctgaattggtattatattttttwaaaaatcttaatgtttactctattttttagccagaaagtttaggcaattta

SEQ ID NO: 550003 - DNA, 632 bp, Homo sapiens
tgaaacaaattacactgggccgtttaaaatggtgattaataaataccctttatttatcagctgtagacattttgagtaaagacaaaaggaggaatgtattttttaaatatctggaattattccatttgaccacattgctataaatgatggtgaggattataagaaagaactagtcaaacacagtttttttttctgttttttwaaaaaaaacccctctgtttgactagctatagaaaatgtctgaaatgtctcatgtgattttgcacataagatttttgacaaaatcttgagagacaattcattctttaaaaactacttcttgagcatggaggtgagctcctgagaggtgagaccgttgtagcttgaggggccctaagactacatctagaacgatggctcttgactctaactagcagaataaactaacagaagccagtttagcatttctccatgttgtttggaattcaaacataatgaaatgaataaaaacttttttttaattgtcttcggagaaatttacattttcatattgaacagttccatcaagaatcccatgcggttcctcacatttcaggtctgagcctcagtgtttagcccgtgggacttcagcaaaatggcctgtgctgtggagg

SEQ ID NO: 550004 - DNA, 387 bp, Homo sapiens
taaaaagcaagtataagactccaaagggcatttctgaattaaggttttcttcacatttaatgaaagcagagaagagtgaatatcactgtagaatatcctgcctgtaacatggttaaaacaaaattaaatccacttaacttacagaaggttaagcttgggttatatgaatatgatctcatggggacccwacttccccaaggtgttcaatgaatgagtcttttcattgtattttgtagtcatgtgcatgaagttctgtattttattcccagctgataaaggcctattaaaacacaatgtacacaggacttcgacttctggaaagatggcatagttacacttttccctattcttactgctaagtaccactaaaggccctgtacattatat

SEQ ID NO: 550005 - DNA, 542 bp, Homo sapiens
gagcaagactctgtctcaaaaaaaaaaaaaaaataggggaggaaagtgcagcaaaacaaggaaatgggcatttaaaggagattgagagraccagaatctggttgaggaagtatttacgttggggagcctaagatattaaaacgagctttggccactctattgtgccgcctagggccctctctctgggacttcatccagaggctcacttgataaccttatagtgagaacctgatatacctagttttccctggctatgacattgcagtctttatttttgtttttatccataaaaccatctgtattaatgctgattaactaaaataattatttgtatatttgtccttattcctcttgttaaacaagatactcattcaaagtaggtgggaaagagcctgcttataattacacagtgaatttgctggacaaggaaatcatctgtgagcttagtctccagttaaaacactgacagctataatgctaaatgccaaatggcagaggattacttttactttgctgctataagcagctcttaaggctctttc

SEQ ID NO: 550006 - DNA, 542 bp, Homo sapiens
gagcaagactctgtctcaaaaaaaaaaaaaaaataggggaggaaagtgcagcaaaacaaggaaatgggcatttaaaggagattgagaggaccagaatctggttgaggaagtatttacgttggggagcctaakatattaaaacgagctttggccactctattgtgccgcctagggccctctctctgggacttcatccagaggctcacttgataaccttatagtgagaacctgatatacctagttttccctggctatgacattgcagtctttatttttgtttttatccataaaaccatctgtattaatgctgattaactaaaataattatttgtatatttgtccttattcctcttgttaaacaagatactcattcaaagtaggtgggaaagagcctgcttataattacacagtgaatttgctggacaaggaaatcatctgtgagcttagtctccagttaaaacactgacagctataatgctaaatgccaaatggcagaggattacttttactttgctgctataagcagctcttaaggctctttc

SEQ ID NO: 550007 - DNA, 1520 bp, Homo sapiens
agggtaaaaataggaaaaaagattttcaagaaaaattctttcaagacattgctgcaaagcctatatgcctggactgaaacacaatagaataataatggtaatacaagctaatattwatatagctcttattatgtgccaggtatgttccaaagtatttaagaacgtggtcattagtgttcttgaaagccatctgtgcatcatctcctcacatagttatcaaaatgagtaatttaacataggggaatttgtttgatctttatagggaattgcaagaaagacatgagttatagaaacactaatattaattcattaatccccacaaccacttctgaggtagaacctattattctcatgttaaaaaataaggaaactgtagcacagagaggttaagaaacttgctcaaggtcacacagctagagctggtactagagctctggcttgcaggctgtggtttttattttattttattttattttttttacctgagatgtagtcttgctctgttgcccagagttggagtgaaatggcatgatcttggctcatagcaacctctgcctcccgggttcaagcaattctcctgccgcagcctcccgagtagctgacattacaggcgtgtgccaccatgcccggctaatttttgtatttttagtagagatggggtttcaccatgttagccaggctggtctcgaactcctgaccttgtgatacgcccaccttggcctctcaaagtgctgggattacaggcatgtgccaccatgcctggctaatttttgtatttttagtagtggcggggtttcaccatgttggctaggctgctctccaactcctgacctcatgatctgcctgcctcggcctctcaaagtgctgggattacaggcgtgagccaccgcgcccagtcacaggttgtgtttttaaccatgacgctatgttattctgcaagaactaagacattggaagacaactatttctattttgaaagagtgactcattgttctaaattgtttggcatttgagtattaagcttcagggcctgatgactttcttatttaattttctggttggccagccgagtatttcctgcgtctacccagttctcacagaaagtagctgaggctgacttctgggcagggtaaatcagttacaaaataaaggttaggctgagtgcccatagcaaagctagaaaaggctctggagtgatttcccctcaacccagagcagtttagcttggactcagcagcctctgcaggatttgggggctcctgcaagacttgagtccccttcagagtgcaaggagagcaagattcacagggtggagggagttaggggggagaaaaaaagaagacacagtttgttgacaccatcttgtctttttttttttttttttttttttttttgagacggagtctcgctctgtcgcccaggctggagtgcagtggcgggatctcggctcactgcaagctccgcctcccgggttcacgccattctcctgcctcagcctcccaagtagctgggactacagg

SEQ ID NO: 550008 - DNA, 1520 bp, Homo sapiens
agggtaaaaataggaaaaaagattttcaagaaaaattctttcaagacattgctgcaaagcctatatgcctggactgaaacacaatagaataataatggtaatacaagctaatatttatatagctcttattatgtgccaggtatgttccaaagtatttaagaacgtggtcattagtgttcttgaaagccatctgtgcatcatctcctcacatagttatcaaaatgagtaatttaacataggggaatttgtttgatctttatagggaattgcaagaaagacatgagttatagaaacactaatattaattcattaatccccacaaccacttctgaggtagaacctattattctcatgttaaaaaataaggaaactgtagcacagagaggttaagaaacttgctcaaggtcacacagctagagctggtactagagctctggcttgcaggctgtggtttttattttattttattttattttttttacctgagatgtagtcttgctctgttgcccagagttggagtgaaatggcatgatcttggctcatagcaacctctgcctcccgggttcaagcaattctcctgccgcagcctcccgagtagctgacattacaggcgtgtgccaccatgcccggctaatttttgtatttttagtagagatggggtttcaccatgttagccaggctggtctcgaactcctgaccttgtgatacgcccaccttggcctctcaaagtgctgggattacaggcatgtgccaccatgcctggctaatttttgtatttttagtagtggcggggtttcaccatgttggctaggctgctctccaactcctgacctcatgatctgcctgcctcggcctctcaaagtgctgggattacaggcgtgagccaccgcgcccagtcacaggttgtgtttttaaccatgacgctatgttattctgcaagaactaagacattggaagacaactatttctattttgaaagagtgactcattgttctaaattgtttggcatttgagtattaagcttcagggcctgatgactttcttatttaattttctggttggccagccgagtatttcctgcgtctacccagttctcacagaaagtagctgaggctgacttctgggcagggtaaatcagttacaaaataaaggttaggctgagtgcccatagcaaagctagaaaaggctctggagtgatttcccctcaacccagagcagtttrgcttggactcagcagcctctgcaggatttgggggctcctgcaagacttgagtccccttcagagtgcaaggagagcaagattcacagggtggagggagttaggggggagaaaaaaagaagacacagtttgttgacaccatcttgtctttttttttttttttttttttttttttgagacggagtctcgctctgtcgcccaggctggagtgcagtggcgggatctcggctcactgcaagctccgcctcccgggttcacgccattctcctgcctcagcctcccaagtagctgggactacagg

SEQ ID NO: 550009 - DNA, 578 bp, Homo sapiens
ttttacagagtcttttatcaagtcttgtgaaactgaatagtttgaccttagctagaaattgcttccagttgtatccagtgggtggtccatctcagttttctaccatctattccctcaacatggaacacaatcgaatcaacaaaattccatttggaattttctccagagcaaaagtattaagtaagctgaatatgaaggtaagcatatatttgtttactagggaaaggaattgctttaaytggtacttccactaatatttatgttttctctaattgtgtggggagtgggtacttgtaccttgctgatgggtctaaactgatcataagacatgtcagggtactttgtatcagataacaaatatcttagaactgagcatacccttaggattttgtcctaaagaaatcattgtccagctcagtggctgatgcacctgtaatcccagtgctttggaaggctaaggtgggaggatccctggaggctaggagttcaggaccagcttgggcaatatagtgagaccttgtctcgcaaaaattttttaaaaattagctggcctgtggtaccagctacatggaaggcta

SEQ ID NO: 550010 - DNA, 1788 bp, Homo sapiens
atcttgccgggaaataaaaaagtttcggagtgctgagtgtggggcgacccatgcctggcagttcctggagactgccaggggaagccatggcgggccgccccgcctgcccgttcttacatacagctgcggagccagggcgccatcctgggaatgagcccaggccaagggccagcgaggagttcctctctcgtctcgcttcagtctggggtcccacaccaccctcccttttgggctcctggcctttccccagtacttgtgccctacagcctccggtttccagaaacggtttccgcttgatggcagtatggcaccacaaatgccaagtacaaccacaaccctgcccctccaatccgagggcctccgccctttctcgtgtgaaaaaagcaaagaggaaggagaaaacataataataaaagaaagacacggagaagrgaaaggaaccagccacctggtcccaggttgaccgccaaactcaggggaccctaggaccaacgaccagccggctggagaacctgcgggaatgcggtggaggcagccaacctctgcctttcctttggccctcttcagggattttggctcccgctggtgcaggaagtaaaagacaaaggacacataatcaccgcctctgggaaaccacaggaggactgggatcatagggctgccgccccaggacaaggcgctggccacccagctggcttacacaaggatttgccccaggaccgggggtcctcccaaggcctggagctgcaggtagtgtttaccaccttggcatggcacacggaggtcaccagaacggggccgaaggctcaacaggcagccacagggctgaggcaggagtctccctcacaggagacactcagcaacacactcaagtctgactctgctcaggctgtctcggctttcacacaggagagggtgggaggggggcggctcagggaggcctgggaaggccaccccgcgccacagatactcatagcatcacacagagccaagactccagggggactgtctctgcccctcctccaaagtggggtccctttttaagcagcataacccaggatgatccagtttcatacctgctgcttgggcctatctgatgacacacatcccgcattcattctcaggagaagaccctagttgcccaataaatggcatgatgacccaggactggagccaggaatgctcgcctgtctcccgttctgctttgcacatttagagccagcgtggaagaggttgtgggcgctttcgagccagtggcggtgtgtaggagtctgtgtccgataatgcttgagctcacacccctttgctagtgtgagctgacgtgtgtgcgcacgtgcgtgtgtttgtgtatgtatgcgtgtgtctacttgggcgtgtttaacgtgtgcgtttgtgtctgcgtgtgcatgtgtctgtgtgtgcgcgtgtatttcagtttgggttgccggatcccatatgattgcgtgcctgtgtacctgagtctgcggtctgtgggtgcctgcctgtgtgagtgacagtgggcaaatgaacacgtggcagagacaccctgcctgcacacatctggatcgatgtgttcacatggcttgactggagaaaaaggagacaggggacaacttgccaaagctcctaatggctcagaaaggcacacttagagcatccacaaggacaatggggaataacggtgagacatgaggtactgggtaaacggtgggttcaccacgacatttcacttaaaagtaacacgtgggcagctttttggtggaccagagggaataaactggtgacctt

SEQ ID NO: 550011 - DNA, 518 bp, Homo sapiens
atggggcctagtagtatcaaaatggtgaatttcctgtagtactcaatctggcacttgcagccatattatcttcttttgttttctaattatttcatatgtctcagtattatcttccaaatgagattagaaatttatctataccaaggacaacacataatgattgatttttatcttttaatcccaattcttgccactttcaagaatgaccaaakttctgagaatgaccaaagttctgagtgaaataaaatttattaacttgaaagggaaaaaaatgtaatcaggttagttatccacaagtcaccatgttttctaccttgaattacttaattttaaaccagttgttttaatgttggaaagatatgctatatgtaccttttcataattgggctctttggagtagagtgtaggtagcatcttttatcagtatttattcacacaacttctaattagagtaacaaaaatagattaatatttttatgatattgccaaaactttggtaggactgagtaagttggtaa

SEQ ID NO: 550012 - DNA, 551 bp, Homo sapiens
gtataaagtcttaacaagcatctcaccatgggaaccaacgactcaaattcaaagccaacggtctcattgtgattcaactctatgatatatggttggggggactctagcagagatccaagctgagatatggcacaaggcaggctggggctgataccagctgagacggtgaaggattccacagccagggctgtattagcagctagagcgatggacaggcgggaggggcctgtctgtccaggtctgctgcagaggtcttaggtgaaggccccacccccccmcacacacacacacaggtcagctcagatcaagagtgctcggcgggcacggccacatcctccggtcagacaccgtctgcacctccagccccgattttaactgagtatacttcaagtcagtgaactctgtgtaaagaacgagacagagcaaaaggatgtttttggccaatgagaacacagtgccccgcagcctgctggtgagaaccacccagtgccccccagcctgcagcaagtccctggactcctttagttgtgaccgtagcttctgaggcgcgg

SEQ ID NO: 550013 - DNA, 424 bp, Homo sapiens
acctctccctatccccacccatcaagcccaaagaaggtggattagtctgttttcatgctgctgataaagacatacccaagactggctgatgtataaagaaaaagaggtttaatggactcacagttctgtgtggctggggaggcctcacaatcatggtggaaggcaaaaggcacatcttatatggcggcaggcaagagagaatgagagagccaagtgaaaggggaaacctcttataaaatcatcagatctggtgagatttattcactaccacaagaacagtatgggggaaactgcctccatgattcaattatctcccactgggtccctcccacagcacrcgggaattatgggagcttcaatacaagatttgggtggggacacagcagaaccatttcagaagacataaaggcttctctcacctgga

SEQ ID NO: 550014 - DNA, 1365 bp, Homo sapiens
aggctgaaggtaattgcatgtcaggcattgcacaagactcaaaaattgaaatatttaatgacacacagcccttacactccaggaactacatttgcactgattctactcaacaccacgtgtttctaggttctctataaatattattttatgaccaaaatctaagactcaaaaaactagcttcccttttaaatgggattaactgatggaacaactaaaacacatcttcacttcatcatactctttaaaaaccaatacaaatattctgggcatggttcatttgtattacaaatttcttcctctaccctgtgacttgtctttctaaaaccttcccaatggtatctttccatgaactaatgaatagaaattcataattttaatgtggtctaagtatttaaactttttctttatgattaatgctttgtgtactatgtatgaattatttttctactctaagtgctcatattattttctaatgtaagctttattttttaacctttaatatttagatctacaaaccatctggaattaagtttttttatgatataaggcaaagtcaatctttgtttttctttatggatatccaactgacctcaaatgatatattgaaaaaattatcctttaccacactgcactgctgctatggtcatctttgtcatataccaaatgatcatgtgtttttatatatatatatatatatatatatatatatatatacacacacacatacacgtatatacacacacacatataggtatctgcactttccttgctgttgcactggctatttatttgcactaacaacaatagtacactatacagtgtactactgccctacagtgtacctactacrctgtactattactactctatataaaactacagtattaattactatagcttattataaagtcttgatatttacttaattacgtgtctgattttaatacgaattgtaaaatcgatcagcctatttcgattttctaaaaaaacactgctgggattttgattgggattacgttgaccttaaagatcaatttggggagaattgacatcttaataatatggggtcttcaaacccatgaacacagactatctcatttaagtttctttcaataatggcttccagtttcattatactggtctttcacatcttttttcagattatttcctaagtgttttatattttttgatactactgtaaatggtggggttttttaattcaattttctgattgttagtatataggaataaaacgttttttgtatattgaccctgtatcttgcaaaattcctaaacttccttattagtccaagtagcttttctgtagtttttttgccttactacaatagatagaacatccagtac

SEQ ID NO: 550015 - DNA, 656 bp, Homo sapiens
gctgggttgatactcacttccacagtttatcagccacgtggccttgagcaagttatttaatatctctaatctcagttttcttatctgatacctacttcagaactttattgaaaagattaaataagttaatccacatatttactatagcagttggcacacggtaagaaggaaataagttttagttattaactgtaatacaaatatttctatttagatatgcaactaagctgggcacggtggctcacgcctataatcccagcactttgggaggccraggcgggcagatcatgaggtcaggagtttgagaccagcgtgaccaacacggtgaaaccctgtctctactaaaaatacaaaaattaatggggcgtggtgacacatgcctgtaatcccagctactcaggaggctgaggcaggagaactgcttgaatccaggaggcagaggttgcggtgagctgaaattatgctactacactccagcctgggtgacagagagagactctgtctcaaaaaaaaaaaatgcaactgaaatatttatttatcaaaaaccgaatctactcggctgagagttattctaaatgcagtgcaaatcatttaactcttattgaggttaaattaacttacccagaatgacacatacttagggaagagaagggacc

SEQ ID NO: 550016 - DNA, 656 bp, Homo sapiens
gctgggttgatactcacttccacagtttatcagccacgtggccttgagcaagttatttaatatctctaatctcagttttcttatctgatacctacttcagaactttattgaaaagattaaataagttaatccacatatttactatagcagttggcacacggtaagaaggaaataagttttagttattaactgtaatacaaatatttctatttagatatgcaactaagctgggcacggtggctcacgcctataatcccagcactttgggaggccgaggcgggcagatcatgaggtcaggagtttgagaccagcgtgaccaacayggtgaaaccctgtctctactaaaaatacaaaaattaatggggcgtggtgacacatgcctgtaatcccagctactcaggaggctgaggcaggagaactgcttgaatccaggaggcagaggttgcggtgagctgaaattatgctactacactccagcctgggtgacagagagagactctgtctcaaaaaaaaaaaatgcaactgaaatatttatttatcaaaaaccgaatctactcggctgagagttattctaaatgcagtgcaaatcatttaactcttattgaggttaaattaacttacccagaatgacacatacttagggaagagaagggacc

SEQ ID NO: 550017 - DNA, 650 bp, Homo sapiens
tgagccactacttcattacatagggcatacaccaagtaaccaatgggaaatctctaaagggtatttaaaccccagacaattctgtaaccagtcccttgagctgcttgctgcttgtgaaggcacaccttgtggtgtgtgctttcattttcaataaatctctgcttttgttgcttcattctttccttcctttgtttgtgcattttgtccaattctttgttcaagatgccaagaacctggacaccctccactgataacaatttgaacagctcttttttgcaattcagaaccatacaatacaaatgctgttgtctcagagacctcctcccttgatcagcacatctaagcagccccctcatcccacattccctttcttcccttctcagcacttattaccactccaaatggctctgtgtttgcttccctcctctacgatctcaggtccctgaggacagaaacctcatcyatcttcctcactactgtctcctacatgcctagaacagtaactggcctatggcagacacttagtaaatatttgttgagtcaatgaatgaaatgaaccagctcacctagccggggtgcttccttgatgaaatgggaaaagagaaatccatgcagcttggttagtaaatggcttttttaaagtcagaact

SEQ ID NO: 550018 - DNA, 247 bp, Homo sapiens
ggatttgccttcatgctggagctagttcagtccatgtctcctctggtgtcaggtgcccttgagtgtgcttcaagtattcaacaaggactctctgttgtagttggctatcactcaaatatctctcccaggcctgtgtgagtcctggaaagttaagcttatagctctctggttgttctttgcytgacctcacaggcatatgtactgtgcatatgtggcttaataatattcaaacaacagatcaaaggta

SEQ ID NO: 550019 - DNA, 1097 bp, Homo sapiens
tacttcaaagtagttgcatccaaacgtttcaattgtatactatgatagcaaaaaaaaaaaatcctctatagacatgtattaattttgtactttcatattaaaatattatctacattataaaacataatagaaattttaaagatgaactagataaatctatataaattctagtattttcttcttccactgcaatagattgtcttgtgtaccctcggagtgcctccatrcctctcttcgtctctgcagactgctattttcaagaattagttctccttcaaatccacagatgaaaactttaaagttgtacatattttacctaagcaaaactacagaagcgtaacatttatttatatactattagatgggtcatccatctctcaaagtcacttcataggtcccttcagcggcccctggtttgcagtgagaaggcatctggattctggatgtaaggctgggtttcaacccctgggaacttccctgggattttgagttcttccctataaatgaagttgatagaccttatggtctcaaaattcctacctaccacaaacttctatgattctaacgcatagcctctgccaacttcttctgcctcagaaaacaagccagcaagtctgctcacacagctatgggtggtctcttgatattatagtctcctcccgctggccagttctaccagagggtcttcagggccttttgtacggagaaatgagcagcccataaaccagctgagtgtcaagtaatgggcacagaaaagcaagctcttgcccttgcaaaccaacctggcagtgggagcttcctcatctgtctggttggcgggaggactgagtggaagtggctcttcccctctgcattgtttaggaagccttcgctattgtctgagggacacacctgccccgacaggatgcatcatcaggctacttttagatgcagcgactatgtcatttgagatggcagaaattctcctctatggtgctcatagccaagctttctagacctctccagtgaatgagaggcagctgttctcacaggtgggaaaacatggtcactaagagagatatgtgttattttaaaaaaatgttaatggaggccaagtg

SEQ ID NO: 550020 - DNA, 553 bp, Homo sapiens
gtataggaacaggagcgaacaaacgctgcaaccagccagtcactcctctctggtgggagcaggctctgtgagggccctgcagcagtgtccaagtgtgttacaaccaatgcacttyaagctctcccatccggggacagccaagtgccagccagctgagtggagggtcagagtggcagcccctgccctcttggcacgtgggttcttgtctggtgtccaggaagaatcaggtcatatgaactgtttgaaaggtgatgcatgtggaagactttattgagcggtgggcggctctcagcagaaagggaggctggaaaggggatgggaaggtgatctttccctgaagcctggccatctccagccaggcccctctccaagcttcactgtctgaagttagctgcatctgtccataggctccgatgctcagttgcttctctgcttgccgctcagctgcttgtgttgctctgccagctaagtcttttatgggcccaggatgggggtaaggggcaagccagaaaggcaacgtttgggtggaaaaacggggtcagctgtttccacg

SEQ ID NO: 550021 - DNA, 785 bp, Homo sapiens
ccctgtttggttgaatttcagaggattctttctggtttgtttaattatgtgtcattactaacttacttcatgagcacgaattacttgcgtgaatttctgagtgacaggtttcaggttttttaaggttgcttaaattttctacaaaaaatatttttttcctgaatatgaaagtaaattttaaaatacaaatcaggttagaggtcttaagtagaagctgaaattgaagagaaagctgaaaatacctaagaccaccgctaacaccacacgatattttttaaaagatctatcaagttactacagaaatataytacactataatagacgatttcagaaagaaatattctctctaatggtatttactttcttctgattcacagatataagtatataaaatacatcacagtcacaaagcagtttcacatggccttctgagcctcagaaaaatgttgtgaggtgcacttatagatgcatttatagactcaccacctaactgacctgccagaggtcaccatgtgaatgatacacagattcagaagctgaacccaggacctgaggtcaggagttcaagaccagcctgaccaatatgatgaaaccccatctctattaaaaatataaaaattactcaggcgtggtggcatgtgactgtagtcccagctactaggaaggatgagacagaactgcttgaacccaggaggcagaggttgcagtgagccgagatcacgccactgcacttcagcctgggcatcagaacaagactcagcctcaaaaaacaaaacaaaacaaaa

SEQ ID NO: 550022 - DNA, 661 bp, Homo sapiens
cagaagacaaagctgtgaaatcaacatataaacttatattgtcagaatggctcccagaatagtaaaattggccaataatcatatttaatgtgtaagcatattttgaagaaagattgtcaaccagaggaggataagattgataatatattgaagcttaggagataagaaaataagatgtcgctgaatcaaatgttggctgtacattcccagcagggctgttcagcttcttatattcagcaaacatggagtgtctgctgtgggccatgcatcgtattggatgctggtcatatgaacgaggctggagtacttccttccatttatttccttcagtcttttctccttctctcggatatgwtttctccttcaacctatatgttctcattgtatttcaaaactatagtcatgaatattctaggactaggatgcaaaaggaaggaggggaagatgtgatccaggggaattgctccattattattattctcagttcctgtctgagaacacttcaaaatcttttcctttctttctttttttttttaaattatactttaagttctgggatacatgtgcagaatatgcaggtttgttacataggtatacacgtgccatagtggtttgctgcacccatcaacccatcatctacattaggtatttctcctaatgc

SEQ ID NO: 550023 - DNA, 992 bp, Homo sapiens
cagcctggctaacatggtgaaaccccgtttctactaaaaatacaaaaaattagcagggcatggtggcgcatgcctgtaaactcagctacttgggaggctgaggcaggagaatcgcttgaacccgggaggtggaggttgcagtgagctgagatcgtgccattgcattccagcttgggcaacaagagcgaaactcttgtctcaaaaaaaaaagaaaaagaaaaattgattatttaaggaatcctaatgacttcttacatattaacctaatgtttttaaattttcaaacaatcttaaaacacaaaacttcacaattaagtgcaattcagcctctgcttactttttttttttttctttaaagaggctatgctgggaagaactctgctttactttttaaaaataacttttcattaaagtataatatacatacagaaaagtggacaaataagtgtgcagcttgttgaatttcactagcagaacacacctgtgtgagcacccagctcaagaagcagctcattgccagcacccagaagccccataccctgtgccccctgccccttgcatccccgctttcctttggcttcctccttctgcagtcagtcccactgcccgggccacacaccgccaatacagttcccagcaaccaccccatcccctggcctttgagaccctagacttccccttgtggaggtcagctgtgttaggcctttatttttagctgtttctaggggcatggatgtggttgagttaaagctgaagccagagcctggatgtaattggagaatgcacctgcactgacctctgctgattgccctgcacccttccttctccgggctcttccctccctggaactcctgccttcccgcccccaccccactcaattcattgcacttaatgatatttmtttgtttaaaatagtaagctaagcaaatacgagctatgttcattaaatgacttctatttaaaagcaacacattaggccgggcacggtggct

SEQ ID NO: 550024 - DNA, 992 bp, Homo sapiens
cagcctggctaacatggtgaaaccccgtttctactaaaaatacaaaaaattagcagggcatggtggcgcatgcctgtaaactcagctacttgggaggctgaggcaggagaatcgcttgaacccgggaggtggaggttgcagtgagctgagatcgtgccattgcattccagcttgggcaacaagagcgaaactcttgtctcaaaaaaaaaagaaaaagaaaaattgattatttaaggaatcctaatgacttcttacatattaacctaatgtttttaaattttcaaacaatcttaaaacacaaaacttcacaattaagtgcaattcagcctctgcttactttttttttttttctttaaagaggctatgctgggaagaactctgctttactttttaaaaataacttttcattaaagtataatatacatacagaaaagtggacaaataagtgtgcagcttgttgaatttcactagcagaacacacctgtgtgagcacccagctcaagaagcagctcattgccagcacccagaagccccataccctgtgccccctgccccttgcatccccgctttcctttggcttcctccttctgcagtcagtcccactgcccgggccacacaccgccaatacagttcccagcaaccaccccatcccctggcctttgagaccctagacttccccttgtggaggtcagctgtgttaggcctttatttttagctgtttctaggggcatggatgtggttgagttaaagctgaagccagagcctggatgtaattggagaatgcacctgcactgacctctgctgattgccctgcacccttccttctccgggctcttccctccctggaactcctgccttcccgcccccaccccactcaattcattgcacttaatgatatttatttgtttaaaatagtaagctaagcaaataygagctatgttcattaaatgacttctatttaaaagcaacacattaggccgggcacggtggct

SEQ ID NO: 550025 - DNA, 578 bp, Homo sapiens
gaaaatgtgatgcagtactgcctatgtattctaactcataaatagaattttgatacattattttaaaaaactgtgctacaattacaagactggattttagtcctagctctaccattaaccagaaattgttcagagtactttaccttttctttccacctgaattctttcattctataattcatttccttcagctgtcaaatgaagaaaggaatgttcttcctatttcacatcaggaagcccagactgggagacaaataagaaaacagtatgaagttgttaaaatgttatagaaaaatggagacatatggatatgtatacaaatagtgataaatccatttwtatatatatatatgtccatgagtgtacacacacacatcacacatacatacacatggataaggtggcatttatttaggaagattggctagaataacttattagaaaagcacaagtgtggaaattacgaggtgacaggaagaccacctccagtgacaccatggcacaattaggcaccagtggtacaattaggaccacttctatcagtgcatgtgagttgcggataccaaacattaaatcag

SEQ ID NO: 550026 - DNA, 561 bp, Homo sapiens
aatgttaggtagtttaaaaaaaaaaaagtaagcagccataggttaactacttctttcttgaaaataagtattattaggccggcgtggtgggtctcacccgtaatcccagcacttcaggaggctgaggtgggaggatcaggagttcgagaccagactggccaacatggcaaaaccgcgtctctactaaaaatacaaaaattagccgggcgtggtggtgcatgcctgtaatcccagctactcaggaggctgaggcacaagaactgcttgaacccaggaggtggaggttgtagtgggccgagatcgcaccactgcactccagcctgagcgacacagagtaagactctgtctcaaaaaaaaaaaagaaagaaaaaaagyattatttttctccctctctaaagaattctgaagtgaatgggcacctgtggaacatactgaggaagaaacttgatcacctttactaactttcattcttttccagatgcttatttccctaaatccccgtaatcagagatttggtaaaacatactataagaatatggattgagggggtttttaaactaa

SEQ ID NO: 550027 - DNA, 561 bp, Homo sapiens
aatgttaggtagtttaaaaaaaaaaaagtaagcagccataggttaactacttctttcttgaaaataagtattattaggccggcgtggtgggtctcacccgtaatcccagcacttcaggaggctgaggtgggaggatcaggagttcgagaccagactggccaacatggcaaaaccgcgtctctactaaaaatacaaaaattagccgggcgtggtggtgcatgcctgtaatcccagctactcaggaggctgaggcacaagaactgcttgaacccaggaggtggaggttgtagtgggccgagatcgcaccactgcactccagcctgagcgacacagagtaagactctgtctcaaaaaaaaaaaagaaagaaaaaaagtattatttttctccctctctaaagaattctgaagtgaatgggcacctgtggaacatactgaggaagaaacttgatcacctttactaactttcattcttttccagatgcttatttccctaaatcccygtaatcagagatttggtaaaacatactataagaatatggattgagggggtttttaaactaa

SEQ ID NO: 550028 - DNA, 1217 bp, Homo sapiens
tgtagacgggggaaaagacacattaattaatatattatcaggtcgtttttttttactaaatagctgacactaactaaaaatagctaatagcatttttacctaatagccaaagaaataaaatttcatataaggacctaggtagaaaagagaaatgatccaggctttgttagaggtcttgattgtgttaggctgaacctaagctgagtttaggggagtaaggtcagttcaagcagaaggagcattgctaccaaaggattggagaatgaatgcaatagggtatgtttcagtactggaagttgcaaatgattgtgttaaattgagggacagcaaccagtttcctcctgtgccatgctcttgagtgtggyttctgctttagtcactacaaatattagtaaatgtattcaacaactaatgctttctcagtgatgtagtaatagtaatgtttttctttttgacattttcatgtttttctttacttttttttctataggtatttggtgttcatttttttaaattttagagcttattatttatactctacctttcaaatcaccaaatatgatttcgttattataagtataaaatacatttagttcagtgtgttttgaagctgaagtttaacagtagtgctttaaagttgagtcttatagaaaataggatatcatgaacggctgatatatatttttaaaagttgaatttgtattggtaggtgttgtctacatctactggcctaacaaaaacagtgtataatccagctgctttgaaggctgcacagaaaaccttacttgtttccacctctgcagttgataataatgaagcacagaaaaaaaaacaggtaagtacaactggtatagtataaaaaatttttgcatataggaaagctttccttgtgtatgtgttttttcagtgcttattgcaaaataagactacaagggtgtttgttggctgccactgaacgtttattttccatagtatagcggtaaataaaaattttttctttgaaagaaaggttcctgtgattaatctttgaaacttgcatacatattttaagttttacatagaaaagccttgcatataatttttgttgacagacttctgcagttacaactatttctcttctcttgaataatattgtttatccttagtaatattctaatgatatttttgatccctgattctaggaggcattgaaacttcagcaggatgtaaggaaaagg

SEQ ID NO: 550029 - DNA, 625 bp, Homo sapiens
taaatgatctctagacattttaaaaatggaattgtataatttttactgccttgtaaccttttttcccttatgatattgatactatttttaatggtccctccattatttgaagatgaatcaatgtaatgaatcaattctcattttgggaacttaacctttccactttttagtataaacaatgctgtgaacatcatgcctttaattattcatgatatattctcagaacttcctggtcagtatatatagtttttaaarctcgtgatacattttgaattttcttttacaaagcagatatgtataaataagtaataattgtgctttgtgaacagcctgttattttctctgaaatacgttagaacttaactgaatttattccatattcataacagaaaccaaattatgcctaatacagtagttaagctctgctgcagtagtgacactcttatggatattttccacaatatgtaattgccaggattttgtataccatagcagatttttttttcttgaaactacagatgttttataagttttcaagaaactccatagtctcatcatgagtctctattgaaaggtatgggagattatttttattaaataaggtaaaataagtgtcagaatctgg

SEQ ID NO: 550030 - DNA, 559 bp, Homo sapiens
tttgttcatttctcaatctctttgataacttattagacatctacttattaaaccaatttttattaaatagttactatgagccacacaytctcataagcactgggtagagatgaataagaaatggttccaactagctcacaataacaggtgtgcaggaagctgaggccctggaaggtcaggtaagttatctaaggtaccacagccttgtaataaaaattaaaatctgaaatccaggtttcttattccaagttcatgcattttcctctaccatattggctcttaagggaccccaaatgagtttagtccattttcatacttataatgttttaggccacccctaccccaggcaaattcagagaaccaagtcgcctgcccactagccagtctcaaccctccatgtcctacagatccacgtctcattccaagtctgatgtattcactatgaaaatcttaaacccctagattctatgacctctgaaagttagaggcttaaacgtgagagtctccaggaaaacatataaattctttcttatcccataacaaacaccagagagttaat

SEQ ID NO: 550031 - DNA, 1866 bp, Homo sapiens
aagcctgcgtgacataaaagaataactgctaaactagtccaaacacttggtttgcactgactagccatgtgaccttggacaatccaccatgcctctacagatgtcagtgtccagcagaacttgtwttgctatgttcaccactagccatatgcagtttttttgagccctggcaatatggttagtgcaactaaggaatctgtaatttaaatattgttttaattatatctcactgtcattaatttattaaattcaaacagccacatgtggctagtggctatcacattgaacagtaactactgctgacaaggcccctgaagaagaaagtcaaattccagaccaacctcaacccatcatcttctgcaagatctcgataccatctagacaactgtgacagaaggaaaagataaaaaatctgaggctctatctcagaaggtccttagggctcctgtcagctattgtctagcccattcattatcaccaccatatcctaggatagacagcccagtgcccttttatccttaagactgtccaggttgggatcaacatccaagtatagcagtgtaattatcaacgttccctggaaagatgacatgtatagaaaaatgtcctatggaaatgacccccacccagccagctaccctattataatgacattagtggattattagtgaaatatctgtgaataattagtgaacattattgaaaaatactatttcttgtagagtacaaatagctatctttaaattagttaactatctcttatgaaggaaaccattcggtttattttagctttcaaatcaaatcacgcaaccaactttaaagttttttcacaagcttgaaaacacacaaatattaaaagccacaaagtggctgggcacagtggctcacacctgtaattccagcactttgggaggccaaggcaggtggatcacttgaggtcagcagttcaagaccagcctggccaacatggtgaaaccccatctctactaaaagtacaaaaattagccaggctgattacaggtggtggtgttcacgcctgtaatcccagctactgggaaggctgaggcaggagaatcacttgaacccaggaggcagaggtgacaatgagccgagatcacacctctgcactccagcctgggctgacagagcgagactgtcgcaaaaaaaataaaaattttttaaaagccaaaaagtgtgactttttaaagagttgcctaggttgtttttaaaacatatataaaaaatctaggcgggatgcagtggctcatgcttgtaatcccaccactttgggaggctgaggcaggcagattgcttgagcccaaaagttggagaccagcctgagcaacatgacaaatccccatctctacaaaaaaatataaaaataggctcgcttgttggcatgtgcctgtagttgtagctacttgggaggctgaggtgggaggatcacttgagcccaagaggcagaggttgcaatgagccaagactgtgctgctgtactccaacctgggtgacagactgagaccctgtctcaaaaaaaaaaaaaaaaaaatatatatatatatatatatatatatatgtaaatatatatgtgtacctatatatgtctagaaaaaattatttttaaaaaattaccaggtaatgtcaataatagccatattccagaggcttaagagaaacttggcaacaaatttactaacatatattagcaaaatcaatcattatagcaccaaataatgagatctcaaaatagcacatgtgaaagggcagtgagctgcctaatcacaactaatttcaggaagaagttcatggtgcatctaggaaagcattattattttgcaatacttcacttttgcaatgttccaaaat

SEQ ID NO: 550032 - DNA, 658 bp, Homo sapiens
gagagactgaagcaggagtttgaggtcaggagtccaagaccagcctgggtaacatagtgagaccccatttctacaaaaaaatgaaaataaaaaattacctgggcatgaggatacatgcctgtagacccagctacttgggaggctggggcaggagaattgctgaagcccaggaggttgaggctacaatgagccataatcatgttattgcactccagcttgggtgacagagycagaacctgtctcatttaaaaaaaaaaaaaaaaaaaaagttggggagggtttgtggtccctgtgggttcatggaaagcccatggatttcaggaaatccatgggtctccctgaaattgaatgtaaaatgtggtgttttgtgtaattttctagaaaaagaggcctagtctgggtatggtggctcatgcctttaatcctagcactttgagaggctgaggtatgaggatcacttgaggccaggggttcaagactagccttggcaacaaatcgagactccatctctacaaaaaaaattaaaaaaataaggctaggcttggtggctcatacctgtaatcccagcactttgacaggatgaggcagctggatcacttgagcccaggtgtttaagacaatgctgggcaatatgacaaaaccctgtctataaaaaaaa

SEQ ID NO: 550033 - DNA, 658 bp, Homo sapiens
gagagactgaagcaggagtttgaggtcaggagtccaagaccagcctgggtaacatagtgagaccccatttctacaaaaaaatgaaaataaaaaattacctgggcatgaggatacatgcctgtagacccagctacttgggaggctggggcaggagaattgctgaagcccaggaggttgaggctacaatgagccataatcatgttattgcactccagcttgggtgacagagccagaacctgtctcatttaaaaaaaaaaaaaaaaaaaaagttggggagggtttgtggtccctgtgggttcatggaaagcccatggatttcaggaaatccatgggtctccctgaaattgaatgtaaaatgtggtgttttgtgtaattttctagaaaaagaggcctagtctgggtatggtggctcaygcctttaatcctagcactttgagaggctgaggtatgaggatcacttgaggccaggggttcaagactagccttggcaacaaatcgagactccatctctacaaaaaaaattaaaaaaataaggctaggcttggtggctcatacctgtaatcccagcactttgacaggatgaggcagctggatcacttgagcccaggtgtttaagacaatgctgggcaatatgacaaaaccctgtctataaaaaaaa

SEQ ID NO: 550034 - DNA, 530 bp, Homo sapiens
ggaggagatctgtagatatcagatgtggctttgttccttactactttcttggaccttttcctacaatagtgcttgtggaacctaagctatctgtccatctcatagtaaatttgagagagatttcaaaaaatcaaagtactgaatcttactacagggcccttaggatgagtcaagatcttgtttgggtttcaaagaaaaattcagtgccctggcatcacagatacgtccatttgagttgcagttacccttgttccagggtctggaatgcatggttagcataggcaaacctagccaaggagagagagctcagcagtcaccagggaaaacagtgccattcattctgagaatgtgcagaaacagcatttgattgggaagaggccttcggtcatttatctctcacttttaaaatgatgagatcgatgtgtctccccartgggctgtcccccttctattcagcaacaatacactacttcttttcaaagagaaatatgcttccaataagggggaagggaggctgggggtggtagtga

SEQ ID NO: 550035 - DNA, 559 bp, Homo sapiens
ggcaagggttttcccaacttcagtcttcaccctgtgagattctcgggctgccagtccaggggtctttgttcctggaccacaggaggtgataatgcaaattagaataagaacagctgtttggttttttttgcaggaaagtgaatcttgagtagagacacccagagatggaaggcagatagaatcayagcaaccttaggtgacagtataagaattctcgttcctgagaattttgggtttctgtggctctctccccttggcttgattgttcagattgaccaacaatttcatgagttacttactactgctccagtgagtttcttttgtgctccagttaggccaaggttaatacctgcaccaaataaccataattgatacttttttctgttgtattgaagttaatcatttatatgttagtcttaacatataaggttgtgtatatcctgagggcaagatcaggtcctgttcctttttgtctctccagggcctgcacaatgcttggcttgtagaaggtactgaatagctcctaattgtattaatggatacgatttttctttgtctg

SEQ ID NO: 550036 - DNA, 561 bp, Homo sapiens
aatgttggctgttttccacttaaacttgttcatgcttttcaggtcccagctgtagtcttcagagatatttgaaaattagctggtctaaaacatgattctggcaaccagtgaaatgataaagtagaaactatttataaaaacaatacttaaattacgtatttcaaatatgtaaatttatttgctcttttaaattttatttgtccttagtgctttttaatccaaatccattttaaactccactgttatattccaacttatgtagcattattctgtgctgtagttacacataataaattagttactgtcagtttacttcattatgctttagtggtttactctttctgagaattcaatgaaggtttactttctaacaatacctactaaaatattaccaaagtgaagagtatcaccaaggagtaaggaataacagagccacaggcagctccaagtcccgcttgtagagctccagtctcggaacgtgggrttgccagacctgccaagtggccccttctgcgtcagagaaaagcaggctcaaggaaaaggcagacttgaggcctagcc

SEQ ID NO: 550037 - DNA, 1201 bp, Homo sapiens
aaaaataatgtaagcatagtaataggtagcctttaggaggaagtataatttgtgaaagcttacataaaaaactagttggaattaccttgaatgcaacaaaaatttggtakatatctttgtggcttagacaacagaaatttatttcctacagttctggaagctgagaagtccaagatcaaggtgccagtcaattcagcgtcttgtttctggtgaaggccctcttcctaatttgcagatggacaccttactgatatatcctcccctagcatgtgtggaatgccttgaatgcaaacagaagtctggtaggtatctttgtcattttgggctactataacaaaaatgccacaaggaagtcagtaggaaaagagaaaaactaccttaaaatttgagtagaaatagtctgcaaaactgtctggggctgaactcttttatggtggcaaaactttgcaaataattccaatttatttttatttaaatactatactttccagatgtggtggctcatgcctgtaatcccagcactttgggaagccaaggcgggcagatcacctgaggtcaggagttcgggaccagcctgaccaacatgtagaaactccgtctctactaaaagtacaaaattatccaggcatggtaatccatgtctgtaatcccagctactcaggaggtgagccacaagaattgcttgaaaccaggaggtggaggttgcagtgagccaagatcacgccattgcactctagcctgggcaacaaaagcaaacctcagtctcaaaaaataataataataacaataatacactcaatttttctaaagcttacgagtgacccttggcaatatacattctgatagaaaatatgatatccatttgagataatcattgaaataaatctgggcttttgtctttaaactccatttatcttatttaattaatttgtttatttattagtgcgtacagtcctgttgtttttgtttgacctattcatgtgtttctcccacctcatttctttgcaaaagattttaatttaatttttaaagactacacattaaatcggttaccaagatattttggaaataataacaataacaataaacaaaattcctgctacatggagcttaggctctcgtttaaaacagcataaaacagaaaataaaatcagatgaagaagtaaaatatataatatgtgagatagtaacaatgtataaa

SEQ ID NO: 550038 - DNA, 1201 bp, Homo sapiens
aaaaataatgtaagcatagtaataggtagcctttaggaggaagtataatttgtgaaagcttacataaaaaactagttggaattaccttgaatgcaacaaaaatttggtagatatctttgtggcttagacaacagaaatttatttcctacagttctrgaagctgagaagtccaagatcaaggtgccagtcaattcagcgtcttgtttctggtgaaggccctcttcctaatttgcagatggacaccttactgatatatcctcccctagcatgtgtggaatgccttgaatgcaaacagaagtctggtaggtatctttgtcattttgggctactataacaaaaatgccacaaggaagtcagtaggaaaagagaaaaactaccttaaaatttgagtagaaatagtctgcaaaactgtctggggctgaactcttttatggtggcaaaactttgcaaataattccaatttatttttatttaaatactatactttccagatgtggtggctcatgcctgtaatcccagcactttgggaagccaaggcgggcagatcacctgaggtcaggagttcgggaccagcctgaccaacatgtagaaactccgtctctactaaaagtacaaaattatccaggcatggtaatccatgtctgtaatcccagctactcaggaggtgagccacaagaattgcttgaaaccaggaggtggaggttgcagtgagccaagatcacgccattgcactctagcctgggcaacaaaagcaaacctcagtctcaaaaaataataataataacaataatacactcaatttttctaaagcttacgagtgacccttggcaatatacattctgatagaaaatatgatatccatttgagataatcattgaaataaatctgggcttttgtctttaaactccatttatcttatttaattaatttgtttatttattagtgcgtacagtcctgttgtttttgtttgacctattcatgtgtttctcccacctcatttctttgcaaaagattttaatttaatttttaaagactacacattaaatcggttaccaagatattttggaaataataacaataacaataaacaaaattcctgctacatggagcttaggctctcgtttaaaacagcataaaacagaaaataaaatcagatgaagaagtaaaatatataatatgtgagatagtaacaatgtataaa

SEQ ID NO: 550039 - DNA, 1201 bp, Homo sapiens
aaaaataatgtaagcatagtaataggtagcctttaggaggaagtataatttgtgaaagcttacataaaaaactagttggaattaccttgaatgcaacaaaaatttggtagatatctttgtggcttagacaacagaaatttatttcctacagttctggaagctgagaagtccaagatcaaggtgccagtcaattcagygtcttgtttctggtgaaggccctcttcctaatttgcagatggacaccttactgatatatcctcccctagcatgtgtggaatgccttgaatgcaaacagaagtctggtaggtatctttgtcattttgggctactataacaaaaatgccacaaggaagtcagtaggaaaagagaaaaactaccttaaaatttgagtagaaatagtctgcaaaactgtctggggctgaactcttttatggtggcaaaactttgcaaataattccaatttatttttatttaaatactatactttccagatgtggtggctcatgcctgtaatcccagcactttgggaagccaaggcgggcagatcacctgaggtcaggagttcgggaccagcctgaccaacatgtagaaactccgtctctactaaaagtacaaaattatccaggcatggtaatccatgtctgtaatcccagctactcaggaggtgagccacaagaattgcttgaaaccaggaggtggaggttgcagtgagccaagatcacgccattgcactctagcctgggcaacaaaagcaaacctcagtctcaaaaaataataataataacaataatacactcaatttttctaaagcttacgagtgacccttggcaatatacattctgatagaaaatatgatatccatttgagataatcattgaaataaatctgggcttttgtctttaaactccatttatcttatttaattaatttgtttatttattagtgcgtacagtcctgttgtttttgtttgacctattcatgtgtttctcccacctcatttctttgcaaaagattttaatttaatttttaaagactacacattaaatcggttaccaagatattttggaaataataacaataacaataaacaaaattcctgctacatggagcttaggctctcgtttaaaacagcataaaacagaaaataaaatcagatgaagaagtaaaatatataatatgtgagatagtaacaatgtataaa

SEQ ID NO: 550040 - DNA, 622 bp, Homo sapiens
tgctgagcctctgtctcctcatctgtaaaatgggtcaagaaggtaacaaccctgccttgcagggcggatcaatgaaaatgcacatgtaggctgggcacagtggctcacgcctataatcccagcactttgggaggccgaggcgggtgaatcacttgaggccaggagttcgagaccagcctggccaacatggcaaaaccctgtctctactaaaaatacaaaaattagctgagtatggtggcacatgcctgtaatcccagctactcaggaggctgaggcaggagaatcgcttgaactcaggagatggaggttgcagggagccgaaatcatgccactgcattccagcctgggtgacaaagcaagactctgtctcaaaaaaaaaaaaaaaaaaaaaagaaagaaagmaagcacatgtaaaggatgaggtgaataggaacatgatgaatggtcactgatggctgttttcttagagctctccttccagtccttgcctcttgcactcttggtcctctcatggcccttgggagagaattcacagctgcgagttgaaagggagccaagatatcaacttatccaaactagtccaattttgtcccaccatatgagtactggacactgtataact

SEQ ID NO: 550041 - DNA, 578 bp, Homo sapiens
ctatctattctgaattttcatgttctaagcttactaagaaccacacagccctctgtaaatatgagttatgtacaatgaactaaatcagtgcctcaattctcttttctttggaaaaggttttttccaagaaggcatctttatccctcaggaaagtaaatccttgctgagcccactttgcagcttttccaggtaaacctctacaaatgggtagatcagagtcacctgtttccttatacagtcaggtcctagtaatgttgtcaagcaccctaacttaaagaccaaagagaaytggaggaaaaagaagagaaagataggtaggaagagagagtgggggagagagacacaggaagatgatgagagaaagattaaaagagaaaatgtcaaaaggagaatgaaaggaagagcaaggaaaaaaaggaggaagaaagcacactggaagagatagaggaaaagaaaacaagtgaaacagagagacacagaaaggtggaaaaaagggagagagggataaaagagagaaatagaggaagaaaagataagaagatagaagaaagagaggcaggaaaagagagatatgggga

SEQ ID NO: 550042 - DNA, 578 bp, Homo sapiens
ctatctattctgaattttcatgttctaagcttactaagaaccacacagccctctgtaaatatgagttatgtacaatgaactaaatcagtgcctcaattctcttttctttggaaaaggttttttccaagaaggcatctttatccctcaggaaagtaaatccttgctgagcccactttgcagcttttccaggtaaacctctacaaatgggtagatcagagtcacctgtttccttatacagtcaggtcctagtaatgttgtcaagcaccctaacttaaagaccaaagagaattggaggaaaaagaagagaaagataggkaggaagagagagtgggggagagagacacaggaagatgatgagagaaagattaaaagagaaaatgtcaaaaggagaatgaaaggaagagcaaggaaaaaaaggaggaagaaagcacactggaagagatagaggaaaagaaaacaagtgaaacagagagacacagaaaggtggaaaaaagggagagagggataaaagagagaaatagaggaagaaaagataagaagatagaagaaagagaggcaggaaaagagagatatgggga

SEQ ID NO: 550043 - DNA, 578 bp, Homo sapiens
ctatctattctgaattttcatgttctaagcttactaagaaccacacagccctctgtaaatatgagttatgtacaatgaactaaatcagtgcctcaattctcttttctttggaaaaggttttttccaagaaggcatctttatccctcaggaaagtaaatccttgctgagcccactttgcagcttttccaggtaaacctctacaaatgggtagatcagagtcacctgtttccttatacagtcaggtcctagtaatgttgtcaagcaccctaacttaaagaccaaagagaattggaggaaaaagaagagaaagataggtaggaagagagagtgggggagagagacacaggaagatgatgagagaaagattaaaaragaaaatgtcaaaaggagaatgaaaggaagagcaaggaaaaaaaggaggaagaaagcacactggaagagatagaggaaaagaaaacaagtgaaacagagagacacagaaaggtggaaaaaagggagagagggataaaagagagaaatagaggaagaaaagataagaagatagaagaaagagaggcaggaaaagagagatatgggga

SEQ ID NO: 550044 - DNA, 628 bp, Homo sapiens
gaaactggtacgtacggaaatccatgggagaggaggagccatgaacaggtttttgaatgtaaactttacattaaagtataacatataaaataagggcacaaatgacaggtgaatttccagaaggtaagcacattcatgtaacagtgggtcaattacctgcaatacccctacctgtggggattctcctgttcctgtaacttatattcagttagtaataacagtgaccaccatgacttacacttacatagaatgttttgatttacaaattgtatttatgtacattaagtctctcaacaccgtgtgatgggtactattactattgtttttattttacaaaggcataaagcaacaagatcatgtgagtattaagcagaagaatttggattccaccctttgtattcttwccccattattggggcagccattaagataatgtagatagatatttattcatataggaacatgatcaaaatatattatgaagttaaagaataagatacagaagggttatgtagtatatatcttatggaaaatataatagagcagtaaaggataccagagtcaaatcatctgtgtttaaaccctggccctgacacttacaagctgtgtgaccttagacaagtcatgc

SEQ ID NO: 550045 - DNA, 628 bp, Homo sapiens
gaaactggtacgtacggaaatccatgggagaggaggagccatgaacaggtttttgaatgtaaactttacattaaagtataacatataaaataagggcacaaatgacaggtgaatttccagaaggtaagcacattcatgtaacagtgggtcaattacctgcaatacccctacctgtggggattctcctgttcctgtaacttatattcagttagtaataacagtgaccaccatgacttacacttacatagaatgttttgatttacaaattgtatttatgtacattaagtctctcaacaccgtgtgatgggtactattactattgtttttattttacaaaggcataaagcaacaagatcatgtgagtattaagcagaagaatttggattccaccctttgtattctttccccattattggkgcagccattaagataatgtagatagatatttattcatataggaacatgatcaaaatatattatgaagttaaagaataagatacagaagggttatgtagtatatatcttatggaaaatataatagagcagtaaaggataccagagtcaaatcatctgtgtttaaaccctggccctgacacttacaagctgtgtgaccttagacaagtcatgc

SEQ ID NO: 550046 - DNA, 557 bp, Homo sapiens
ttttcatgggtttattttaaatatgtgtaaatcktataagcagaaaccaggaaagtaaaaacgaggtttgcttattttggtacctataccttatttttactgaaagcagactaaactcaaagacttaaaaaatcatacctttgattattttcttaataaggtcaaaaaaagtatgtttttgaaagcatgtctaagataattcttgtacaaaggacatcttatgccctaatttatgctctgtctaaagctgccttcctatcccatcaaaatccctttcaaacagaccttggagaagagggagggaaaaggagcaatggatcctgagaagggcgtaagatacgattaagcattagaaaaccacacttgaaggtttgttcctgaactttggtttcctacactgtcattttcttgtgttatattttgcagcttttgctcccaaagaaagtggaataatttacacttagcttcagaaagacttcagtttcttagttctttaacataggagtgcttctgagattactcttttcctatttcccttcctttaaaagcactatatt

SEQ ID NO: 550047 - DNA, 630 bp, Homo sapiens
cttagaagggcagctaaataaagttctttctgaagtgtcctaaaggcatcagtgaagagcagagcccttgggtgaccaaagaacctaagtggagatttattctcgcctctcttccaagtctgttccttcccccagctccctcccttcagtcccagggaaagaaccctggactagaaattaggagttctggtttattatgmagtttctgccatcaagtatcttcaagagaagcagctaattcttcggagctatgattacttcatctgttaaaaggtactcatggcccggcacagtgactcactcctgtaatcccagcactttgggaggccaaggcgggtggatcacctgaggtcaggagttcaagaccagcctggtcaacatggtgaaaccccgtctctaccaaaaatataaaattagccagatgtggtggtgggcacctgtaatcccagcttctcaggaggctaaggcaggaggatctcttgaacccaggaggaggaggttgcaatgagccaggattgtgccactgcactctagcctgggcaacagagtgagactgtcaaaaaaaaaaaaaaaagttagtcttggagaaatatttcctcagtaggcaagtccatctgtgacatacattat

SEQ ID NO: 550048 - DNA, 538 bp, Homo sapiens
cttggtaattttgatttgcaaatatatttcattgtttataagtttgcattgaccagactaattttacttagcctgtgttgtaggggtaggcccttgctttctttcaatacacataagaaacttcagtaacccttcctaagacgtcatagtcaagtttggcccaaaaggccaagtgggctgtctgcagctagaacaaatatatctagcattttttgtacccttatattgtgataacctcttaacatgaagtstctcatttaatctttacaataaattgaatgattgattctattatgagcatccctatttatagatgagaaaactgaggactagaaactttagataacttaacaagtcacaaagtttgtagtgaagtgaagattcaaacacagccagtctgcctctagatccctagtgttttgctaccttattactccaaatgtggtccttgagccagccacaggactacctgaagacttgctagaaatgcagaatcccaggctgcaccccagacctactcccaagggacccatatgca

SEQ ID NO: 550049 - DNA, 556 bp, Homo sapiens
attgcattgaccatcgattccccataagatcaagttcaaaactacccagcagggatacaaggcccttcatgcttttgtccccagttacaygttaagtaacttccaaacttttcctgacacatacttcacctgttttcaaagcatactctgctctccaagacctcctatgtgatactctttgtctgtattccccttcctaccttatccagacagaaaatccctactcagcctttagatacagctcaagcattagctcctcttggaagatttccctggcaagcataactagccaacccacaatctgcaagatttctgtgctttcctccaggtttgtggaacaccctgtgtctaagtgtctacttgtacaggctgtttgtactgcagtttttgtgcatgtcctctccactgtgcttcaagcttcttgatagtctggctgtagtatatttgtattagtatcttttttaagtgggttaaaggaagactgtaagtagaatgtgttaaaggaacaaataagtacatgaggaaaattgtctaacagaagtataatagtaaatgg

SEQ ID NO: 550050 - DNA, 556 bp, Homo sapiens
attgcattgaccatcgattccccataagatcaagttcaaaactacccagcagggatacaaggcccttcatgcttttgtccccagttacacgtyaagtaacttccaaacttttcctgacacatacttcacctgttttcaaagcatactctgctctccaagacctcctatgtgatactctttgtctgtattccccttcctaccttatccagacagaaaatccctactcagcctttagatacagctcaagcattagctcctcttggaagatttccctggcaagcataactagccaacccacaatctgcaagatttctgtgctttcctccaggtttgtggaacaccctgtgtctaagtgtctacttgtacaggctgtttgtactgcagtttttgtgcatgtcctctccactgtgcttcaagcttcttgatagtctggctgtagtatatttgtattagtatcttttttaagtgggttaaaggaagactgtaagtagaatgtgttaaaggaacaaataagtacatgaggaaaattgtctaacagaagtataatagtaaatgg

SEQ ID NO: 550051 - DNA, 556 bp, Homo sapiens
attgcattgaccatcgattccccataagatcaagttcaaaactacccagcagggatacaaggcccttcatgcttttgtccccagttacacgttaagtaacttccaaacttttcctgacacatacttcacctgttttcaaagcatactctgctctccaagacctcctatgtgatactctttgtctgtattccccttcctaccttatccagacagaaaatccctactcagcctttagatacagctcaagcattagctcctcttggaagatttccctggcaagcataactagccaacccacaatctgcaagatttctgtgctttcctccaggtttgtggaacaccctgtgtctaagtgtctacttgtacaggctgtttgtactgcagtttttgtgcatgtcctctccactgtgcttcaagcttcttgatagtctggctgtagtatatttgtattagtatcttttttaagtgggttaaaggaagactgtaagtagaatgtgttaaaggaacaaataastacatgaggaaaattgtctaacagaagtataatagtaaatgg

SEQ ID NO: 550052 - DNA, 1170 bp, Homo sapiens
acctacaatggctctgaatcctttacgcttgctttggtacaacccctgtatttattagtgtccctgcatttaaaccatgtgttctacataaacaatagtaggatggggattatgaagatgcaaataaataaacagaacttgaattacttcaattctggccctttttctaaagcgatgaatcaaacaataccatagaaacagaacagaaacaaattgtgatacatctgtatactgggatactgttggaatgatacacaaaacarcctggcttaatttccaaataattatgctaaaagaagccatcagaaaagagcagatgctgcatatattctatgtaaatgaaattctagagaatgtaaattaaactatagttacagaacacaggtcagtggttgcctgggattaggagtgggcggaaagtggtgggaggcggggattataaagaggaataagggaactttggaggcgacggattacgggtgtgtgtatatacatatcaaacttatcaaattgtatactttaaatgtgtgcagtctactctatgttgattgtacttcaagaaatctgtaaaaatgctaagtatgccactgttaaacaaatataataaagcactgatatatttataaacaattttccaccaatcaggaattttaacttactgtttctcaatcttgtcttctctatccaaatgaatcaatggctacactagattggatttcagaactcatctggtccaagagaaagacattgtccattggagtggctgtggggcaggaggaattgttttgagtggggatggcagttgatagatggtaaactgcaactaattacttgaaattttttttcaaaccagtacaaaatgatttgaagcctcaggccaattttcagtaaaatatcaaaggaaaaggccagtgatgaaaagatacataatttataataatctagctggacacttacagaaaattctaggtcaataggggctttttttgctttcttgatcatttatagccatcattgcagcacttgagatattgatgaaggatatgaattaatgtgggatgaaagaatgcatacaggtacaagttaagactcccccaggtccttttatatttctttctttttggtggggcgggggtgcagggtctcactcctgttgcccaggctggggtg

SEQ ID NO: 550053 - DNA, 1170 bp, Homo sapiens
acctacaatggctctgaatcctttacgcttgctttggtacaacccctgtatttattagtgtccctgcatttaaaccatgtgttctacataaacaatagtaggatggggattatgaagatgcaaataaataaacagaacttgaattacttcaattctggccctttttctaaagcgatgaatcaaacaataccatagaaacagaacagaaacaaattgtgatacatctgtatactgggatactgttggaatgatacacaaaacaacctggcttaatttccaaataattatgctaaaagaagccatcagaaaagagcagatgctgcatatattctatgtaaatgaaattctagagaatgtaaattaaactatagttacagaacacaggtcagtggttgcctgggattaggagtgggyggaaagtggtgggaggcggggattataaagaggaataagggaactttggaggcgacggattacgggtgtgtgtatatacatatcaaacttatcaaattgtatactttaaatgtgtgcagtctactctatgttgattgtacttcaagaaatctgtaaaaatgctaagtatgccactgttaaacaaatataataaagcactgatatatttataaacaattttccaccaatcaggaattttaacttactgtttctcaatcttgtcttctctatccaaatgaatcaatggctacactagattggatttcagaactcatctggtccaagagaaagacattgtccattggagtggctgtggggcaggaggaattgttttgagtggggatggcagttgatagatggtaaactgcaactaattacttgaaattttttttcaaaccagtacaaaatgatttgaagcctcaggccaattttcagtaaaatatcaaaggaaaaggccagtgatgaaaagatacataatttataataatctagctggacacttacagaaaattctaggtcaataggggctttttttgctttcttgatcatttatagccatcattgcagcacttgagatattgatgaaggatatgaattaatgtgggatgaaagaatgcatacaggtacaagttaagactcccccaggtccttttatatttctttctttttggtggggcgggggtgcagggtctcactcctgttgcccaggctggggtg

SEQ ID NO: 550054 - DNA, 1374 bp, Homo sapiens
tggacaattacaggactcagtacatttacttcccttctcttggagtcatggtcctacctcttgttcaatgtttgaaagttgttatgctctatattttgtttggttttctagttggatatggtggaaggcaaatctcagagcacttaatctttcatggataaaatcagaactcccaaactctaactttttatgtactttttatcaaaacttttttcttggctgggcacggtggctcacgcctgtaatcccagcaccttgggaggccaaggcgggcggatcatgagatcaggagatcgagaccatcctggctaacatggtgaaaccccatctctactaaaaatacaaaaaattagccgggtgtggtggtgggcgcctgtagttctagctactcaggaggctgaggcaggagaatggcgtgaacccaggaggcggagctttcagtgagtggagattgcaccactgcactccagcctgggtgacagagcgagactctgtctcaaaaaaaaacaaacaaacaaaaaaaaaaaaaaaaaaaaaaaaaccttttttcttcagaaacaatctataatttatacttaggaaaaaataagatcgtgcccaaatattaactagtttatgcttatcccacccgattccttattaatatgccacatctccccactttcctacttgaactgatctcaggagcctcaagttatgaaacttggttcatctgtcaaatggggataataaaagtattcacagtttgtggtgaagatcaaatgagataagttatataaagcctggaatataataattgttctgcaaagggcaactattagtactactgaatgaatcacagaaagtggaaatactgatttagttgagtgagatggcaagattagtgggtccatttccctacaaataaacacagacaataacacacaaacacattttcagcatagtttcatttggtgacaacttttagtccaacaggccttgttaacttctttacaaaagttcctcaagagttcaaaggttcattgaaaatgcataccattcagtawtttatgttctataaatctaattttaaaataataattaaaactaaatatgagttgcataattgttattgaaaattgatgccataaaaataaccagttctggtcatctgagtcctagggatgtcagagtctcagaagagagagcacgggaggaaggaagggttaggttggtcttgaaattgaatgataaattacaaaatttgcacatctcctaaatcctgaaaacagaagtaatgaaacttggtgtctgtcttttgtaaatattaaaatgcattaattatctgtggaacattttgttctggattttgatttcaagataccattgctctca

SEQ ID NO: 550055 - DNA, 661 bp, Homo sapiens
gctctgctctcatgacttaatcaactcccaaagcctccaccttcaaataccaccacctttgagattaggcttcaacatatgcatgtagggtagggggaacacaaacattcagaccatagcgcaagtgtaccaattagaatatagttttagatcagtaaccaaaataatcctaaagatacagtgtcttaaacaatatagaatcttatttttctcccacataatagtttcaaaagttcaggcttaatatagtcccttctgtttttcacattgccatcttcaacttgcagtttctatcttgtggtctaagatgaccattgaacctggattcttgcctaagcaaagtgcatctacactccaaacctttgagagaacggctagtagttgtacttattacttctrctcacattccattgaacagaacttggtcacgcttaactgcaaggagactggggaatgacattgtctattgggggggcattttctgtctggctaaaactctgggtagctattacaaaaggaaaagtagaaaagtagattggaggacaaccagctgtctgcaatgagaggaagcaagagcaatgctactacataatacttagtagtgttgtgtagaagaagtaatacaattgtcttaaactgtacaaataaaattcctttgaga

SEQ ID NO: 550056 - DNA, 607 bp, Homo sapiens
taaatatataaagtgtggttaaaatggatgctgagcagaggtccggggtactggcaaagacggacgcgtttaatttcctgcatgcttgctctggcttgaaagcctgcagctgtgtggctgctgtttcggagcgaaaaacacactgytctaggaaaccaccttctccgtgatttatcaaccagcgttgtgggagccaaattagttgttgattgttctatcgagtaactcaacttcggcattgaaggatctggcgcagggaggttggaggtttgacgaccagcggctttctcagaagtagtcctttctggaagcagagcccatgcacaggggaaccggccgatgggctagaaacccgggctgcagaaaccattagcttatgtttctagagagagccttgcggctgtctctcaaatgtctgcagctccggtggccccccagggtgccttactgggctgcgggcctgggctgtgcttgtgtctgcctgtgggcatctgtctacacagctctgccaggcatctggaactctctctggcatcctccctctgcaacccaggccaatttgagaatctggcctcacccctgtcgatgtttctcctgcccctgtgcc

SEQ ID NO: 550057 - DNA, 1058 bp, Homo sapiens
actccactgccctacaccccaggcactcctggcctagtagttccctctgccctggccgtactccacctttagggctcagctcgaacacagttgcttcagggccatgttcccagaccctttaatgggccaaatccccctaacataggccgtcttggcaccgagcccctccttttgcccacaccaatctcatcattttctacttctttgtgtgattctttgggtaacagccatatcccccactagatcgtgaamttcatgagggtggcagccatggatgttctttttaatcaatgttgttttcagaggctggcagggtgtctggtacagatggggtgctcaaaaagatgcccttgcaggggtgttaacactactgtcccctctctcccaccccacagcggccggccttgactacttccggctctcctgcccagtgctctctgaagcatcgctgctttgctctcttcccagcaaagtctggaaaagttctctctcctcttcagtctgtgagttgcacacggccagagacaatctctcttgttgacagctctgtgcccagtgacagcatggtgtctggtatatgaccgggagtccatgatggatggatggatgagtgaacaaataagaaagggaggtctggagagagacaggaaggctggacaccatgctggaaacttgcatgttcatgctttcgtgtgatcttgacaccacatgtaaaccgtgttaattccttctgtaaatgaggaaagtgaggcctcaagatggcttagcttgccctctgaataatagagccaataaatagtggaggctttttccaactggggcattccagcttcacatccagctgtcttttggaagttttttgaggacccaagggtgaatctggacatccgcttgagaagcccaatgctaattggctatgtgcaaatgtatcacatcttgtatgagctaaagtcataaatttatccctggctgaatgtttgctccagctcagtctgaggataactatatcctcgggagagaaaggagatccaagtgtctccatgccaagagcaatcatc

SEQ ID NO: 550058 - DNA, 612 bp, Homo sapiens
tgcttatagtttaagacattttcatgcatcttccttgtttaaacttttattaatattttaaataaagcaaaacttgctatgtgttttataatcaaggaaactggcttgtctacacatttatttgtytcttgttttatatgcaatatcaaagtagtattaatttcttcatgtaatggaatatgtcttggttattattcctatgtaattatgtttatctttccttcaacagaaacagggaataatataaaaacagtcatgcactgcataacaacatgtcagtcaacaacgaactccatatatgacagtcaccccagaagaacataatgacgctcaacaattcctactgcctagtgacatcttgataattctgacctggtataggcctaggataatgtatacacttgtgtctaggtttttaacaaaaaagattccacagtaaaaaataattaaaatattaaaaataaaagcatttttagaagtaagaatataaaaaatattttgtacagatgtaaatacgtgtgttttttaagctaagtattattacaaaatgtcaaaaagttaaaaattttataaaataaaaaagttacagtaagctaagttcaacatattatt

SEQ ID NO: 550059 - DNA, 321 bp, Homo sapiens
atgaaatttctgctacgtgggacctctgagaccacggcttccctgaggacaggagccaccgtggcttctttgtcaccatgtccccaacaccaggcccagaaatccatgcgagggctggaggaacgtcggcccgcgaccgacgagccgagtggggagctgagactggagcscagacttccaaatactcctcttggtccttggtacagagaaaaacgaaatcgtatatgatgttccatagtcaaatatgaacatattatttaaaagcacaatgttgactgtgtttttttaaaaaccatgttccgtaacttttacctgtagaaa

SEQ ID NO: 550060 - DNA, 1252 bp, Homo sapiens
aaaaataaaaaaaaatcagtcacttatagaattgctaaaagaatttctttggctgggcacagtggctcacgcctgtaatcccagcactttgggaggccaaggcaagtgaatcacctgaggtcagaagttcaagaccagcctggccaacatggtaaaaccctgtctctactaaaaatacaaaattagccaggcctggtggcgcatggctgtaatcccagctacttcggaggctgaggcaggagaatcgcttgaacccaggaggcagaggttgccatgagccgagatcatgccactgcactccaacctgggcaacagggtgagactccacctcaaaaaaamaaaaaaaaaaaaagaatttctttaatcaggtaaaagtttgattactattcatggggaaatggacaaagtatttatttttaggaacacaagtattgttcttcacccaaagtgttgactcaaagagactgagaatagtgtaatcatataatcgtaccttagagtttaaccattttttaaacatcccatatcatttcaaaaccaaatagtaatcacttgctttacctgtaggaatcgagtattgggagatatcaagagaccaagaaaggagtttaaaacttatggcaaattaaactggactagtatttgatacttctttaagaaataacggctgggcgcagtggctcacgcctgtaatcctagcactttggaaggccgaggcgggcagatcacgaggtcaggagatcgagaccatcctggctaacaaagtgaaaccctgtctctactgaaaatacaaaaaaattagccgggcgtggtggtgggcacctgtagtcccagctactcgggagaatggcgtgaacctgagaggcggagcttgcagtgagccgagatcgcgccactcactgcactccagcctgggcaacagagcgagactccgtctcaaaaaaaaaaaaaaaaagaaaagaaaaaaagaaatatccagggttggggggcgaggggaagaaacttggaggacaggtcgataggtgcggcaaaccaccatagtacacatatacctatgtaacaaacctccacattctgcacatgtgtcccagaacttaaagtaaaatttaaaaaaaaagaaaagaaatatccagaaagattatccagcctcaaggtttatattataatggctataaacaacaaaacataaacctattttccaaaggtttccaaatatactaccgaagaaacaaacataaaaaacgactttgat

SEQ ID NO: 550061 - DNA, 574 bp, Homo sapiens
ggatcttgtgacagtattgttacaaattatagcaatgcttttcaaattaatttagcaattctcttctcagagataatttttttaaaaggcccaagtaaccatggaaagggatgcagtcatttctgagggactcaagtgctaccmgggctttctctctccatccctcaactccattcctccctctgtgcttgcttctttctcttaaaacagcttgcttcaacttgaatggcatggcactgtcagcaacttctgtgtcaccaaaacagaactaggcattctttcctttattttgttcctaaaagaggaatctcatttgcctatctcggatgatatgctcatcccaagatcaataatagtaattgttcctaaacatgtctaattgctttttctctcccaactcccaaattttcctatctaattgcttattattattttcaaataaatgaatgaaaactgtcaaattaaaatcagtatgttcaaacccaaactcacttctcttcttacataatttcttgctcttctgcttttattatctattaataatgtgattaatttaatagtcttctaggcatct

SEQ ID NO: 550062 - DNA, 547 bp, Homo sapiens
aaattattttaaaaataacattgtcttgggattaagagaaatgaaaacttaaatattgaggagtgtataaagtagggacattttagcatacttactgagatataattcatgtaccataaaattcacccatttaaagtatactattaaatgattttagtatattaacagaattatgcaaccaccccacaatctaagtttaaaacacatcaatcactcctacaaaaaccatgtaccaattacagacagtcctaataccctctccagccctaggcaccattatctattttctgtctatgaatttgcctgctctgaacatttcatataaatggaatcatataatgtatggtttttcataattkgcttctttcacttagtgtaatgttttcagggttcattcattttgtatcatacttcaataattaattcctttaattgctgaataatattctttgtgtgaatatagcacaatttgtttatccattcatcagttgatagatgatatggtttggctttaaccccaccctaatctcatcttgaatttcagctc

SEQ ID NO: 550063 - DNA, 513 bp, Homo sapiens
actaaggatgytttccttcttccccatgattttgctggagaatgagaggcagaattaaaacgtgctgcatttgtattcagatgtaaagtttgtgtctctgcagaaagcattgcttgtgtagagaaggaaagcatattgttttagtccacaggggagctagaaatgtgatcagtcatcagaataaggcagatgtgtgctaaatatttcagtcacttattagcagataatttattggcttattatcaaatgtagcaaatatttgccatgtctgctttgggttactttttttgggaagccttaggccgatttttggcaacagggattgaaaacattttaccacttcccttactgaaaaggccttgttgcctgggtgggtgcccaagtcgttggtctcacagctgaggaaatcgacgatgcagacacaccaaggacgaggtcagagcagaagcagaagtttaacaggtgaaagaaagagaacagttctctgctgcagagaggggtcccagaaagggt

SEQ ID NO: 550064 - DNA, 1146 bp, Homo sapiens
ttgatgaatgcttattcagttgactggtgtagacttcaataataacctgttcaatgcattatrccagatgaatcttgcatctcaaaagtagaacaaatattgttctttcagttttgtctacccataaatgcaatatttactaataaaaagaaaatgagtttattgttctagagagtatgagaattttgacaacatgaattctcctgtcctaggacataattaatacttagaggcatactatttcatgtggaagctaccattaaatcaatgttaagtgttaattacctcacataatcttctaatctgacttgactgaagacgtacctgacaaagttgatttatcaagttgtaaatcttcacctgttgaattcataagttcatgtctgaaaggtgagaataaatacttaatattcattaggcaatattcagcaaagtaatatccactagtacatatttaatatttcatcatgaactgcgggtgtgaagagaaaagacaggctgggcacagtggctcacacctgtaatcccagcagtttgggaggccgaggcaggcagatcatgaggtcaggagttcgagaccagcctggccaacatggtaaaaccccgtctgtactaaaagtacaataattagctgggcatggtggcaggcacctgtaatcccagctactcgggaggctgaggcaggagaattgcctgaacccaggaggtggaggttgcagaaaccattatcacgccactgcattccagcctgggcaagagagcaagattctgtctccatcaatcaatcaataaaaatataaggaggaagcatttactgtgtatttatatgtctggtattatgtgaagcactttactatcttatcaaatcttcgggacagatcttcagttctcatgaccacaaaagaggatactaaagctcagacaggagaagagacgtggccagcctgtgtccccagggcctatggtcttaccactaggttacagtgtttccagatatcacatgttgtgagatttttgctttaaaatgaaccaaaaaaaaccaaaggtgaaaaaggcataagctattaaaaagtgggagaaacactaagagaaccttaagcatgtaactaaaaatattatggaaatgttattgaattcattagcaaa

SEQ ID NO: 550065 - DNA, 560 bp, Homo sapiens
ggtatgctttaaatatgyttatcatgtgtcaatcatatctcaatacaaacaggtttatttaaaaaaaaaaaacttgtttatgaacagttacagccagcatttttaaagcagctcattcaaaacaaacaagcaaacttcaaacttctgctttcatccacataactcaggcaaaaagagtttttattttatgtactcaaggaaacaccatgtttttctttgctgtgctttcactgggctgaacctgacaattttactggaagtcacagtcagatcttcaatctcttgacttctggctgacttggtcccaaagctactacaacaaaatctcctctgtatacatcatgtatctgagccatatttggcttgtttgttatcaagtaattgctttttatgggcatctgaataagctcaatcaggcacagagatgggggaatagactttacttgggatttacagaagtaaaaactaaattcttcatacttttatccatttgtcaatgattgctcagtaattgtttactgggtcaagttgataagttaccagttcccattcttaagata

SEQ ID NO: 550066 - DNA, 1370 bp, Homo sapiens
gatcaagagtaattaaggtaactgtgcagctctggatgaattaacaggttstgcgcttgactttctccatttgtgcaggtcggagatgtccgcccagaggttaatttctaacagaacctcccagcaatcggcatctaattctgattacacctgggaatatgaatattatgagattggaccagtttcctttgaaggactgaaggctcataaatgtaagttttatacaattcctcattgaaagcataattgtatttctcttaacctgtgaaatccccaaggattacttctcctgagcattctttcttctttacagaactctctgtcctctacctcccaaattctacaaaacatctcgcctccacacataggctgattgctcaggaatggtacaggagggccttggtgattctaattgatgaaagactaaaaaattcccatagtaggagaacatgaatcaatgtcaagctgagattgagaatttttaaaaagcatttgcttttttagctcctccaaactgtgaatgtttgaactatcaaaaatatgtataaaaataggatctggaactgttatttgaagaaccttcttttgtaacacagcagcatcttttcatcccagttggtttcctggagctgtggagagcagtgtatccatgtgtgctcataatgatggaccagaatagcctgcgatcatttctaacactgtgttctaggcatgaattgtgtttcatgctattggagtaattaagggtccagcacagagcaaggaaatgtaattctgtgagacgttgctactcaactccagtcataactgaatgctgactggccagcatggaacatccttgcttcattaggtagagttaacagttaacatggtaggcaggaactgctgcccagtctcagatcctgtcttggtaaccccgtaaatatccctgaaatgttcacttttgtcagagtgaattatccacagcactgtaaaatttttatgctcttaactggtccaggttagtgggacacattaggaaatataagagggcttagaatcagagaaacaaatgtagcaaagaaagtgtttttgttcctttaattatttcctggctgcttctatcctgacctgtcttggcattcatgatctcttgcaccaacttggtgctcttttgcaagaagggctttctatttttgttcctttagcaaaaatcattaattaaaccatatgtcctttaccccttaagtgagtagtaataattaaatactttcattcattcctttattgacatctgctcagtatttctttgtggaaaaaaagcacatggcatttatcaaggtatgctgtcattgattatctgagagaaggctgttgggtgtgaaatcacc

SEQ ID NO: 550067 - DNA, 975 bp, Homo sapiens
aactttccttaggggttagtgaggggattttcctttatttatacatttattttatatacccatgtcaaactcctcttatgcaccaggaaatgttctagctcctggagaatcagtaatgaacaagggtagcataatacatgtgaagtatctgggagatcgtaggaacttaaatgcaagctaacctcattgcactaataatcacagcagatctgctattaccattcaatcaaacttggttataaaaataattaatattatctactcaaaattactgtttcacccacaagacatatttatccccttatgcatttgtgattttaatacactggcagtctcaacagcctatcccaggttactgagaccaccaagataaaacgttagaatttccacacattkgtatgtattccctcttccatggtaccttccatctgacctcctccagcctctgaatttctatttaataagaagctgagtggaaaatcagaccttcacccctggaaatccatttgcttctgcctgtgtttacaaaactgatgatgccttgcaacaaactcgatcttcttactgacttctagtcacagtgtatttgggggattaacaatgataatttagttctaagccctattctcttgatttaaacagttgcaccaacaactgtgagcttcatttctttcctaggtctgtctacctcccgatgtactacacctgtgaaataggtcttgagaagtaccttattaggcattggggtgatatactgcttaaacaggagaggtctgtcctagttgcttatgaatgcctgaattccttagctgagttctggagccacccacagatctgctatctacccctgtggagctgacttggaagccgtgagttgcagacattgatttgctgacccttaatctgggtgcaatcaaacagaacaccctggtatgtggcttatgcactcacttggttcagctaaggacaaggacc

SEQ ID NO: 550068 - DNA, 1148 bp, Homo sapiens
cccagtaacaggtaactgctggcatttcctggcacacaacacagagtctctggcctttgtgactttacacccccttctctatcatttgctctgcctccactgaatcttcctctgaatgatcctcctgggcaaatcctcatcctttaagtcaactcaggggtcacctgctccaaaaatcttccccacatcccacccccaaactggttagatgccccactctgtggtctcagagcttccatgccttcctccccttatcacttcacattctggccacgtgttcgtaacctgactctcccaccagcctgccctttgagaaggggcagccgggcatgcatcgctgacatgcagtaataaccaatgattggatgctcagaggctgcagagccactttcccaaacaagagaggattgctctggactgagcccctgtccactgtgctccttaatctcgtggcatggagttatccccagaatgcgacagcggggagaggggaaggggactcagcatraatggcctggggctgaaaggcagccctggcccttgttgcagtcttgtccttggccactttccccttcagccacaagatacagatcctgccagccctcctaatgccttgccaggaagatgcagtctacctccatgtgggtccctcacctcgggcagcagcaaggaaagggaaagggcttggcatcctacagacatgggctccaagcaagcactgcaccagccagctgtggagccgggcaaaatgcttcgcctcagtgggagaagggagctcttcacctgaggaatgagaagaaaagtctcaccaaggggcaaggtggggtgatgaagtcagataacttatatcaagcccctagtgtgggcaactgaacttaggaagccaagatgccaacagtactctagtatctatgtacacactcggagtcacaactcatcacctactgcagcaaaagcttcctgctatctgttgtgagaagcagtgcatttgagggagaaacagggagttccacaaaaggatgacaaatatctctgaaggcaagtagagttaggggccacctcaccaccccattcccaggttgggcccacagtaggagccagaaggagatgctcatattgccgaatatcagagctgaacgtggcattta

SEQ ID NO: 550069 - DNA, 1148 bp, Homo sapiens
cccagtaacaggtaactgctggcatttcctggcacacaacacagagtctctggcctttgtgactttacacccccttctctatcatttgctctgcctccactgaatcttcctctgaatgatcctcctgggcaaatcctcatcctttaagtcaactcaggggtcacctgctccaaaaatcttccccacatcccacccccaaactggttagatgccccactctgtggtctcagagcttccatgccttcctccccttatcacttcacattctggccacgtgttcgtaacctgactctcccaccagcctgccctttgagaaggggcagccgggcatgcatcgctgacatgcagtaataaccaatgattggatgctcagaggctgcagagccactttcccaaacaagagaggattgctctggactgagcccctgtccactgtgctccttaatctcgtggcatggagttatccccagaatgcgacagcggggagaggggaaggggactcagcatgaatggcctggggctgaaaggcagccctggcccttgttgcagtcttgtccttggccactttccccttcagccacaagatacagatcctgccagccctcctaatgccttgccaggaagatgcagtctacctccatgtgggtccctcacctcgggcagcagcaaggaaagggaaagggcttggcatcctacagacatgggctccaagcaagcactgcaccagccagctgtggagccgggcamaatgcttcgcctcagtgggagaagggagctcttcacctgaggaatgagaagaaaagtctcaccaaggggcaaggtggggtgatgaagtcagataacttatatcaagcccctagtgtgggcaactgaacttaggaagccaagatgccaacagtactctagtatctatgtacacactcggagtcacaactcatcacctactgcagcaaaagcttcctgctatctgttgtgagaagcagtgcatttgagggagaaacagggagttccacaaaaggatgacaaatatctctgaaggcaagtagagttaggggccacctcaccaccccattcccaggttgggcccacagtaggagccagaaggagatgctcatattgccgaatatcagagctgaacgtggcattta

SEQ ID NO: 550070 - DNA, 551 bp, Homo sapiens
caggattgggtatctaataagaggaaagcgaggggtccgcagaaggtagtacataagcaataccaaagtgcagatttcttggtttctaatgatgcacagcgcgggcagcccagcctgggtagcccatgctggtcttgaaggaccagtgaagtccagcttcgcagcagcgcgatggcgggcttcatctgcctgggatgaagacccccgtagcctcgggctgacagctctggcgagaggggtggacaatgtgtgcctttgcagggctgggtgattgaagacttccaagtcccttccaagaggacttggatatgtgtgtgctggggggagattctctgacctcagggttgattctctgacagcaggggttgtgaatcccaacttcattttagtttgataattagggtgtgtgtgtgtgtgtgtgtgtgtgtgtgtgtgtgttggggttcttacttggtgaggaggatggatggatggataggatgtgtggaagtaaatatatcctaggaagaggaggatgyaatgtctttacatctgtggcttccctactgcca

SEQ ID NO: 550071 - DNA, 582 bp, Homo sapiens
tgtctctygtagaaagaataagaggaagtattttaaaaatacatattctataaatatattcttattgcccattcttagagttttcatttgttgagcatcagtgtaccaggtaatttacagacttctacaatcttcataattatggtgtaggataaatttttttccctagtttacagaaatgactattttttgtagttgtatgtgaaaattatagaacagttttggggatctgcacaatgttatgttctcacacagagaatttgcctttgtttcttgtatgcaggtaatttgaagaagaacaattcaatctctttgggaattaagttgatttgcagctctatttaagtttctagaagagctgttctatatctagttgccctttctccaatagcatagcccttcatgagtcccagctgaaagctaggagtgtttactaagctccttccctctccaatttttgttttctcagtctcatgaaccactgaactccctgctgaactctgctcaccttttcagcctttgagttgctgcttcctgtgtggctttttagtctgtcagccagcactttaaaaaaaaatctat

SEQ ID NO: 550072 - DNA, 721 bp, Homo sapiens
catttcggtaagaatgccatgcttgtcccttgagtcagactttcatcctcttcaatccaacccgttcattcacttgtgagttcagcagtcactgaacatctactctgtgctaggcaatatgctagatgccagtgacacaaagccaataggacaatattctgactacgacaaagtcagacttgagtagatagcatgtgctgtaaccaagcttaacgggcacacaggggagagcattcaaaagcagacccaggaaggcagggaaagcaaggaagaatgctcagaggctgtgatactcgccctaaaamaatgggagcaatttagatcataaactcatggaaagatactctaggcagaagaaaggccagtgcaatgcacataggtgaggaaaagcatcatatattctggcagcctcaaggatctccacttgactggagtacagtgtgcaagggtgagtgtcaggagataatattgcaagagtatgtcccaaattatgttacatggactaccaggactctgaaattatccctggattaagaagagatttcttgcccacatcactctgggaaatgccgtgtagagcatacgcatctcttgtggagtgatagtgcacactagcatattgaaggcctgcaggaggaaaacagccactctctccctttccccggctattcttagaaacacacattgaaaaaaatactgaaccagagaagtggggaggatc

SEQ ID NO: 550073 - DNA, 1624 bp, Homo sapiens
catttctgcctcattgtgaatcagaggctaacttaaagcctccttttattttgagaccaggtctcactctgttgcccaaggatgaagtgcagtgacataatcaaggctcacttcagccgtgatgtccctggcttaagtgatgatctcacctcaatcttccaagtagctggcactacaggcatgccaccatatccagctattattttattttttaattttttgtagagacagggtctcactatgttgcctagtctggtctcaaactcctaggctcaagcgatcctcccagtctggcctcccaaagttctggaatttctaggtgtgagccactgagcccagtcactcaaagcagcttgatactcaattttcctcccttgtaaaatgacattccctgtaagacattataacaaaataaaagctgcataaaataaaggctcttttgaagttataatcatgacctttgcatgaaaatctatttgtattttttaaatgaattctaataagatataaatagagacacttcttgaaatttggcacatttctgtggcactataaaataaaataactccaacaaacaccttcaagacaggttaaactacatcatagcacatttttctgtgaggttatggctgcacagagacctagactacatgataaaataatctactaaatactatgcaattactacaaagattaaaaatgttaaatttcttgcttgtcccaccataggcaacaactgtatgtaatttttatgtatttaaaaaagaaaaagagagtatgtgtgtatattttaatgaaaatggtactgacatacattccatccccaggctgtataccctgaaattgctttcataactgggatggatctgtgaggatccattcctcttttaagacgaaggctctgtgtgcagaaaactgaaagaaatgaaccagtcaatccaggggctgaagctccaacagaggggtttaaccaactgagttaactaccccagttcacaaatgccgtgaaacactactagagatagattcctgatatgctttataagacaaatggcctgtcacatgctgttcaaaagggctaagaacattttgctgaatcaagaagttaaactacccagctacttgggaggctgaggcatgagaatcgcttgaaccttggaggtggaggctgtagtgagccaaaatcacgccactgcactccagcctgggtgacagcgagactctgtctcaaataaataaataaatgaagttaaaatgaagaaaacaactcaattccgatacaaatcattttaccattaatgataattttttatgcaaaaattcaaatcatacttttagataattactcttcagataatgataatcttttacagacaaaccaatcaagaggaatcacagaaagaaaatttacggaaagctcaaatgtccacgtacaactcaatctgtcagattcaggaagctccttttttttttttttttttttttttttggagacagggtcacccaggctggagtgactcactgcagcctcgatctatgggctkgggtgatcctcatacctcgcctcccgagtagctgggagggactacaggcacatcccaccacgcccagatttgattttttt

SEQ ID NO: 550074 - DNA, 1468 bp, Homo sapiens
ggggtcatggctgtgtgtttgcttgtgtttgcatgtgggtgggtgggttcatgtattcacaggactctaatttaaaaaaaacaactaaaactaacatgtgaatttgaatgagcaattattatgagccaagtactatactactttacctacatttatccacttaaagtctcagggatttaaatggctttcccaagaatcattatgtattaagtctgatacttaaaaatctgccttggatactatcagtaccaatttctcctagagtcacctgaccaaatcactttcttggtgcggtgtcagcaggaaactgaatgtgtctctacccagggtcatccagagtcaacctaatccatgcagttccttgacatttttcaagatggtgtagagtgggctttgggatgcaggagagagggcatagcttcttccaggaattcccaaataattccagagtttttctctaagcatccttggggtttcttggttaatgatgaagctaaggtggggtttctttccaaccatcctgtctcagggagtgagtatagctgagtagtgagtacttccataatagatgtgactgctcaagacacaaagcaaatgctaggccaatccctccctttctccctagtgctcagagctgttatctgtgaaatgaagcaattggagttcatcttttataaaatttgtccagagttaccatcctataactatatttgcttcatgaaattccattttcacttcaatatatggactctgggtaagtgacatctctttgtacctaagcctgcattgaggaaaaccaggactatgtctatctcaccccttctcttgaaaagaacatacaaatctattggtaaatggtaaattaaaaccactctctgactttatttgtgaaggatgcttttgttgtcccaagataagcaatgccatttgaaaaatgactatttctccaggttgatgcattttttttaacttcagattgatgctttttgtctgctcaaactttcctacttataggaagattatttgtaataagaaacaaagaaagaaagaaagagagagagggagaaaaaaagaaagaaagagaaagggagaaagagagagagagagggagggagggagggaagaaggaaggaaggaaggaaggaaggaaggaaggaaggaaggaaggaaggaaggaaggaaggaaggaaggaaggaagggactgcactcatacctaargtgagccccactttctcctttgtaatgaaacgtcatcaatactgacttcttgttgggataattaaaggctgcccattgcccctttgccttcatccactagttagatgctgctgcagtcatctatgtccttgctttgtaaagaggttttttttttttcctcaaagagcttctacctacaatactgttctatcaggtaacacctggtttgaatgttgaatttgtttacatacaggttaagaaaaaaagcag

SEQ ID NO: 550075 - DNA, 1468 bp, Homo sapiens
ggggtcatggctgtgtgtttgcttgtgtttgcatgtgggtgggtgggttcatgtattcacaggactctaatttaaaaaaaacaactaaaactaacatgtgaatttgaatgagcaattattatgagccaagtactatactactttacctacatttatccacttaaagtctcagggatttaaatggctttcccaagaatcattatgtattaagtctgatacttaaaaatctgccttggatactatcagtaccaatttctcctagagtcacctgaccaaatcactttcttggtgcggtgtcagcaggaaactgaatgtgtctctacccagggtcatccagagtcaacctaatccatgcagttccttgacatttttcaagatggtgtagagtgggctttgggatgcaggagagagggcatagcttcttccaggaattcccaaataattccagagtttttctctaagcatccttggggtttcttggttaatgatgaagctaaggtggggtttctttccaaccatcctgtctcagggagtgagtatagctgagtagtgagtacttccataatagatgtgactgctcaagacacaaagcaaatgctaggccaatccctccctttctccctagtgctcagagctgttatctgtgaaatgaagcaattggagttcatcttttataaaatttgtccagagttaccatcctataactatatttgcttcatgaaattccattttcacttcaatatatggactctgggtaagtgacatctctttgtacctaagcctgcattgaggaaaaccaggactatgtctatctcaccccttctcttgaaaagaacatacaaatctattggtaaatggtaaattaaaaccactctctgactttatttgtgaaggatgcttttgttgtcccaagataagcaatgccatttgaaaaatgactatttctccaggttgatgcattttttttaacttcagattgatgctttttgtctgctcaaactttcctacttataggaagattatttgtaataagaaacaaagaaagaaagaaagagagagagggagaaaaaaagaaagaaagagaaagggagaaagagagagagagagggagggagggagggaagaaggaaggaaggaaggaaggaaggaaggaaggaaggaaggaaggaaggaaggaaggaaggaaggaaggaaggaagggactgcactcatacctaaggtgagccccactttctcctttgtaatgaaacgtcatcaatactgacttcttgttgggataattaaaggctgcccattgcccctttgccttcatccactagttagatgctgctgcagtcatctatgtccttgctttgtaaagaggytttttttttttcctcaaagagcttctacctacaatactgttctatcaggtaacacctggtttgaatgttgaatttgtttacatacaggttaagaaaaaaagcag

SEQ ID NO: 550076 - DNA, 1348 bp, Homo sapiens
  misc_feature 566, 567, 568, 569, 570, 571, 572, 573, 574, 575, 576, 577,578, 579, 580, 581, 582, 583, 584, 585, 586, 587, 588, 589,590, 591, 592, 593, 594, 595, 596, 597, 598, 599, 600, 601,602, 603, 604, 605, 606, 607, 608, 609, 610, 611, 612: n = A,T,C or G
  misc_feature 613, 614, 615, 616, 617, 618, 619, 620, 621, 622, 623, 624,625, 626, 627, 628, 629, 630, 631, 632, 633, 634, 635, 636,637, 638, 639, 640, 641, 642, 643, 644, 645, 646, 647, 648,649, 650, 651, 652, 653, 654, 655, 656, 657, 658, 659: n = A,T,C or G
  misc_feature 660, 661, 662, 663, 664, 665: n = A,T,C or G
gtgaagatacattggcacttctacttacatttctttgttctcacccttttttactcttaggtttcataatgtatgtaacactttttaggttaataatgaacacatctggggatatgtactcactgtgttttactaatcctaaaagtttgaagactactggtatatacaacttttggtcaatgaatcatgtatggtcctgtgacactttggagtatttacctttcatatcayaattgcaaaggtaagaggttttcatcttgatagaaggttccatgacttggagttctttgcacatctcacctaacactggtaaactaagtaaaaatgtggctgctggtactgtggctacagatactagttgtgttattataaataatagaaacataatcctgtggcatatgattgggcgataccttaagtgctttgcgtttttacctacaaaattgcatttgttctttgtcataatctaatggagaaggcagagaaagcattactatctctacatcccaactggctctgttgccaggctggagtgcattagagcaaccttggctcactgcaacctnnnnnnnnnnnnnnnnnnnnnnnnnnnnnnnnnnnnnnnnnnnnnnnnnnnnnnnnnnnnnnnnnnnnnnnnnnnnnnnnnnnnnnnnnnnnnnnnnnnnactcacacttccacccaaccttgcagctaagatatgactccatgacctgaactcagccaatcagacatgacagtgcataaatgcagatgctggtgtaccagtcaggcaggttgaggtgatctcccaggcagcagtagcagcagctctggcttaagtgtttactgcccgacattggcctggcgagctgtgctatctgtgcccagcaaagtggggaagagcaatggtatctcttgtggagcatttctgtgctgtgcattggtaagtattcctggagtacagcctccaaaactccaagtcaaagagaccctcccaaagataatattgtgagatttaataagttccttttctgcttcaactaatcagagtgggtttctgtagtgatcttgagcaagctgttcactctgagtctcagtttcctcatctgtaaaattgaaaatagtaatacctacaattgttttaagaatcagccctaatgtacataaaacatttattcccataagagcttgcaaactggtcaatatcatttgcattgtaaacagcagtgatccagacttcatacatctgtacaaatgactgaagtgaaagcttttcaataaatagcctttacaagtctttacatggccaggtactgataatacagaaaaagcaacaagaagaatttacattcagtacctttggatcca

SEQ ID NO: 550077 - DNA, 1348 bp, Homo sapiens
  misc_feature 566, 567, 568, 569, 570, 571, 572, 573, 574, 575, 576, 577,578, 579, 580, 581, 582, 583, 584, 585, 586, 587, 588, 589,590, 591, 592, 593, 594, 595, 596, 597, 598, 599, 600, 601,602, 603, 604, 605, 606, 607, 608, 609, 610, 611, 612: n = A,T,C or G
  misc_feature 613, 614, 615, 616, 617, 618, 619, 620, 621, 622, 623, 624,625, 626, 627, 628, 629, 630, 631, 632, 633, 634, 635, 636,637, 638, 639, 640, 641, 642, 643, 644, 645, 646, 647, 648,649, 650, 651, 652, 653, 654, 655, 656, 657, 658, 659: n = A,T,C or G
  misc_feature 660, 661, 662, 663, 664, 665: n = A,T,C or G
gtgaagatacattggcacttctacttacatttctttgttctcacccttttttactcttaggtttcataatgtatgtaacactttttaggttaataatgaacacatctggggatatgtactcactgtgttttactaatcctaaaagtttgaagactactggtatatacaacttttggtcaatgaatcatgtatggtcctgtgacactttggagtatttacctttcatatcacaattgcaaaggtaagaggttttcatcttgatagaaggttccatgacttggagttctttgcacatctcacctaacactggtaaactaagtaaaaatrtggctgctggtactgtggctacagatactagttgtgttattataaataatagaaacataatcctgtggcatatgattgggcgataccttaagtgctttgcgtttttacctacaaaattgcatttgttctttgtcataatctaatggagaaggcagagaaagcattactatctctacatcccaactggctctgttgccaggctggagtgcattagagcaaccttggctcactgcaacctnnnnnnnnnnnnnnnnnnnnnnnnnnnnnnnnnnnnnnnnnnnnnnnnnnnnnnnnnnnnnnnnnnnnnnnnnnnnnnnnnnnnnnnnnnnnnnnnnnnnactcacacttccacccaaccttgcagctaagatatgactccatgacctgaactcagccaatcagacatgacagtgcataaatgcagatgctggtgtaccagtcaggcaggttgaggtgatctcccaggcagcagtagcagcagctctggcttaagtgtttactgcccgacattggcctggcgagctgtgctatctgtgcccagcaaagtggggaagagcaatggtatctcttgtggagcatttctgtgctgtgcattggtaagtattcctggagtacagcctccaaaactccaagtcaaagagaccctcccaaagataatattgtgagatttaataagttccttttctgcttcaactaatcagagtgggtttctgtagtgatcttgagcaagctgttcactctgagtctcagtttcctcatctgtaaaattgaaaatagtaatacctacaattgttttaagaatcagccctaatgtacataaaacatttattcccataagagcttgcaaactggtcaatatcatttgcattgtaaacagcagtgatccagacttcatacatctgtacaaatgactgaagtgaaagcttttcaataaatagcctttacaagtctttacatggccaggtactgataatacagaaaaagcaacaagaagaatttacattcagtacctttggatcca

SEQ ID NO: 550078 - DNA, 636 bp, Homo sapiens
aatctttacaggagtcttcctcccacatcatctgggcttctcaatatgtttcagaatcgctcccctctgtctgctccatcagcctctgctgctgcccctcatctcttctcatcctaagactgcacttctcctgctttttccacccagttggttgwgtctcccatctcagtagatccatggctcctctctctcctccctcagtggatgctctgatccagtgatatgctagtaaatggcaataaactctcctcatttgtagtgtttgccaatctctatagttaattacacccaccatggcctatttgaatcttgccctgtgacatcgctgagcatggatttaggaagagatgggcagtagcacatcgttgtacagattttccaccatgcagacacaatagaggcaagtaacctcaagagaaaaggtagacaaataattaggaagtgatgagttctgaggatacatgacctttacttttaacctaatttgtttaattgcaagtctatatgatttaattgttattgatgactgtcttcacaaccagctcagaacaattgtgaaaatataattggcagctcccgtgagccaatacaggccagctccaacacagcactgcccagtgccccccactgggcctc

SEQ ID NO: 550079 - DNA, 2060 bp, Homo sapiens
agggctgctttcagatgaattgtttgaaggcaaacaattacatattgcctggtctcttcagttgtgactgatttcacctagatttaggggcacataatacctaactcttcacactcacccatccacacacacccctttcctttattttcatgccagtttgacttaggtttctgtttgtttacaaccgaaagaattctgggtgtaaatatgagaagcctaaagcccatggaagttgacacttgttcctggtcacacaactttaatgaagtgtacagaggaaagctagatctacacttcctagcacagcrtttcttcattctactgtctctgatattcatcagcaccacataacagctcagtcattgaatcactcatgtaaagtgcatttgacagaaatcatgagttaaaagttacttaggaaccaagaggctgtgcttgatttcctttttaatgttaatttcagactaattttctgttcaatttttaatgttaactgagggcactgaagtcaacagagataaggtaaaattcgtccagttctctggacttttgtccagtggcctttttattatacttctcaatccctcaaaactagaacccctcattttcatctttagctagattttgataagttgttgagccccaggaatcagttaggtgtctagattatagtttattacaatgcttacttggcttaagaccaaacagtggtgattgattttttgtctcccattggggcacacaacttggtttgctaatggtgacaaatgacattaagagacaaatcagtttaaattaatgaccctacgcttgcaaaatacctcagggagggtaagttcactctgatattgtggataaagtggtattcttgccactttcaattagtaaagttaatgaaaaaattcaaaggccatcacaacttcacacactctagtgaaaacacagactgctgggccctgtctccagagtactggattcagtatgtcttgggtagggcccaagaatttgtgtttctaacaatttccaagatgatgctgatcttgaaggtctgcgggccacactttgagaactgctgctctagatcaagaagaatccaagagaaatggggaattggtgagagatactaacaaagattcatagtcaagattaactttttgagtttgtgatagaaagaagaaaggaagttgttccaaatgccactcttgctatttcccataattgtcacattttcctttattaacccttcaaaccaagggttatgctaatagagtccttttaaaatatttgaaggaatgcctgtggcagtgggatgtgtcatttacaagtaagaaaacagagagacatctaatcatgattaatttcattttgacacttagttttctaggcctagaaatttaacttttttatttcactgagtggaggtcagtctttcagggatggtgtgaatacacaggagactgttaaataagtctgaatgcaaatttattagtgcacagtgagaaatacaacaggtagaaatattattctcatatcagtagataacagtttcttttacagtaagcaagcttttataaaaaccaaaataccgtcagcttacaccagaaagttgcttagggagtgtggccccagaataagaggcattagtttaatttgaggaatattggctataggttggtgtgatgcactcaccttcatttgaagatagctttccttaagggacatgcgtactgctaccctttcactagtcctcttagggctctaagaagtcctagacacaatctgcttgatttacctgtttttctgaaaaccaaattgaccaaatggcttccagaatatattaagatattcagacaagttgcaagcacatcttgctctggacattcagtcattctgttgtgtgattttgtacaaatagctctagtgatctattttgagatatcacattaatgtctaccaaacttaataggaaaaggaagttaactttcctctgtggatatgatgagaagacctaaaggaatatatgagaagttcataatttgtttgaatttcattctttactc

SEQ ID NO: 550080 - DNA, 589 bp, Homo sapiens
taagcaaactgccaagcctgtgagcttgaggaaggaagtttatgaagaaacactgtgcctccctgcagatgtctttcaggcttggagctccagacaggaagccctctgctgccctaaagaggaggtggtcaagagggaatttgcagaatagagcaagatggtgacttttgamacaagtcctttaaggcaggggtccccagcccctgggccacagaccagtaggaaccgggctgcacagcaggaggtgagtggtgggtgatcaagtgaagcttcatctgtatttacagccactccccatagctggcattaccacctgagctctgccacctgtcagatcagtggtgacattagattctcataggggtgcagaccctattgtggactgtgcatacaagggatctaggttgcacattccctatgagaatctaatgcctgatgatctgtcactgtctcccatcaccctcagattggactgtctagttgcaggaaaacaagctcagggctcccactgattctacattgtggtaagttgtataattatttcattatgtattacaatgtaataataatagaaataaagtgcacaata

SEQ ID NO: 550081 - DNA, 602 bp, Homo sapiens
gctgtttggcatatactgatacacagagtaggtcctagcatctaagaaacagttctctgacagtgatgctcttggctacagagcatgaaggagcaaacacagcctgtgtgcatgacttggtaaggggatcagagggaacatgagcagactactaatagcaactaggataatacttctctatctacattcttacttctaaatatttgttaaacttattcttttcttcttttcttttagcgacattgagtctttacattttgttttgccttgcttttatctctgatgtcaatccgacacaattaactaggatttgctaggagaagccctgaaattattttattagtattctctacttttcaggaaataaaatatgatgcaagggaaaataatatggatcattttaagaataaagagttaaaattattgattgctatatatataatatagatcatctaagttaaaatatacagctattgtaatttttgtcttagatcagtcaagttggtcaaaagtaatgtgaggagaaagccaagatgtaaaagacaaaagaaagcaaaataatttaaattaacagaattggaaatamattaatgcttttcaaa

SEQ ID NO: 550082 - DNA, 974 bp, Homo sapiens
tggcctaattcacggcacagtgtaatttgtgaaatcagtctaagttggacaaccaaagattcatctttgtattcaaatataaagggtatttagtttcagatatactcaataattcataaaggggagaacacatcccttgattgacttctcttttagcaactttctaattataagagttttacaattcacagtgggaattaataaaatatagaaaagtacatttagaaaaaacttctagagaaaggcagtgataacaacctagagtatttactcctaattcaaatatatgcttgtgtataatatatattcctaatagttacacacaatttaaaatagttaatgttatatttctatactttgtcattttttctaatttgtaatgcatatgtgaatctaattgctgaacaccaaggtgtggttgagtttgtgatataagtgcttccactgagctgattctctgttccagaacatgacaatttttgcgtgtttatgcccagtacgatgccaattcctggcatagaattatggtcaacataacttaagtttctgattgacctgatagattccctttctttaaaatgggagagaaacacaaaattattcctacacaattcacattttaaaatataaattagagtgtatatatgtgtgtgcatatatgtatgtatatggtactatagaatgcccagaaaatataaaaatacatatttcctgttataatgaagcacaaactatgttttcacttatttggacagaatgatttagctatgcttcactaaacattgattactggaagacaatgttatcatgtattatgacatctaatcttaaaaacagctctactattttctcctatttatggggaaacttaygcccagataaattaattaacctgcccaaggacacacatctaataaaaactcaaattgaatttaaacccgaaagaactgtagtaattattatggtatcaaata

SEQ ID NO: 550083 - DNA, 567 bp, Homo sapiens
tgttaacagactacctcatctgcttttcatcacaacatagtgaaaaaccaggccttcagaaaaagtaactcaagttcagaaaggttaatttccttgcctaaatgaatacaaatattattctaacaagtattaataattttataatattttcattttccaatttagaaccacataaaaagaaaaaaacaatacaactaaaaacttttcttcagatttacttcctgaaggactgcagatgtaatagaacacaaatttagacaagtgacattaaaataactagaaaaatttaagaaaccagaaatttaaggtaaacgtttatactaatttgtatatgtttggattcctttaattcaagaaccagaagaatgcctaagttattacgtttgtttgtytgtttattttggagacagagtctcactctgtcgcccaggctggagtgcagtggcatgatcttggctcgctgcaacctctgcctcctggattcaagcgattctcatgtctcatcctcctgagtagctggaattacaggcacgtgccacaatgcccggctaatttttgtacttttag

SEQ ID NO: 550084 - DNA, 567 bp, Homo sapiens
tgttaacagactacctcatctgcttttcatcacaacatagtgaaaaaccaggccttcagaaaaagtaactcaagttcagaaaggttaatttccttgcctaaatgaatacaaatattattctaacaagtattaataattttataatattttcattttccaatttagaaccacataaaaagaaaaaaacaatacaactaaaaacttttcttcagatttacttcctgaaggactgcagatgtaatagaacacaaatttagacaagtgacattaaaataactagaaaaatttaagaaaccagaaatttaaggtaaacgtttatactaatttgtatatgtttggattcctttaattcaagaaccagaagaatgcctaagttattacgtttgtttgtttgtttattttggagacagagtctcactctgtcgcccaggctggagtgcagtggcatgatcttggctcgctgcaacctctgcctcctggattcaagcgattctcatgtctcatcctcctgagtagctggaattacaggcacgtgccacaatgcccggctaatttttgtayttttag

SEQ ID NO: 550085 - DNA, 572 bp, Homo sapiens
attgcggcactattcacagtagcaaagacttggaaccaacccaaatgtccattaatgatagactggattaagaaaatgtggcacatatacaccatggaatactatgcagccataaaaaaggatgagttcatgtcctttgcagggacatggacaaagctggaaatcattatcagcaaactaacacaagaacagaaaaccaaacactgcatgttctcactcataagtgggaattgaacaatgagaacacatggacacaaggaggggaacatcagataccrgggcctgttagaggggtggggggctagggtagggatagcattaggataaatacctaatgtagatgatgggttgatgggtgcagcaaaccaccatggcacgtgtaaacctgtgtaacaaaccttcacattctgcacatgtgtcccagaacttaaagtataattaaaaaaaaaaaaaaagatttttagcgaaatagcattgtgaggcttattttaatgcagatttaaaaaaacttgcctgaatgtttgaaacatggaatatgtttaataaatggtcgatattatgatgggtagaca

SEQ ID NO: 550086 - DNA, 889 bp, Homo sapiens
gatccttttcccaaacttcctctcctttctctagactgttcatgccacttcaaatcctaatttgagaattagccagagctatgaggggggatatgtaaaggaagatttgatggatctgccaaagaaaggagatcaaaaacacaggccattaacctgtcggtgcctcagggtcccagctcatcctgtctccttcacttcttcagcagaagctttcccccatttttctgttctttactctcctcttgcttcttatcaacctaacccccagccccacaccccaagtgaatggcttttggcttaatgaatgtttactaatggataagctactgtcctacactttcagaataaatgttgagagtctgacaaatagtcacagcttttacaatatacttctggggcatatcctaaggaaccaatcagaggccaaatatttatgttcactgatgtgcattacaatattacaatctgagatgctcatgcaacaaaatactatccaaccatcagaataacattttctgggaatatttaataacagagggaaatgcttgtgattgccatcatgaaaatcaaaataaaagattctaagttccaaatagtgttatgtatgtatgtatgtatagatacatacataagacacaatgaagcattgaggttagaggcatgaggcttggagttagactcttttagtggcacttttactgttttttagttgagattctctgaaaattcaytgggcatcaggatgtcattataaaatcagaggaatagaatttgtctaatagaacatttttgtgaatttatatgagagaccctttgtcaaatgactactctagtcctacccacagcaggaattcaataaatggtatatacatatataaatttaaaatat

SEQ ID NO: 550087 - DNA, 889 bp, Homo sapiens
gatccttttcccaaacttcctctcctttctctagactgttcatgccacttcaaatcctaatttgagaattagccagagctatgaggggggatatgtaaaggaagatttgatggatctgccaaagaaaggagatcaaaaacacaggccattaacctgtcggtgcctcagggtcccagctcatcctgtctccttcacttcttcagcagaagctttcccccatttttctgttctttactctcctcttgcttcttatcaacctaacccccagccccacaccccaagtgaatggcttttggcttaatgaatgtttactaatggataagctactgtcctacactttcagaataaatgttgagagtctgacaaatagtcacagcttttacaatatacttctggggcatatcctaaggaaccaatcagaggccaaatatttatgttcactgatgtgcattacaatattacaatctgagatgctcatgcaacaaaatactatccaaccatcagaataacattttctgggaatatttaataacagagggaaatgcttgtgattgccatcatgaaaatcaaaataaaagattctaagttccaaatagtgttatgtatgtatgtatgtatagatacatacataagacacaatgaagcattgaggttagaggcatgaggcttggagttagactcttttagtggcacttttactgttttttagttgagattctctgaaaattcactgggcatcaggatgtcattataaaatcagaggaatagaatttgtytaatagaacatttttgtgaatttatatgagagaccctttgtcaaatgactactctagtcctacccacagcaggaattcaataaatggtatatacatatataaatttaaaatat

SEQ ID NO: 550088 - DNA, 543 bp, Homo sapiens
agtgagctgagatcgcaccactgcactccagcctaggcgacaagagcaaaattctgtctcaaaaacaaaaacataccaaaaaaaaaaacccccatatttgaatcaatgtgtaatgaggcttacccaggaggatatgatgtcctgaaaggtaaataaagaagtttcaaaaggagaatgtgatcaactgtatcacatgccaccggtaatatgagataagagcaaatattggccatcagatttttcgatatgaatgtccttgttaattttaacatttgatataagtaaagtggttttaaaaaggcttttttcctttgtttttcctttgaagaatatataaatagcagcatgattcaggaaaytgcttttattactctgtaaaagagaaagctaggtcatcaactgtgaggagaatagagaaggtgtaaagaggtagagggaagtatggtgccacagtctaggaaaggagaagactggctcaaacagaaaaaatgtagtgtgattacctggcagcattaaaggctcactggagaatagtgatcatga

SEQ ID NO: 550089 - DNA, 561 bp, Homo sapiens
tttatagaggtggaaactgaggcttccacccctgctgcctcccatcactctcctctttcgctgcagcccaggcctactttatctcctttcccttgcrtgcctctgggtctttgcatttgctgttccctctgcctggaacattctttcctaagatgcaacacagctcactccctcacctcttcagatgtttactcaaatgtcctccctggacacctgatggaaaattgcaaccacctcatcttccagcatttccgatctcctatgtatattgttctccaagcactcggcacctctgactgctcttgtgctggtttattttctcccccaacaaggaggttggctccaccatggccagggctttagtctggcttgtggctgcatcccagctcttggcacctattcagaactcagtagagcactactaagtgcagtgtttggcacatagtaagccctcaggccatattactgttgctgtcattgagtcaatcaactaagccacactccacaaaggcctcctgtgtgataagctctagggacagaaacatgtcagacactgaacac

SEQ ID NO: 550090 - DNA, 2458 bp, Homo sapiens
ttcatgagcactttaaaataattaagtacagctgttcacataggcagttatcgatactaatttaaataagaaacagttttgcatgttacatcattatctgtaatcttctgaaaataacagggacaaaagcagtatcatccttgcctaatgtcatctgctagtgaggggatgcagacctaagtgactaagttgattccggctgagaatcaaaggaaaaggtccatagattcatccttgctttcaaagagtggcattgtgagaatgagtaagaggaaatatcacttagtattaacagatgataataagtagtgtttcctactaattgattatttaccatatgctagtcctatgctaagagtttagagatacgtgagagtcttgtgagtccggatcatcattctccccagtgttcagaggggaaggctctgcatggttgagtatcttgcccatagtcacagaaccagtatatgttgggacttggcctcagacccaggtctctccagcttcgcagcctgtgttcatcatatgatgtatcacttacaggaaactccaaaactgagctgaagtctttgacagttgcaggagtcagcatcctgctggagccgtggcctcacagtcctgtctgtgtccttgggagggctctgtggcagccccaggtcccacttgccaggagtcccttcttcacccatgggcatcctgagaacagaggaggctgagggggcagcagcagagggttaacagctcttcagcaggcactgggtccacatgctggagcccttttttgttgatttattgtgtttagacatcagatgcgaaggtttccatgagtcaccttcctcagtgaggaatcatgaaggaatgatcggtctggcctgcataaggccctactcttgccttggtgttcattcattcattaatcatatttttttatacatgattcatatttccccagtccaatacattttatttgtacatattcttttaaaaatcataattcttttgttcacacatatttacacttacatataatattgttttatatctttcattttgctttttactgattaactctgcataaatataattgtactagtcatactaaggtgataaagataatatgctaatttttaataatcaatagaaacattttaattacttcataaaatcatcaaggtatatgtcatggtaattatattattaatgctatatacttagaaataatacagtttcttcatataacacttataattaacaaagtgtcttaatcaaataatcttgttaacaggcattacagggagcagcttaacaatatctttcatttgtatagttccttagaattttcaagtcacctacagaaacatcttccaacaagctataattgggcagagcagttagtattatccccatgttactcataaagaagctgagattacaagcactaaaatttgtatccaatatcagcatagtctggcaattaaggaaacagaattagaactcagggactcacgggcactttcttaccccacacacagacagcttaaaataataacagcatattaaaataagaatctctcgtagtacatttgagtgtttgggaaactaataataagctgaagctgctgaagaatctatttcttttagacaggcttttctaacatctttgtgaggactaactgaattgatgtgtgaaattgcataggacagtggtggccctatgcatagtagagatttaatgcttattttaaaattcagagactcatttcagtatctcgtaatttaaaataaagatttgatgataaaaacccactaaaacagaaacgacaaaatgacaaatttggaaaaataacaaatttctaacagtcttcttaaaaatagttgttgatgagtcttaccttgacagatttttttctgcttatggctgtcaatctgggtatttcatactcaaccacaactatccatgtgcttaacattttgcagaccaggatatcacatgagcaccatcactgactgtgactgttagatttaactaatgtgacygctaaaaatcaaagtagagtgttggaaatttttcagtaatgtcattaattcctaagttatttatgaaacatatttccagcatgtgagtggactccaagccacagatttcagtcactttcatgtatacctaaggaacatgttatgaaaactgatcattttatctgaaaatactcatttttgattacttaatataatacttagctagaatgccctcaaagacagggaatccacatcaaacttaagtgactgtctttcaataagatggagcttttatacatgaacacaccacacacacacacaaattgcagaggaatgctgtaaaaaataaatgatttataatcttaaaaatacattatatatattaactagtttaattcttaccaagattgccagatagatataatttttctactttacaaag

SEQ ID NO: 550091 - DNA, 2458 bp, Homo sapiens
ttcatgagcactttaaaataattaagtacagctgttcacataggcagttatcgatactaatttaaataagaaacagttttgcatgttacatcattatctgtaatcttctgaaaataacagggacaaaagcagtatcatccttgcctaatgtcatctgctagtgaggggatgcagacctaagtgactaagttgattccggctgagaatcaaaggaaaaggtccatagattcatccttgctttcaaagagtggcattgtgagaatgagtaagaggaaatatcacttagtattaacagatgataataagtagtgtttcctactaattgattatttaccatatgctagtcctatgctaagagtttagagatacgtgagagtcttgtgagtccggatcatcattctccccagtgttcagaggggaaggctctgcatggttgagtatcttgcccatagtcacagaaccagtatatgttgggacttggcctcagacccaggtctctccagcttcgcagcctgtgttcatcatatgatgtatcacttacaggaaactccaaaactgagctgaagtctttgacagttgcaggagtcagcatcctgctggagccgtggcctcacagtcctgtctgtgtccttgggagggctctgtggcagccccaggtcccacttgccaggagtcccttcttcacccatgggcatcctgagaacagaggaggctgagggggcagcagcagagggttaacagctcttcagcaggcactgggtccacatgctggagcccttttttgttgatttattgtgtttagacatcagatgcgaaggtttccatgagtcaccttcctcagtgaggaatcatgaaggaatgatcggtctggcctgcataaggccctactcttgccttggtgttcattcattcattaatcatatttttttatacatgattcatatttccccagtccaatacattttatttgtacatattcttttaaaaatcataattcttttgttcacacatatttacacttacatataatattgttttatatctttcattttgctttttactgattaactctgcataaatataattgtactagtcatactaaggtgataaagataatatgctaatttttaataatcaatagaaacattttaattacttcataaaatcatcaaggtatatgtcatggtaattatattattaatgctatatacttagaaataatacagtttcttcatataacacttataattaacaaagtgtcttaatcaaataatcttgttaacaggcattacagggagcagcttaacaatatctttcatttgtatagttccttagaattttcaagtcacctacagaaacatcttccaacaagctataattgggcagagcagttagtattatccccatgttactcataaagaagctgagattacaagcactaaaatttgtatccaatatcagcatagtctggcaattaaggaaacagaattagaactcagggactcacgggcactttcttaccccacacacagacagcttaaaataataacagcatattaaaataagaatctctcgtagtacatttgagtgtttgggaaactaataataagctgaagctgctgaagaatctatttcttttagacaggcttttctaacatctttgtgaggactaactgaattgatgtgtgaaattgcataggacagtggtggccctatgcatagtagagatttaatgcttattttaaaattcagagactcatttcagtatctcgtaatttaaaataaagatttgatgataaaaacccactaaaacagaaacgacaaaatgacaaatttggaaaaataacaaatttctaacagtcttcttaaaaatagttgttgatgagtcttaccttgacagatttttttctgcttatggctgtcaatctgggtatttcatactcaaccacaactatccatgtgcttaacattttgcagaccaggatatcacatgagcaccatcactgactgtgactgttagatttaactaatgtgaccgctaaaaatcaaagtasagtgttggaaatttttcagtaatgtcattaattcctaagttatttatgaaacatatttccagcatgtgagtggactccaagccacagatttcagtcactttcatgtatacctaaggaacatgttatgaaaactgatcattttatctgaaaatactcatttttgattacttaatataatacttagctagaatgccctcaaagacagggaatccacatcaaacttaagtgactgtctttcaataagatggagcttttatacatgaacacaccacacacacacacaaattgcagaggaatgctgtaaaaaataaatgatttataatcttaaaaatacattatatatattaactagtttaattcttaccaagattgccagatagatataatttttctactttacaaag

SEQ ID NO: 550092 - DNA, 2458 bp, Homo sapiens
ttcatgagcactttaaaataattaagtacagctgttcacataggcagttatcgatactaatttaaataagaaacagttttgcatgttacatcattatctgtaatcttctgaaaataacagggacaaaagcagtatcatccttgcctaatgtcatctgctagtgaggggatgcagacctaagtgactaagttgattccggctgagaatcaaaggaaaaggtccatagattcatccttgctttcaaagagtggcattgtgagaatgagtaagaggaaatatcacttagtattaacagatgataataagtagtgtttcctactaattgattatttaccatatgctagtcctatgctaagagtttagagatacgtgagagtcttgtgagtccggatcatcattctccccagtgttcagaggggaaggctctgcatggttgagtatcttgcccatagtcacagaaccagtatatgttgggacttggcctcagacccaggtctctccagcttcgcagcctgtgttcatcatatgatgtatcacttacaggaaactccaaaactgagctgaagtctttgacagttgcaggagtcagcatcctgctggagccgtggcctcacagtcctgtctgtgtccttgggagggctctgtggcagccccaggtcccacttgccaggagtcccttcttcacccatgggcatcctgagaacagaggaggctgagggggcagcagcagagggttaacagctcttcagcaggcactgggtccacatgctggagcccttttttgttgatttattgtgtttagacatcagatgcgaaggtttccatgagtcaccttcctcagtgaggaatcatgaaggaatgatcggtctggcctgcataaggccctactcttgccttggtgttcattcattcattaatcatatttttttatacatgattcatatttccccagtccaatacattttatttgtacatattcttttaaaaatcataattcttttgttcacacatatttacacttacatataatattgttttatatctttcattttgctttttactgattaactctgcataaatataattgtactagtcatactaaggtgataaagataatatgctaatttttaataatcaatagaaacattttaattacttcataaaatcatcaaggtatatgtcatggtaattatattattaatgctatatacttagaaataatacagtttcttcatataacacttataattaacaaagtgtcttaatcaaataatcttgttaacaggcattacagggagcagcttaacaatatctttcatttgtatagttccttagaattttcaagtcacctacagaaacatcttccaacaagctataattgggcagagcagttagtattatccccatgttactcataaagaagctgagattacaagcactaaaatttgtatccaatatcagcatagtctggcaattaaggaaacagaattagaactcagggactcacgggcactttcttaccccacacacagacagcttaaaataataacagcatattaaaataagaatctctcgtagtacatttgagtgtttgggaaactaataataagctgaagctgctgaagaatctatttcttttagacaggcttttctaacatctttgtgaggactaactgaattgatgtgtgaaattgcataggacagtggtggccctatgcatagtagagatttaatgcttattttaaaattcagagactcatttcagtatctcgtaatttaaaataaagatttgatgataaaaacccactaaaacagaaacgacaaaatgacaaatttggaaaaataacaaatttctaacagtcttcttaaaaatagttgttgatgagtcttaccttgacagatttttttctgcttatggctgtcaatctgggtatttcatactcaaccacaactatccatgtgcttaacattttgcagaccaggatatcacatgagcaccatcactgactgtgactgttagatttaactaatgtgaccgctaaaaatcaaagtagagtgttggaaatttttcagtaatgtcattaattcctaagttatttatgaaacatatttccagcatgtgagtggactccaagccacagatttcagtcactttcatgtatacctaaggaacatgttatgaaaactgatcattttatctgaaaatactcatttttgattacttaatataatacttagctagaatgccctcaaagacagrgaatccacatcaaacttaagtgactgtctttcaataagatggagcttttatacatgaacacaccacacacacacacaaattgcagaggaatgctgtaaaaaataaatgatttataatcttaaaaatacattatatatattaactagtttaattcttaccaagattgccagatagatataatttttctactttacaaag

SEQ ID NO: 550093 - DNA, 504 bp, Homo sapiens
tctttattgccacaaaataaaggaaactccaaactcagcctctctgagaccaaattataaaaaaaagtcatacatagaatttgagaatatcatagcaccattaagagggaaagaggaaaggagattatgyggttttgcattgataatatactgtgatgtataagtattaaaacatttttgtatctctgaatagaaactttagtcaggcctctctccttgaactcctaagatggagccaaacaaaattttctatttgctttccctactatttttatttttccttctagaaactcatcaatttgaatatagtcaatatgagtcattttataagcatccttatatataaatttaaattttatagtgtttgatacatattcatgttctattacatgtatccatatagatacaatcttgtttatgaaaattgacgtagtatgctataagtgaacaaaactatatgaaagaataacagacaatactgcttgatagaaaaagttttaaata

SEQ ID NO: 550094 - DNA, 557 bp, Homo sapiens
agatttaaattggaagccagttgcaaaggcagaagcaagatgggatgtgaagctgtggcaatggtccaggtaagagatggtgggcaactgggctgtcatggtaataacagaggtgagggaaagytgtcagactccacatatactctgaagctgtgactgacatgatctgtctaacgactgagttgacaggatatgcctatggattgatcgtggagtgtgaaggaatggaagtcattggtaactccacgcatattggctcaagccaacaattggtaaatgctgtgatatttactgagaggtggaaacccaggggtaataggtttggtgatgggaaggatatggagataataaacttagttttggatgtgactatttgacatccgaaaggaaatggagtctggtgctcagaggggaacttgaaacatatgtcagggatggataataacctgaatatatctaatcccaaccagaagaaaatttcacaatgaattaaaaagttctatatttcctagcagatttaattctttattctttcagaaataagtgaaaaatagaca

SEQ ID NO: 550095 - DNA, 557 bp, Homo sapiens
agatttaaattggaagccagttgcaaaggcagaagcaagatgggatgtgaagctgtggcaatggtccaggtaagagatggtgggcaactgggctgtcatggtaataacagaggtgagggaaagctgtcagactccacatatactctgaagctgtgactgacatgatctgtctaacgactgagttgacaggatatgcctatggattgatcgtggagtgtgaaggaatggaagtcattggtaactccacgcatattggctcaagccaacaattggtaaatgctgtgatatttactgagaggtggaarcccaggggtaataggtttggtgatgggaaggatatggagataataaacttagttttggatgtgactatttgacatccgaaaggaaatggagtctggtgctcagaggggaacttgaaacatatgtcagggatggataataacctgaatatatctaatcccaaccagaagaaaatttcacaatgaattaaaaagttctatatttcctagcagatttaattctttattctttcagaaataagtgaaaaatagaca

SEQ ID NO: 550096 - DNA, 557 bp, Homo sapiens
agatttaaattggaagccagttgcaaaggcagaagcaagatgggatgtgaagctgtggcaatggtccaggtaagagatggtgggcaactgggctgtcatggtaataacagaggtgagggaaagctgtcagactccacatatactctgaagctgtgactgacatgatctgtctaacgactgagttgacaggatatgcctatggattgatcgtggagtgtgaaggaatggaagtcattggtaactccacgcatattggctcaagccaacaattggtaaatgctgtgatatttactgagaggtggaaacccaggggtaataggtttggtgatgggaaggatatggagataatawacttagttttggatgtgactatttgacatccgaaaggaaatggagtctggtgctcagaggggaacttgaaacatatgtcagggatggataataacctgaatatatctaatcccaaccagaagaaaatttcacaatgaattaaaaagttctatatttcctagcagatttaattctttattctttcagaaataagtgaaaaatagaca

SEQ ID NO: 550097 - DNA, 714 bp, Homo sapiens
tatatatacaggcacctacataagtggtatgatttaagcatgacaataatgagataggaatcatactattattccatttttacaggtgaagaaatcaaggtctacaaaagaaatcaaatcatatgtccaaattcatatgggctttgatttttgaactttcaaatttttgtctttgcttaataccttttgttttaaaataatttgactcataagaagttaaaaaaagaagtaaaatgaatgaccatgctattttcaggcaactttccccaatgattatatctaacttaacctagtaygttgccaaaatcaggaaatggacattgtttccataccattaactcaggttcagaccctatttatatttctaaggattttacatgtacagatgtgtttgaatgtatgtgtgatgtgtgtatatagatctatgaagtgtggatttatgtaaccattaccataatctggatgcagaactgctctatcaccacaaacaaagtacatgttttcacattaaccctcactaatcacatcttccaaccaaccctaacccttggcagctactgttctgttctccagcactgggattatgctatgtaattcaggtatttttgaaaccaagcttatgaggttgctaaataaataataatgtttataaactattattttcagtctttataaatggcatactgtagcacatattccaatgtgctatacatg

SEQ ID NO: 550098 - DNA, 635 bp, Homo sapiens
gggatcagaagtaaggatctatgatctggaaataggtcartacatatgtctgttataaagaagagtaaatgtcattgagataagactgttgccctgttgaagagtctctccagggctccctttatgtccctgttccttaggctataaatgaagggattcagcaatggggtgatcaccgtgtacatcacagaggcaattacgtccttgtcactggaggcactggatgaggggagaaaatacagtccaataattgtgccataatacagagacaccacagagaggtgagagccacaggtggacaaagctttgaagatgcccttagtagatggagccttgaggatggtgaccccaatgtggccataagagatcaagatgcatattagtggtagagtaatgactgcctgtcccactgtgaaaatgaccagctcattgagggagatgtctgagcatgagagcttgagtagggcaacaagatcacagaagaaatgggggatggtgttgtcagcacaaaaggacagctgggccaggaggagagtgtgagacagggcattggtacaggagaggatccaggacacagtgactagtaagttacacagtccctctttcatgatagtggtgtagcggagggggtgaca

SEQ ID NO: 550099 - DNA, 1289 bp, Homo sapiens
gtggacttctgtttacaaatccaccctccctcctgaaccatgagcacttactttcttgctctcttggtcctcacacccccaacccccaatccccaagctgaattaaagggcagatgtaaatttcagaatccaagagacaacacagtataggagaattgttttaactttcttggtattactagctcccagcacaaaacctaggagccagcaggcactcaataactgtatggtcaatcaaccagtacatctgtttaatgtaagtacggtaagcttgcatgtagtttcttagcagtatgtcaatgtttatggttaactgcaatctcatggtctatttcatgtgaccttctataagaagaatctgtcagttctacttgtagtgttgactttccttaatgtaaatttaggacctgacatttatgtaacaaacccttccaaaattgggtggcttaaaacaacaacaatttataattgtcacaattttgttggttgatgaagttcagctgggaagttactcatgcggtcactcatgcaggtgggagcttggctggggctagaatgttccaaatgactcctcatcctctggggtctctctccttgtggcttttcatcactcagtattctaccctgagtttctttacagccaaggggctggcttctaagagggagtgtcacaagaagacaagcctcgatgtacaagaacctattaagcctctgattgctccaaacttactaacaccttgttggttaaaacaagtcacatgatcaagcccagcatcaaggtggaagggaactatataaagccatagacactgggaggtagttcactggggactgccaatgtcacagtctaccacatttatccttattagatgtcattgttacacttttgagagggaagwtttttgctcacatctttataaaaattcaaatttttcaggatatgggctccatgatgatggtgatgacaatgatacatcatttactgtctacagtatcctaggtttttcttttcatgattaaaatttatataaaaatcccaaggacagaattattgctcccactgaagagataagaaaaatgagattcacagagcctcaataagtttcttagtctcaatcttagctgaaggcaagatttcaacctaggtctctttaattccaaaggaggtgtttttttccactgtaccatactggctctgagtctacttttgactcaaggaaacatataattccctgcagaagagtgtttttcaaattctaataaggaactcaaatagttagacaatgcaa

SEQ ID NO: 550100 - DNA, 679 bp, Homo sapiens
tggwtggtttcataaattaacttgaaaattaaattgttacaattataataattatccagtcttccaaaagtattcatctggagtgtaagcactttaaacatgatcttctgttctcctaaaggtgctggagcatgggaaggctagcccgctgccagccacatggagtgggaggatcacggagcctgaagctgagaggccacagcactgcacctgacatatattaccaacttgccatgcaacttcatctcattgactccgcattcccattttttggagtggatcacctgcagttcccttgacaactgagtgtctgtatttttctgtatcgtccagtgtgatgacaactgtctacacaaccaagtctggccagcactgaacacactcagcttccccacagtgctccaagtctcaaagcccaaactgcagccaaatcttggcagtgttgtcctctggtcaggccagagcacctttctgaaggacctttctgaacatttttagaccattcgatgaatgaccctaaattcttggcgcataattgggactgctgccatcacgccagaaacatttattaagcacttactgtgtacagtgctcaagacctgccatcttgtttccatcttgacaacaatgatgcacagtaggggttgtcattccccgtttcagagaagagtaaagctca

SEQ ID NO: 550101 - DNA, 963 bp, Homo sapiens
agtttcagctttcaacatatggctagccagttttcccagcaccatttattaaatagggaatcctttccccatttcttgtttttgtcaggtttgtcaaagatcagatagttgtagatgtgtggcattatttctgagggctctgttctcctccattggtctatatctctgttttggtaccagtaccatgctgttttggttactgtagccttgtagtatagtttgaagtcaggtagcgtgatgcctccagctttgttcttttggcttaggattgacatggcaatgcgggctctyttttgattccatatgaactttaaagtagttttttccaattctgtgaagaaagtcattggtagcttgatggggatggcagggaatctataaattaccttgggcagtatgaccattttcctgatagtgattcttcctacccatgagcgtggaatgttcttccatttgtttgtatcctcttttattttgttgagcagtgttttgtagttctccttgaagaggtccttcacatcccttgtaagttggattcctaggtattttattctctttgaagcaattgtgaatgggagttccctcatgatttggctctctgtttgtctgttattggtgtataagaatgcttgtgatctttgcacaagaattttgtatgctgaggagtcatttttaaaataaatatattgcaaatgaattttcccagtcagtgaaaagtctgactgaaagctgtcaactgaaaaatcacacaatttataaatttagaagggagattttattttttataaatggttacagcctgcaaggtggccattccgacagacagggaggcataccctcctgctgaaacctgaaaagtacgtttccagggaggggaggggggaacagggatttatgttgatgtggtgggccacatatacatattcaacagggaataggaggagctctgaatattcatgaagg

SEQ ID NO: 550102 - DNA, 641 bp, Homo sapiens
tactagcttctaggtgtcaaagaagtctcaaataaaaaaattagaaaaaaaattaaaattctacaataaattttctctttagtggaagaatatgtaaatacttatttgtaatggggaatgaaaaaataatgcctattaacactatccttattgaccattctactaactagccaaggcagctcaaaaagataagaaaaaatataaaagcctctagaatgtaaagtggaaaataaagctatttttcatagatgacttacctaccaagaacagaaatataaatcaatgtgaacttcacaagtttttagatataagatcaatatacaaaaatattatatatgtatgttaccctaaaataaatggaagttgcaactaaaacacactactaacaatgatataaaaatgagctagggtctaagaatgcatttaaagaaagatgtacaaaacaattgarctggaaagtacaacattttattgacattcactaataaagtcctaaatgaaagcttagaccaggttcataggcttgaacagtttaataatgaaagtcagctcaaaataatctatgagataaatatagcacattatccaaaacaggtgtttatctttttaagaaaattggacaagctgattttttaattact

SEQ ID NO: 550103 - DNA, 543 bp, Homo sapiens
actgttgagaagtttgtatgaccatatatactacaattatgcaaaaataaaattatattttagtaaattatattatttaaccattacattacattagtaaaagatgaaatcacattatagttctttgaaatcatgatgatttaaaggataaactagaaaatgctttctctattgtcaagaccacccaaggtagttcattctctctttaaaaagccatgcctgggttaccagctcattcttctgattcattccctgtctcttaccttatttccttcacarcactctttctagagtaattagaaagtggggaaagtaactattaaataaagtaattttactctttttaaaattttttgcagctcattgtccagtagagcatcaacattgagttcccaactgtgcatatgaggttctgccaaactctcttcttccaacattccttgttttattcctgaaaacacttccaaacattttatgttctaacactagacatcctatagttctctacacacttctttgtttcccaaatccataaattgactt

SEQ ID NO: 550104 - DNA, 657 bp, Homo sapiens
caatgtatcctccacctgccttctttttgatacttgttgcactgtatcataatggttgccttaccttttatcctctctagtctgtggccccttgagggcacaaaggatcctatttgaacgtgcattcctagracctcacccagtactggcatattgtagattctcagtaagtttgatgaatgaataaatgaggtgaatgagaagatggatgcacaagataacaggggaacggaaaagaatcatagacaggggagatgggaccaagatttctatggtagccaagaaggaaggagttttcattttattaggaggtgcatagacaagatgttgtgaagtacttcagggattctatgagatccgtactgaccaaagacattctcagtctctgctattaaaaataaaacaaaacaaaacacctttttccctagaatatatttttgtggcatagagtagaccctcaataaataaataaatagttattgaattttaaaagtgaatatggaaggactattaagattagttctacctaagggtaaagcaattaactaataagaatagttttttttaactgagtagttttattttacattattttatcgctacaactatgaaatttgaaaatgaggaaattgaggctcagagaattgtgtcctattc

SEQ ID NO: 550105 - DNA, 524 bp, Homo sapiens
ctggatggaaactcccacccttccccagtaccctgggatcttcagatgaaagcctgaaagaatgcaaagccacaagaaagtggccctaggtcacccgctcctccctcagtggagtcaaggctgagaattcttagctaatcctaaataaacctcacatggctgaaatgtcacggccaatttgcttccccgtgtggactgcaaccatctggttctgcctgcaaccagcctttctcctcctgggcacctgcctcagccacacagctggaagatctggcaggcaggagcattcagagggcacagtaggaggtgcacttctggsggggagggagctgggactcactctgacaaggcacaagttgcccatatgtcagtcttgggcccccaatctaaaaatctggcacatccaaggccgggcgcggcagctcacgcctgtaaccccagcactttgggaggccgaggtcaggagatcgagaccatcctggctaacacagtgaaaccccgtctctactaaaaatacaaaaaaa

SEQ ID NO: 550106 - DNA, 524 bp, Homo sapiens
ctggatggaaactcccacccttccccagtaccctgggatcttcagatgaaagcctgaaagaatgcaaagccacaagaaagtggccctaggtcacccgctcctccctcagtggagtcaaggctgagaattcttagctaatcctaaataaacctcacatggctgaaatgtcacggccaatttgcttccccgtgtggactgcaaccatctggttctgcctgcaaccagcctttctcctcctgggcacctgcctcagccacacagctggaagatctggcaggcaggagcattcagagggcacagtaggaggtgcacttctgggggggagggagctgggactcactctgacaaggcacaagttgcccatatgtcagtcttgggcccccaatctaaaaatctggcacatccaaggccgggcgcggcagctcacgcctgtaaccccagcactttgggaggccgaggtcaggagatcgagaccatcctggctaacacagtraaaccccgtctctactaaaaatacaaaaaaa

SEQ ID NO: 550107 - DNA, 422 bp, Homo sapiens
gtacctagtaacatatacaaccataggcccttctcttctcctctttcacaaactgctaaaacttcctcattcaggactcaggctcagacaagacttccttcagtaaatattccagtctgatataagaagctaggggtaaagtgcaatgacagaaatgagaaaggactaggagaagaaactagattagaagtatcagacataattaaagaatctgatcctcacaacaaccctctgaggtcttgattagtatttccttcttttggtgtggaaatasgaagaaagaggttaagtaatttgctaagtcattgctaagtgacttcagtgtgctgacaagttcagtttaaatccaggtctgctgtcctgcaaagcagatgctctttcactctaccacactacaggcaataactttgccttctgcaggt

SEQ ID NO: 550108 - DNA, 1102 bp, Homo sapiens
  misc_feature 469, 470, 471, 472, 473, 474, 475, 476, 477, 478, 479, 480,481, 482, 483, 484, 485, 486, 487, 488, 489, 490, 491, 492,493, 494, 495, 496, 497, 498, 499, 500, 501, 502, 503, 504,505, 506, 507, 508, 509, 510, 511, 512, 513, 514, 515: n = A,T,C or G
  misc_feature 516, 517, 518, 519, 520, 521, 522, 523, 524, 525, 526, 527,528, 529, 530, 531, 532, 533, 534, 535, 536, 537, 538, 539,540, 541, 542, 543, 544, 545, 546, 547, 548, 549, 550, 551,552, 553, 554, 555, 556, 557, 558, 559, 560, 561, 562: n = A,T,C or G
  misc_feature 563, 564, 565, 566, 567, 568: n = A,T,C or G
gtcacccaggaggttgataatctagtagtataccagatttactctttgcgacttgtgagaactgactattaaatttttaggaaacttacaagccagttgacttcatattggccatgttgaacctgactgcaatcagtgtcagagccccccacatttaaccctatgaaycttattaaactcgtttttgttttttgtttgtttgctttttgagacagggtcttgctctgtcaccaaggctggagtgccatggtccaatctctgctaactgcaacctctgcctcctgggttcaagggattctcgagcctcagcctccagagttgctgggattacacccatgtgccaccacgcccggctaatttttgtatttttagtagagacagggtttcacaccatgttggcagactggtctcgaactcttggcctcaaatgatctgccctcctcagcctcccaaagtgctgggattgcannnnnnnnnnnnnnnnnnnnnnnnnnnnnnnnnnnnnnnnnnnnnnnnnnnnnnnnnnnnnnnnnnnnnnnnnnnnnnnnnnnnnnnnnnnnnnnnnnnncaatcccagcacttttggaggccgaggcaggcggatcatgaggtcaggagttcgagaccatcctggattaacatgatgaaacctgtctctactaaaaatacaaaaaattagccgggcgtggtggcgggtgcctgtaatcccagctacttgggaggctgaggcaggagaatgaagtaaactctggaggcagagcttgcagtgagcagagattgcaccactgcactccagcctgggtgacagagcaagactccatctcaaaaaaaaaaaaaattaatccatgtaattgaaaaagaattatactttccacctaacagatattaaaacatctgaaattcttcccatttttaaaatatacaaaatatcacaccacgcaaagaaatacaaagtatactacgaaagtacagattattaaaattttacaagcacaaccactgcttgagatgttgacatttggccaagttaggcatcttcacagggtacataaataattaattgtccttgtacccgcttctagagatttgagaaatttcatga

SEQ ID NO: 550109 - DNA, 1102 bp, Homo sapiens
  misc_feature 469, 470, 471, 472, 473, 474, 475, 476, 477, 478, 479, 480,481, 482, 483, 484, 485, 486, 487, 488, 489, 490, 491, 492,493, 494, 495, 496, 497, 498, 499, 500, 501, 502, 503, 504,505, 506, 507, 508, 509, 510, 511, 512, 513, 514, 515: n = A,T,C or G
  misc_feature 516, 517, 518, 519, 520, 521, 522, 523, 524, 525, 526, 527,528, 529, 530, 531, 532, 533, 534, 535, 536, 537, 538, 539,540, 541, 542, 543, 544, 545, 546, 547, 548, 549, 550, 551,552, 553, 554, 555, 556, 557, 558, 559, 560, 561, 562: n = A,T,C or G
  misc_feature 563, 564, 565, 566, 567, 568: n = A,T,C or G
gtcacccaggaggttgataatctagtagtataccagatttactctttgcgacttgtgagaactgactattaaatttttaggaaacttacaagccagttgacttcatattggccatgttgaacctgactgcaatcagtgtcagagccccccacatttaaccctatgaatcttattaaactcgtttttgttttttgtttgtttgctttttgagacagggtcttgctctgtcaccaaggctggagtgccatggtccaatctctgctaactgcaacctctgcctcctgggttcaagggattctcgagcctcagcctccagagttgctgggattacacccatgtgccaccacgcccggctaatttttgtatttttagtagagacagggtttcacaccatgttggcagactggtctcgaactcttggcctcaaatgatctgccctcctcagcctcccaaagtgctgggattgcannnnnnnnnnnnnnnnnnnnnnnnnnnnnnnnnnnnnnnnnnnnnnnnnnnnnnnnnnnnnnnnnnnnnnnnnnnnnnnnnnnnnnnnnnnnnnnnnnnncaatcccagcacttttggaggccgaggcaggcggatcatgaggtcaggagttcgagaccatcctggattaacatgatgaaacctgtctctactaaaaatacaaaaaattagccgggcgtggtggcgggtgcctgtaatcccagctacttgggaggctgaggcaggagaatgaagtaaactctggaggcagagcttgcagtgagcagagattgcaccactgcactccagcctgggtgacagagcaagactccatctcaaaaaaaaaaaaaattaatccakgtaattgaaaaagaattatactttccacctaacagatattaaaacatctgaaattcttcccatttttaaaatatacaaaatatcacaccacgcaaagaaatacaaagtatactacgaaagtacagattattaaaattttacaagcacaaccactgcttgagatgttgacatttggccaagttaggcatcttcacagggtacataaataattaattgtccttgtacccgcttctagagatttgagaaatttcatga

SEQ ID NO: 550110 - DNA, 1102 bp, Homo sapiens
  misc_feature 469, 470, 471, 472, 473, 474, 475, 476, 477, 478, 479, 480,481, 482, 483, 484, 485, 486, 487, 488, 489, 490, 491, 492,493, 494, 495, 496, 497, 498, 499, 500, 501, 502, 503, 504,505, 506, 507, 508, 509, 510, 511, 512, 513, 514, 515: n = A,T,C or G
  misc_feature 516, 517, 518, 519, 520, 521, 522, 523, 524, 525, 526, 527,528, 529, 530, 531, 532, 533, 534, 535, 536, 537, 538, 539,540, 541, 542, 543, 544, 545, 546, 547, 548, 549, 550, 551,552, 553, 554, 555, 556, 557, 558, 559, 560, 561, 562: n = A,T,C or G
  misc_feature 563, 564, 565, 566, 567, 568: n = A,T,C or G
gtcacccaggaggttgataatctagtagtataccagatttactctttgcgacttgtgagaactgactattaaatttttaggaaacttacaagccagttgacttcatattggccatgttgaacctgactgcaatcagtgtcagagccccccacatttaaccctatgaatcttattaaactcgtttttgttttttgtttgtttgctttttgagacagggtcttgctctgtcaccaaggctggagtgccatggtccaatctctgctaactgcaacctctgcctcctgggttcaagggattctcgagcctcagcctccagagttgctgggattacacccatgtgccaccacgcccggctaatttttgtatttttagtagagacagggtttcacaccatgttggcagactggtctcgaactcttggcctcaaatgatctgccctcctcagcctcccaaagtgctgggattgcannnnnnnnnnnnnnnnnnnnnnnnnnnnnnnnnnnnnnnnnnnnnnnnnnnnnnnnnnnnnnnnnnnnnnnnnnnnnnnnnnnnnnnnnnnnnnnnnnnncaatcccagcacttttggaggccgaggcaggcggatcatgaggtcaggagttcgagaccatcctggattaacatgatgaaacctgtctctactaaaaatacaaaaaattagccgggcgtggtggcgggtgcctgtaatcccagctacttgggaggctgaggcaggagaatgaagtaaactctggaggcagagcttgcagtgagcagagattgcaccactgcactccagcctgggtgacagagcaagactccatctcaaaaaaaaaaaaaattaatccatgtaattgaaaaagaattatactttccacctaacagatattaaaacatctgaaattcttcccatttttaaaatatacaaaatatcacaccacgcaaagaaatacaaagtatactacgaaagtacagawtattaaaattttacaagcacaaccactgcttgagatgttgacatttggccaagttaggcatcttcacagggtacataaataattaattgtccttgtacccgcttctagagatttgagaaatttcatga

SEQ ID NO: 550111 - DNA, 956 bp, Homo sapiens
agcctcaaacggcaacaaagttacatgaaacaatttcttttcctttccttttttttttttttttttttgagacagagtctcactctgtctcacccaagctggagagcagtggagtgatcttcrctcatgcagactctgcctcttgggttcaagtgattctcctgtctcagcctctggggtagctgggattacaggtgtgcaccatcacacccggctaattttgtatttttagtagagatggggtttcaccatgttggccaggctagtctcaaactcctgaactcaagtgatccacctgccctggcctcccaaagtgctgggattacaggcgtgagccaccgcgcctagccacatgatttctaatgagggaagtggttgacaaaatcttagaatctcttccatatcttgtccttcaaatgtcagtgtgggtgatctatttaaaacagaagcccaaaatgctcttctcattttaatgaaattcccagaatgaattgcccaggtgattaggtctatttcaagaaaacatgaaaactccactgtctcccccagcaagctggctaatagagaaactatgtttcatatatttcttgacttggaaaagagcttggatacctacttggtccaactctttattttacagctaaagaaactggctgaaaggggaaagtggcttgccaaggccacataacaaggtcacagacggagcccagcatagcagcccagcttgcttttcctctttgcccggctgcccatcacagtgatatggaagaaaagatgctaaaggactttctggaaagttctttggtatgaattcaccactaggatccttggaaacaaccacagcagcccaagggtgctgtgtgttcaacaatcaaataaataaataaagcctttaagtcaaaccactgtcatatgacataataccttagttttggagagcaagggaaaggaacagt

SEQ ID NO: 550112 - DNA, 696 bp, Homo sapiens
  misc_feature 158: n = A,T,C or G
tgctcatggttccgtaggctatacaggaagcatggtggtttctgcttctggggagtcctccaacacttactggcagggtaattttgaagaagtcataataagatggttgttacaattaaatgaaataatcaaagtggaagagcttagttagttgtcantcttaaatgaatcactgtcaagtaagagtgtgattgattttcctaccagtcaggactcaccccttgaagctataggagggtaaacctctgaagaccatacaatttagggaacactaacacctcaaaaamctctgtaaacttccttccttccttttcttccttccttccttccttccttccttccttcctccttccctccctctctctctctctttttctttctttgttcatttctgagacagagtcttgctctgtcattcaggctagagtgtagtggctggattatggctcactgccgccttgacctcctaggctcaagcaatcctctcacctcagcctccctagtagctgggactattggcatgctcagctaatttttttctccttttctttttgtagagacagggtctcatcatgttgcccaggctggtcttggactccttggatcaagcaatcctgctgcctcagcctcccaaagtgctggattacaagcatgagccactgtgcccagccttaagtttttttcatacaggaggaa

SEQ ID NO: 550113 - DNA, 539 bp, Homo sapiens
ctttaatttgatatgcaaatgagagtgcatattttatgaatataagaatggcaagtttccatgagggtcttttcttattcaacayctaattaattcatttacttaaatatatttatctagtacctgcactggtcagccccaagctgcttcagccctactctcccacttgtagccactatgccactgcaactgcatgagacactcagagccaggatgatccaacagagccctttctgaaactctggctcacagaccacataagagttaataaaatgattatgcttaatctgagctattaatttttgatgggattcattagccaacaataagtaaagagatatgctgacaaaccaataaaaatataattaaatgatgactaagtgctaaggaaaaaaattaaagaagaatatggctatgaggtataagagaagtggggaaaaaagtaccatactataaaagctagtcagaaaagacctcactgataaggtaatatctgagcagagtaaagaaggtaaaggacaagccctacatagatttag

SEQ ID NO: 550114 - DNA, 606 bp, Homo sapiens
ggcaatgaatatttaaaatgtgtattctcattgaattttttacgaaacaattatgtaagttatgctcacaaagatggtcactgaagcatggtttgcaatttccactaataaacaataaccaaaatatctactggtaggtcaatgattaaataaatcataacagagccacattaaaggagagggaaacascatgatctttcatgtcaaagacctaggtttaagacttagttatgctttttaatagctgcactaagtttctatttcttctgtacatttagaataatatcttttagaatcattgtagggattaatagaggtaacacatgaagcctgattaacagtagccaacaatatagtaagcactcaataaacattatcagcaaataaacgtatgcaactattaaaaaggatagtctgctcctgggtaatacaggacccactagctactgagcacttaaaatgtggtcagtgcaaccgaggaactgaattttactttaattaattgatactcagttattagaaaactttgaagtatgtctagaaaaaattgggtttgtgactctactttttcaattgtaagttctgtaaactctaaatacagatcaa

SEQ ID NO: 550115 - DNA, 1626 bp, Homo sapiens
cacacacacatgtgcatgcagtcacatgcaaaatacatgcacatgcttgcacactgtcacacacacatgcacactcacacacacaatcagtacttgtgtcaaaatcctcacatggctgttctttctacccattggaccagcaaatgtgttcttgtcccaagtaacctgagcccctccaaaaaaaacaaaaaaaaagaaacacccctgatttatgttttagatcttaattcatcaaaaacactgagctaggccaggcatggtagtgagcttctgtagtcccagctactcaggaagctgagccacaataatcacttgaacccaggaggcagaggttgcagtgagccaagatcgcgccactgcactccagtctgggtgacagagcaagacactgaaggaaaggagaggaaaggacaggaaaggggaaagaaatggaaagggaaggataggagaggggaggagaggggaagagaggagaggtgaggggaggggagttagatatgatctgtgcctgagaattaatttggttttcttacaaaccaaaaggcaggattcacaatcaagacaaggtgatgatggacaggcatgcacacatgagcacgtggagcacacagtgtgtttggctgcaggagaagaatccagttttcagcaggtgaatgcagagaagccctgctgctcaggacaaagaatgtttccagaatgaaccatgtttgcagctctccattgcccaggatgagcggcgtccccaggtgcctggcccttttatcacccaggctgatggtacatccagaggcagccatggctcagcccccaagcaaggccagcaatggccgggaagaagcttattcaatgggattctctgcagagttgttctgactttcagcttgcagggatgtgggcatagaaaacaagaggctgacttctcaatcaatcgtcacttaaggatgcagagccagtggaagccctttctttcatgacttttagcattttttcttcattttcagaaaatccacaccatctccatatatgcatgcaygcatgagtgtccgtccgccccctaactgtggggttaagaatcatgtgactgctcatgctggaaaaacaagacaatcaccatcataaaagcccacatcatttacagatcttggaacttgaactttctttaaaagataaatatagtagtttacattttggagctggagacattgtcttcctttctcttttccccttccacccttctcaagtatacttgcctttattttgaatgagaaacaggcaacgggggggtgccacctcacacaaagaaaaagggcattttttagaaactgcgccagtcaaaaagtcagaagtgtctaaaagcacagtgagtccccctgttcatggcatggatgccctgtccactgatggcacagccacactgctggtgcctgggtagcacctgcctccttgagcgatggtcactgaagcaaaccccactgtctgtagatgccgttagcatccccctcatgaggtctgctctgtgagaaggtcggtcagtgagtggcagcactgggcagtgatgaggaggaccctgagtgggtgtggggcgtcgcctggatattagctgtgggtcaggtagacacagagaag

SEQ ID NO: 550116 - DNA, 1626 bp, Homo sapiens
cacacacacatgtgcatgcagtcacatgcaaaatacatgcacatgcttgcacactgtcacacacacatgcacactcacacacacaatcagtacttgtgtcaaaatcctcacatggctgttctttctacccattggaccagcaaatgtgttcttgtcccaagtaacctgagcccctccaaaaaaaacaaaaaaaaagaaacacccctgatttatgttttagatcttaattcatcaaaaacactgagctaggccaggcatggtagtgagcttctgtagtcccagctactcaggaagctgagccacaataatcacttgaacccaggaggcagaggttgcagtgagccaagatcgcgccactgcactccagtctgggtgacagagcaagacactgaaggaaaggagaggaaaggacaggaaaggggaaagaaatggaaagggaaggataggagaggggaggagaggggaagagaggagaggtgaggggaggggagttagatatgatctgtgcctgagaattaatttggttttcttacaaaccaaaaggcaggattcacaatcaagacaaggtgatgatggacaggcatgcacacatgagcacgtggagcacacagtgtgtttggctgcaggagaagaatccagttttcagcaggtgaatgcagagaagccctgctgctcaggacaaagaatgtttccagaatgaaccatgtttgcagctctccattgcccaggatgagcggcgtccccaggtgcctggcccttttatcacccaggctgatggtacatccagaggcagccatggctcagcccccaagcaaggccagcaatggccgggaagaagcttattcaatgggattctctgcagagttgttctgactttcagcttgcagggatgtgggcatagaaaacaagaggctgacttctcaatcaatcgtcacttaaggatgcagagccagtggaagccctttctttcatgacttttagcattttttcttcattttcagaaaatccacaccatctccatatatgcatgcacgcatgagtgtccgtccgccccctaactgtggggttaagaatcatgtgactgctcatgctggaaaaacaagacaatcaccatcataaaagcccacatcatttacagatcttggaacttgaactttctttaaaagataaatatagtagtttacattttggagctggagacattgtcttcctttctcttttccccttccacccttctcaagtatacttgcctttattttgaatgagaaacaggcaacgggggggtgccacctcacacaaagaaaaagggcattttttagaaactgcgccagtcaaaaagtcagaagtgtctaaaagcacagtgagtccccctgttcatggcatggatgccctgtccactgatggcacagccacactgctggtgcctgggtagcacctgcctccttgagcgatggtcactgaagcaaaccmcactgtctgtagatgccgttagcatccccctcatgaggtctgctctgtgagaaggtcggtcagtgagtggcagcactgggcagtgatgaggaggaccctgagtgggtgtggggcgtcgcctggatattagctgtgggtcaggtagacacagagaag

SEQ ID NO: 550117 - DNA, 1729 bp, Homo sapiens
cattaaagcacatggcgagtacctagatattcttactaacaaacttaatttattccaatttaaggaaagcaatatgaagaacatacattaaatattttcccctccatgttaatgtttcagttaagtagacgaaggaattcagatttagtcttcatgtaaaacaggtaactttgctcaggaaaagaaaaacctacctgttttctatgactcgtgacatatattctctggtagtccttgtgatcagacatacacataccacatattgattacaaatagggtattaaacaaagtaagtaactctagaccctaccaccacttcagtgacccgaaatccactatttaccaacaatagctagtaatagcaatttttggtcacataattaagcagcattttctttccctgattatttaagaaaaactaagtaaatttatctcactgaagaatattttaagccttaagtcaacattaaatttcttgttattgattataaaccagtatacttcaagaggatatatttctgtatataaaagtagtctttcataactgtctgtatttctaagttaatatataagtttatctagataaaaaatacttaagaaacataaaccaaaatattttatgaaattgtttttatattagctaagtataaatttattgctgtataacaaattaccacttggtggtaaacagtgaacatttatcttaacagtttctgaggttcaagaatttaggagcaatttacctgagtgattctatcttagattctcttataaggctatatttaagattttggttatagttgcagtgatccgaaggcttcactggagcaggaggacaagcttctaagatgactcacttacatgccactgcaggagtcctcagtgtttcactggcttttagcagagtgcttcattccattgccacatagacctgtttttggtgttacttaagtgccctcacaacgtggcagcttcctttttccagaacaagggtaaagagataaagactgagccacaatgtcatttataatctagcctcaaaagttacacacagtgttttctgtttgttgagcaaataacttctattcagtatgaaaggtgctttacagggcatgaataccagagatggggatcgttggggccatcttggagactagctaccacgttaagaataaataatacttcttaaattaagcatttttatttcatattacaccatgtcagaatgcatttaggctttactcagtagcctgcagaccggaaaatttcaaaaaaaaaaaaaaaaaaaaaaaaaaaaaaagctgtttgggatctattacatctattgggagaaattaacttttgcctgctgtttcttctcaagcggttctgggtgtgtatattctttcagaggctcacaaactccctttccccagttgtttcartgtgtctagcagataactttctcttgatttagttgcttcttctataactttcagaagtgctatcttttaataattgtttattccttataggatggatgattattttcattgtcccaaagattttcaaaacccaagtatcattagaaccacaaactaaaaacactgtaatatatgaagtgcaataatcatgatgacaagaaataattttggatcccaaaatgctatctgttggaaatataaaaattgaaaaaagataatcattgtctaatcaaatcatcatttcattgtagtttttctttcaccca

SEQ ID NO: 550118 - DNA, 463 bp, Homo sapiens
ctgtctatccataaaacgtgatctattcagcactgagaaaggaacataccattgatacgtacaaaactcagatgaatcttagaggcattatagtcagtgaaaaaaccagtctcacaacttacatagaatatgattccatctgcatgatagcctcaaaaagacaaaaccatagtggtggaaaacagactagtggttgctagaggttaggaatggagaaaggtgtgactagaaagatacagcatgagagagctctttggcgtgatggagctgttctatattctaattttgatggtggctataagaattttaacatgttaaccatagaactgtacactaaaatagtcaattttattgtatgatcaacacatgtacacacacatacaaacatgcccttaagagtcagttggtgcatacatgtccrgcatttgcaagagagggtctgtgtttactggtggggaattcc

SEQ ID NO: 550119 - DNA, 684 bp, Homo sapiens
agaggcaggtggagtgcttcctggatatccgtggcagggcaacgygagtacggtggagcagaatgtaaggttctcgtgaatatacccacgggagtagagctgaaaattctcccgacagggacaggggacgcatgtggggcgataagtgtgtgaattcggccgattctagtgaattccctaatgaagacgtcacacacggtaagtgtgtatcatatttattgtcattcatacttgaaggcaccggcgggggaaggaaataattaaatcgcaagacaaaacctccaagagagatcacctcgaagagagtctaacgtccgtaggaacgctctcgggttcacaaggattgaccgaaccccaggatacgtcgctctccatctgaggcttgctccaaatggccctccactattccaggcacgtgggtgtctcccctaactctccctgctctcctgagcccatgctgcctatcacccatcggtgcaggtcctttctgaagagctcgggtggattctctccatcccacttcctttcccaagaaagaagccaccgttccaagacacccaatgggacattccccttccacctccttctccaaagttgcccaggtgttcatcacaggttagggagagaagcccccaggtttcagttacaaggcataggacgctggcatgaacacacacacacaca

SEQ ID NO: 550120 - DNA, 684 bp, Homo sapiens
agaggcaggtggagtgcttcctggatatccgtggcagggcaacgtgagtacggtggagcagaatgtaaggttctcgtgaatatacccacgggagtagagctgaaaattctcccgacagggacaggggacgcatgtggggcgataagtgtgtgaattcggccgattctagtgaattccctaatgaagacgtcacacacggtaagtgtgtatcatatttattgtcattcatacttgaaggcaccggcgggggaaggaaataattaaatcgcaagacaaaacytccaagagagatcacctcgaagagagtctaacgtccgtaggaacgctctcgggttcacaaggattgaccgaaccccaggatacgtcgctctccatctgaggcttgctccaaatggccctccactattccaggcacgtgggtgtctcccctaactctccctgctctcctgagcccatgctgcctatcacccatcggtgcaggtcctttctgaagagctcgggtggattctctccatcccacttcctttcccaagaaagaagccaccgttccaagacacccaatgggacattccccttccacctccttctccaaagttgcccaggtgttcatcacaggttagggagagaagcccccaggtttcagttacaaggcataggacgctggcatgaacacacacacacaca

SEQ ID NO: 550121 - DNA, 555 bp, Homo sapiens
ttatctgctctgaccctatttctagctaaaggaatcacagtgatggtttggttacttcattcaagttgttttggtatgtgaaatgagtgcttaagaagtctattataaaagaaagaagtatagccatttttagttctctttatcataataaatcagggctaaggttataataagaatgtaagatgaaacacaaatagcaatttcttttttaacagaagttattctttaggaagttaattgtaagtgagttctgtcaaatttaataaaatcagttcttcttgatcaaaccattctgaggtataattcagaagacgattacagtatataattaaacttgccaattaaaatgtgtgatcactgtaaagtaatatagtttttccatgggatgaaaaagtagaatatatagcaagtctctggaaattytctgagtaacaaatgtagataggtaggaggcaagctatagccccaggtcagatcatttattctattttatagacaggtgagtgaatcactgaagtattaaactgcaaatcgttactgaagtcataaataaaa

SEQ ID NO: 550122 - DNA, 1229 bp, Homo sapiens
gtttcttataaattatgtaaggttatgggtagatttcataatgccatggggaatgctcttgatgggaasgactgtccttgaaggcaagcactgtctttttttcatatttgcaccgcagtgcctaaattagcaccctaagcacttgataggtgtttggtaaatattggttgaatgaattaatgaaactatttatgaattcagctgagtctgctgtgaaaagaaaaaaaaactaaatattaaaaggaattcagagtatattttcccactagagcacaggtgagcaaagttcttttataaagaggcagagagtaatttttttgtttgtttttttgagaaagagtctcactctgtcacccaggctggagtgcagtcacatgatcactgcagcctggacctcttgggctcaagtgatcctcccaccttagcctcccaagtaactgggacacagacttacaacactatgcctggcaaagattttttatttttttctatagaaacaaggtgtcactatattacccaggctggtctcaaactcctggcctcaagtgatcctcccaccttagcctcccaaagggctgggattagagatagtaaatttttttttttttcgagatggagtctcgctctgttgcccaggctgcagtgcagtggtttgatctcaactcactgtagtctccgcctccagggttcaagcaattctcctgcctcagcctcctgagtagctgggaccaccatgtgccatcacacccagctaatttttgtatttttggtagagatagggtttcaccattttggctagggtggtctccagctcctggcctcaaataatctgcctgtctcagcctccccaagtgctgagattataggcatgagccactgtgcccagccaagacagtaaatattttttattttactggctgtacaatctttggcacagtcaattaattctgctattctatcacaaaggcagccatagccactatgtaaacaaaggagtgtgtttctgttccaataaaactttatttacaaagacaagtagcagaccagatttggctcatggattgtactttgctgaccttgccctataagatgagttttaatatatcaaaagatttactgtagattactgtacttagtaaaatctttttttgctttgttttgaaaaaattattttattttattattttttttgagacagagtctcactctgtctcccaggttggagtgca

SEQ ID NO: 550123 - DNA, 1229 bp, Homo sapiens
gtttcttataaattatgtaaggttatgggtagatttcataatgccatggggaatgctcttgatgggaacgactgtccttgaaggcaagcactgtctttttttcatatttgcaccscagtgcctaaattagcaccctaagcacttgataggtgtttggtaaatattggttgaatgaattaatgaaactatttatgaattcagctgagtctgctgtgaaaagaaaaaaaaactaaatattaaaaggaattcagagtatattttcccactagagcacaggtgagcaaagttcttttataaagaggcagagagtaatttttttgtttgtttttttgagaaagagtctcactctgtcacccaggctggagtgcagtcacatgatcactgcagcctggacctcttgggctcaagtgatcctcccaccttagcctcccaagtaactgggacacagacttacaacactatgcctggcaaagattttttatttttttctatagaaacaaggtgtcactatattacccaggctggtctcaaactcctggcctcaagtgatcctcccaccttagcctcccaaagggctgggattagagatagtaaatttttttttttttcgagatggagtctcgctctgttgcccaggctgcagtgcagtggtttgatctcaactcactgtagtctccgcctccagggttcaagcaattctcctgcctcagcctcctgagtagctgggaccaccatgtgccatcacacccagctaatttttgtatttttggtagagatagggtttcaccattttggctagggtggtctccagctcctggcctcaaataatctgcctgtctcagcctccccaagtgctgagattataggcatgagccactgtgcccagccaagacagtaaatattttttattttactggctgtacaatctttggcacagtcaattaattctgctattctatcacaaaggcagccatagccactatgtaaacaaaggagtgtgtttctgttccaataaaactttatttacaaagacaagtagcagaccagatttggctcatggattgtactttgctgaccttgccctataagatgagttttaatatatcaaaagatttactgtagattactgtacttagtaaaatctttttttgctttgttttgaaaaaattattttattttattattttttttgagacagagtctcactctgtctcccaggttggagtgca

SEQ ID NO: 550124 - DNA, 1229 bp, Homo sapiens
gtttcttataaattatgtaaggttatgggtagatttcataatgccatggggaatgctcttgatgggaacgactgtccttgaaggcaagcactgtctttttttcatatttgcaccgcagtgcctaaattagcaccctaagcacttgataggtgtttggtaaatattggttgaatgaattaatgaaactatttatgaattcagctgagtctgctgtgaaaagaaaaaaaaactaaatattaaaaggaattcagagtatattttcccactagagcacaggtgagcaaagttcttttataaagaggcagagagtaatttttttgtttgtttttttgagaaagagtctcactctgtcacccaggctggagtgcagtcacatgatcactgcagcctggacctcttgggctcaagtgatcctcccaccttagcctcccaagtaactgggacacagacttacaacactatgcctggcaaagattttttatttttttctatagaaacaaggtgtcactatattacccaggctggtctcaaactcctggcctcaagtgatcctcccaccttagcctcccaaagggctgggattagagatagtaaatttttttttttttcgagatggagtctcgctctgttgcccaggctgcagtgcagtggtttgatctcaactcactgtagtctccgcctccagggttcaagcaattctcctgcctcagcctcctgagtagctgggaccaccatgtgccatcacacccagctaatttttgtatttttggtagagatagggtttcaccattttggctagggtggtctccagctcctggcctcaaataatctgcctgtctcagcctccccaagtgctgagattataggcatgagccactgtgcccagccaagacagtaaatattttttattttactggctgtacaatctttggcacagtcaattaattctgctattctatcacaaaggcagccatagccactatgtaaacaaaggagtgtgtttctgttccaataaaactttatttacaaagacaagtagcagaccagatttggctcatggattgtactttgctgaccttgccctataagatgagttttaatatatcaaaagatttactgtagattactgtacttagtaaaatctttttttgctttgttttgaaaaaattattttattttattattttttttgagacrgagtctcactctgtctcccaggttggagtgca

SEQ ID NO: 550125 - DNA, 621 bp, Homo sapiens
acacactaacagcacaaagatgaacctacggtggaatccacctttcacaggctcagctaagtgaagattaacaaatcggacagccctgtgggcaatagaataagttgacactttagaatgagtttcctattatcttttaactagacagtctagctttctcagggcaagacaaaaatgtcccaattacttgtcagcagtttttagtggaggaaaaactgcagttaaagcacctttactgagaactttgagcagtaaatgtgcttacatatttagtttgtgcaactttgattaggaattggatggtgagttgggatcccccagtccttagctttttgctggagttctgtaaatctcaaaatgtcagccacaggccatttcttttggtttatttaagtgtagattttttaaaaaatcactttttccacttcatggctcctttggaccagggtataaaaatagcgatgccaccaggagccaagctctttctggaataatgaagcaggcgaggacrgagccttgctcaggacgacagaaggcttgcagcctgcctcaaacgcaactctaatttcagccacttcacttcttccccccgcgctcagacttgcctcaaaggaaggagcc

SEQ ID NO: 550126 - DNA, 529 bp, Homo sapiens
gaaaataaagcaaaattcatgcttttgatggactcattcccacaagaaaggttaatcatcgtatgaattttcgtatgtttacatggacaagatatcaatgataaggaaaatgggcccagatgtgccatagccatatgaatgcatacaaaagtgacttattatggtcatccatccattggcacatgcaaatagctttgttttaaacaatgacagtcattgtgttgggatttacatgtagttgagattcacttgatcattcagaaccaatttattcctaaaatattatgacaaatattatatcacataatcgatgggctcataaaacaatgtctgctgcatggttgctagctttgtatttaaayctagggtagaatacatagcatagcacaggataggataggatagttagaagaataatttgccagccaagtgtggtggctcatggctataatcccagcactttgggaggccaaggtggaagcatccatgagcccaggagttcaaaaccagcccatccctataaaactaa

SEQ ID NO: 550127 - DNA, 1216 bp, Homo sapiens
gggtattgctgcttcttatagaacaaaaaagaattctcatccattttattcattgctaaaaaaacatgtgtctgctaaaaatttcatttagaaaaaaaggttcaaaggtagtttccttgattttaaagtgttgcgaattaaaagctactttttctcaggtttgttattatcaaaaccacaccttcattaaaatgtaaagcattttattctttgagaatagattaaaactctgtattcaaccttatattaagagaggcattaaaactccaattatggattatagctttatatgagtttggagatttttttaacttcctttatatcaagaatatgttaaacggttaattgactgctgaatagatactctacatcatcataggaattaatcaatgtattggycttttgattctctgacttgctatttcatgtgttaatttaacgatttctccttccttctttgctgtccatgaagccttcatgcatgctattctatacaaactactttttattctaagttctacacacatagggtaacttactattctaggatctgagtgtattttgtgtgcattcaggccttaaaaagaaagtgtaaataatactctaccttgtcatatgcataaagtttatgtggatagctatttcctttcttattttccacacctcaaagcttgtaattaaatggaaatgaaaaacaattctctgaaaaatttaaaaatcttttaaaatatattttaatccctactttgcctaatgaaacaatatattttcttattcataagtttagaattttcattaattttttttcagaaataattctgaaagagcattttcctcaaaaccccatgttttctctaattctgttcttttaagaacttcaataaaataggaaagtcagtgaggctggtggcaaggttttgctcttaaactctaacaaatactttggtttggtgatttgcctcttcctaaagcacctacctacaatggagtctataagttctttttggaaactgagacactagaagcatcaacactggtatacgtccaggtaaaaggaaaatactgatacactcccaggtaaaagggaaatatacacatattccttaagtgctgaaagaacaaatatgtaaataagagatgggctgcttccctactgttcatgtttgctcactgcggaacatttggttcacttggcttgactcattatttcagctgg

SEQ ID NO: 550128 - DNA, 364 bp, Homo sapiens
ataaaaatgggaattgttaaacaagttttgacatattaatgctgcagaatgcactgcagcacttaaaaagagtaagataatagacagccaaaataaaattgctagatcctatgttatttgtattttaaatttaatcagacattgtcacagacagtgtcaaattcatcacaaagtagaaccaakttataatcttaccagtagagtatttacttatgtcatttatttctagaaagttctactagatgaattgttagaactacattccaattagcaccatgacatagagtaatacttttctataaatatgcaaaagaaaatattcacaaatataaaataagtgtaaatgtgtaaaaagaaaaataaa

SEQ ID NO: 550129 - DNA, 608 bp, Homo sapiens
gagagagagagagagagagagagagagagagagaaacaatacagatctccactctccacaagaagcagataaaaaagacaacacttttcctcacacatgacccttaggttttgacaattctggaaaaatgctggcatgtgtactccccagtctagacaatttcctagaccctgtgtatatatgctgctttagttgcaaaaagttaggtaggatcttgggagatttcctcttggackccagaaatattaaccacatcaacattatacctaacaactctaaaataattcttttgaacagattaccactgaagaacttgtaagttaaatccaattgacttttcagttataatcttactgctgaaattctcatatttaaaagaaatttgcaacatcactttctctgactcctctcgtacttttcattagccactgctcagtctcctttaccaagtcctgtgactctgtgaaatgttgatactcccaggattttgtcaatggctttcttcttattctacatcttctgcatcatggataagctcagtgagatctatggctttgcttaataattataataaaattattctaagcctgcatctccaaccagagttc

SEQ ID NO: 550130 - DNA, 608 bp, Homo sapiens
gagagagagagagagagagagagagagagagagaaacaatacagatctccactctccacaagaagcagataaaaaagacaacacttttcctcacacatgacccttaggttttgacaattctggaaaaatgctggcatgtgtactccccagtctagacaatttcctagaccctgtgtatatatgctgctttagttgcaaaaagttaggtaggatcttgggagatttcctcttggacgccagaaatattaacyacatcaacattatacctaacaactctaaaataattcttttgaacagattaccactgaagaacttgtaagttaaatccaattgacttttcagttataatcttactgctgaaattctcatatttaaaagaaatttgcaacatcactttctctgactcctctcgtacttttcattagccactgctcagtctcctttaccaagtcctgtgactctgtgaaatgttgatactcccaggattttgtcaatggctttcttcttattctacatcttctgcatcatggataagctcagtgagatctatggctttgcttaataattataataaaattattctaagcctgcatctccaaccagagttc

SEQ ID NO: 550131 - DNA, 608 bp, Homo sapiens
gagagagagagagagagagagagagagagagagaaacaatacagatctccactctccacaagaagcagataaaaaagacaacacttttcctcacacatgacccttaggttttgacaattctggaaaaatgctggcatgtgtactccccagtctagacaatttcctagaccctgtgtatatatgctgctttagttgcaaaaagttaggtaggatcttgggagatttcctcttggacgccagaaatattaaccacatcaacattatacctaacaactctaaaataattcttttgaacagattaccactgwagaacttgtaagttaaatccaattgacttttcagttataatcttactgctgaaattctcatatttaaaagaaatttgcaacatcactttctctgactcctctcgtacttttcattagccactgctcagtctcctttaccaagtcctgtgactctgtgaaatgttgatactcccaggattttgtcaatggctttcttcttattctacatcttctgcatcatggataagctcagtgagatctatggctttgcttaataattataataaaattattctaagcctgcatctccaaccagagttc

SEQ ID NO: 550132 - DNA, 608 bp, Homo sapiens
gagagagagagagagagagagagagagagagagaaacaatacagatctccactctccacaagaagcagataaaaaagacaacacttttcctcacacatgacccttaggttttgacaattctggaaaaatgctggcatgtgtactccccagtctagacaatttcctagaccctgtgtatatatgctgctttagttgcaaaaagttaggtaggatcttgggagatttcctcttggacgccagaaatattaaccacatcaacattatacctaacaactctaaaataattcttttgaacagattaccactgaagaacttgtaagttaaatccaattgacttttcagttataatcttactgctgaaattctcatatttaaaagaaatttgcaacatcactttctctgactcctctcstacttttcattagccactgctcagtctcctttaccaagtcctgtgactctgtgaaatgttgatactcccaggattttgtcaatggctttcttcttattctacatcttctgcatcatggataagctcagtgagatctatggctttgcttaataattataataaaattattctaagcctgcatctccaaccagagttc

SEQ ID NO: 550133 - DNA, 603 bp, Homo sapiens
tgaggctccttcagtagctcagtccaggacgcagccctgcgagggtcctcctgtgcaggagtacacgatgctgcggggtcctactgtgccttagtccaggacgccagggggctgggtcctctgctgccatagtccagggcgcgaggggctgggtcctctggtgccatagtccatgacgcagggaggctgggtcctctggtgccatagtccaggatgcgaggggctgggtcctctgctgccatagtccagggcccgagggggctgggtcctctggtgccttagtccatgacgcagggaggctgggtcctctgctgccatagtccaggatgcgaggggctgggtcctctgctgccatagtccagggcgcgaggggctgggtcctctggtgccatagtccatgacgcagggaggctgggtcctctggtgccatagtccaggatgcgagrggctgggtcctctggcgccatagtccaagacgccagggggctgggtcctctggtgccttagtcccggtcgcggggagctgggtcctctggtgccatagtccagggtgcggtggaacaggagtcctgcggagcagtagtccagggcgcgctggggcgt

SEQ ID NO: 550134 - DNA, 2075 bp, Homo sapiens
agaagagctgggccctggctctgggcaccatgcagcctctaaggtggggctgagcgccagttcctgccctcctgcagctggggaccaataccctgacttaggcgctgtggaggcttctggcccaagggtccgcactgctggtggcactggcagggtcagagtttgccacagctgctgctgcgcgccttgtgcaggttaccactgcagctgaacctacagcagaagcaggcagggctggtcccagacagcctgggggtctctaagtgcagggccctttcaccctagagtcagctctttcttgccggcacccatagcggggtgtgcaggcgctgggtacagggcagcagccaggaaatggctgagcggcctgttcccgccctcctgcagctggggcctgaccacctgaattagccgctgggcgaggtctggccctgggatccgcctggctggtgtaggagcacggtctggggttgcctccaaggctgctgcgygcgccatgtgcaggcaagggtttcccagacagcctcagggtcatggagtggaccactgtcccagcctggagtccgctcttcctttgcctgctcccagagttccgggtcgcgggcactgggaactgtgccgccaaggggactgggccgagggcaaaggtttctgccctgctgcagctgcggggctgactgcctgaattaggcgctgaggcggcgttgtccctggtgtcctggctcttggtggtgcaggcaaagtgcccggttgctctgctgctgcggcgccgttgtacaggtggcagctgtagctgagttctcagtaggggccggcagggttggtcctagaaagcgtgaggatcgccgagtgcactgccctcccagcctagggtccactcttccttggcccgagcccagagctcggggtttcaggcgctgggccctgtgcagctgcccagaataggctgagcggcaggttcccgccctggcaagggatccagcagtggaatcctcactgctgttggctgcgggcaaggtcagcggggtttccatcgctgctggtgggagccacctggcggtggtagctgcaagtgagcgcgtggcagagactggcagggctggtcccagacaccctgagggtctctgggtgcatcgccctaccaccctagggtctgctcttccttagcctgctcccaggacgcggtgtacgagggctagactctgagcagcctccaggatggggctgagcagcggattcctgccctgctgcagctacagtctgaattaggcgccaccgcagtatctggccctggggtacgtgctactgggtggcatggacagagatgggggctgccacagctgctatggggctgagcagccgattctcgccctgctgcagcgggcgaccgctgcaatccccagcgctatgggaccgaccacctgacttagatgccttggaggcatccggtcctggggtcttgctgctggtgtctgcgggcagggtcacggctgccactactactgctgtgcgccatgggcaggtgccagctgcagctgagtccgaggcagatgctgtcagggctggtctgaggttgcctaagggtggctgagtgcaccacgcttccaccccagggtccgttattcctaggccggctcccagattgcagggttgtgggcgttggacactgtgcagccatgaggatctggttgggtgcagattcccgccctcctgcagctgagaagccaatctcataacaggcgctgcagtgacctctggctctgcggtccgcgctgctgctggagctggcagagaacagagctgccaccgctgctgcttccaggagtgtgcagctggcagctgcagctgagcccgtggcggaggctggaaggccttattccagaagccttgagggtccccgaatgcaccgccctcccaccctaaggtccagtcttccttgcccgcgcccagagagttggattgcaggcgctgagcacagtgcaggtgctgggatggggctaagctgaaagtttccgccctctggctgctgcggggccgacagcctgagttatgcgccgcggcggcttttggtcatg

SEQ ID NO: 550135 - DNA, 563 bp, Homo sapiens
tgcagttaatcagtagaccaggtgttctagcagaattaaatttgatgctcctgtgttatctttaaatgacacagctcttctaaaacccatactcctagtgtatgattatccattaagacaaggtgatggaatgtgtgaatacagctgaggagacaccacaaggcaaatgctcaatggttcccattaatattgggaaaakcaacactataaaacagaaatccataggcattatttaatatttggttttggaaggtatttttagtgacactgcatacagttgtactgaataattgcaaaattagagatgtaaaaataaaacaaaggcacattgtgtttgagtagggaatctgtagatgtctagctgtttttcccatcctgtcccaaaattctaaatataatcatggtacccacactcaaatttatgttaaataacaacctcaatgaaattactctttctcttcattctctttgttatttatatgttgctttccttaagggaagaatacaaatgccttgctaagaagcattctgtttggttgtaggctgcataaggggagtaaaca

SEQ ID NO: 550136 - DNA, 622 bp, Homo sapiens
tctgtaaaacggaaaagctaaaatgtattagtgctttgtttggagagaagtggtcaaggctaaaaattatttaaaaggtgcactacgaattaaaataaaatccaatggaaaattatatgtttaagaaagaagaagaagaagcctttgsaaagtgagacatcaatttaggggtgaatttctggtgactgtaaacaatggaatgaggccatttctccttggcatgcaagcaccaactggaagcaagaatgggaccggacagtggaaactttctgtctgccatctttagacagcatgtagtaagttacctataaacatccaaatggataaagtaagtacaaatatatcccaaatttagagtcttctcaacaccaaagtcaactgggccgttcctttgtctgaaccacagttatcccttgcctggtttctgcaatagtctgttaactggtctcactcccttcagtatatttgaaacacaaaagccaaaataaacccactaaactgtaggccagattctgtcacttctcaaacatctttcaacactagctaaaattattttaatggcctagaacgccttcagtgatccagctctttgcggcggctcttcccgctatgcactctgccc

SEQ ID NO: 550137 - DNA, 669 bp, Homo sapiens
caggttggaaaactttaaaaattcttgatgtccagtcacattttatattaggtaaataagaatatttggggatggaacccaatcatcagtttttttttwaaagctctttagtgattcaaatattcggcctaggctccaaaaaccatcaacctagagcatcatttccaaattataaagtgctcacagaactgctgagtatcttgttaaaatgtatgttttcatttcgtaggcctgggggagactggaaaatgcacatggctaacaagctcctggaatgcccgtgctgttgctctataggaccacagtgagtagcaagttcttagattcaagtcagccttgatgaaccttgagatacattttaacatgttctagacttcattttctcctgacttgtcttatttggttttatgtttgcattatagtttatcaaaaatactttttaaaatgctataaatgctacataaacacaaaaatgaagacaaccttttgagatatctggttttttgttttgttttgtttttggagcggacggaggtaataactagaagttaaaataaatatttacttatagccaccgttttttaaaggggaaaagagtaaatctaacatattacctacattttatatcatgtattttattccagaaaactctgtttgaaaaggcaaaca

SEQ ID NO: 550138 - DNA, 669 bp, Homo sapiens
caggttggaaaactttaaaaattcttgatgtccagtcacattttatattaggtaaataagaatatttggggatggaacccaatcatcagttttttttttaaagctctttagtgattcaaatattcggcctaggctccaaaaaccatcaacctagagcatcatttccaaattataaagtgctcacagaactgctgagtatcttgttaaaatgtatgttttcatttcgtaggcctgggggagactggaaaatgcacatggctaacaagctcctggaatgcccgtgctgttgctctataggaccacagtgagtagcaagttcttagattcaagtcagccttgatgaaccttgagatacattttaacatgttctagacttcattttctcctgacttgtcttatttggttttatgtttgcattatagtttatcaaaaatactttttaaaatgctataaatgctacataaacacaaaaatgaagacaaccttttgagatatctggttttttgttttgttttgtttttggagcggacggaggtaataactagaagttaaaataaatatttacttatagccaccgttttttaaaggggaaaagagtaaatctaacatattacctacattttatatcaygtattttattccagaaaactctgtttgaaaaggcaaaca

SEQ ID NO: 550139 - DNA, 549 bp, Homo sapiens
gacggaatctcactctgtctctcaggctggagtgcagtcgtgcaatctcggctcattgcaacctccacctcccgggttcaagtgattctcctgcctcagcctctcgagtagctgggattacaggtgcatgtcaccatggtgggctaatttatatatatgtgtgtatatatatatatatatatatatatatatatatatatatatatatattttttttttagaagagacagggttttactgtgttagccaggatggtctcgatctcctgacctcatgatccgcctgcctcagcctcccaaagtgctgagattacaggtgtaagccaccacacctggccccatttcttaatcttataaaaataatttgtttatccttataaatctgaaaaagtctcccagattttgaaaaatatatgtgttattataaaaacatatgaaaggaagactttgtctccttcacagcccacaaactctatcctttcttaccctcattccctaccaagcctatggctcattttcctccttttgtwaagatgtgccatgctcttag

SEQ ID NO: 550140 - DNA, 549 bp, Homo sapiens
gacggaatctcactctgtctctcaggctggagtgcagtcgtgcaatctcggctcattgcaacctccacctcccgggttcaagtgattctcctgcctcagcctctcgagtagctgggattacaggtgcatgtcaccatggtgggctaatttatatatatgtgtgtatatatatatatatatatatatatatatatatatatatatatatattttttttttagaagagacagggttttactgtgttagccaggatggtctcgatctcctgacctcatgatccgcctgcctcagcctcccaaagtgctgagattacaggtgtaagccaccacacctggccccatttcttaatcttataaaaataatttgtttatccttataaatctgaaaaagtctcccagattttgaaaaatatatgtgttattataaaaacatatgaaaggaagactttgtctccttcacagcccacaaactctatcctttcttaccctcattccctaccaagcctatggctcattttcctccttttgtaaagatgtkccatgctcttag

SEQ ID NO: 550141 - DNA, 619 bp, Homo sapiens
tacttcttctgaagattttttcctgtatatccaatgtttaaatattcaagtccaggttagatgccctgtaatatccattggaatctcatcagaaaaataaaactactctagttattccagcctaagggatttaatacaaggaaataactgtacagaggaagaaacaattgagaagttgaggcaactgagggaataacagaagagagcaaactaccacctctagagtttsaggaaccagtagaagcatcattactagaaacagtggtgtactggttcatgtttaacatccagctctctagggataaacaaaactttactgccaatttctgtggtgttaatatcataccatggctgatttcaagataccaacatttcactaaacgcagagctgggaagagatgcagagattcagctcttatgagctcacacaccagaaaccagaagctgagcctgtcaagcagaatttggagccatgcaaaagaggccgctgtttccaaaatgctacctgaatagagcaagaggacaagtacattggcttctacaatcctcccacctttcattctccttttgagtcctttcttccgtcaaactcagccaaaatcttgccaagcctgggaaa

SEQ ID NO: 550142 - DNA, 587 bp, Homo sapiens
taaaaagataaaagaagaaataggaactaatcaaggaagaggcctgatatgrtttggttgtgtcctcacccaaatctcagcttgaattgtagctcccataattcccacatgttgtaggagggacctggtgggagataattgaatcattggggaggtttcccccatactgttttcatggtagtgaataaatcttacaagggctgatagctttataaggggaaacccctttcacttggttcttattctctcttgcctgccaccacataagatgtgccttttgccttccatcatgattgtgaggcctccccatccatgtggaactgagtccattgaaactctttttctttataaattacccagtcctggatatgtctttatcagcagcatgaaaacagactaatacaaagccagtatgcagaaacaataggaaaatttgggaaaaaaaaaaagccgggtgcagtggctcatgcctgtaatcccagcactttgggaggccaagccaggcagatcacctgaggtcaggagttcgagaccagcctgaccaacatggagaaaccctatctctactaaaaatacaaaatcagcca

SEQ ID NO: 550143 - DNA, 587 bp, Homo sapiens
taaaaagataaaagaagaaataggaactaatcaaggaagaggcctgatatggyttggttgtgtcctcacccaaatctcagcttgaattgtagctcccataattcccacatgttgtaggagggacctggtgggagataattgaatcattggggaggtttcccccatactgttttcatggtagtgaataaatcttacaagggctgatagctttataaggggaaacccctttcacttggttcttattctctcttgcctgccaccacataagatgtgccttttgccttccatcatgattgtgaggcctccccatccatgtggaactgagtccattgaaactctttttctttataaattacccagtcctggatatgtctttatcagcagcatgaaaacagactaatacaaagccagtatgcagaaacaataggaaaatttgggaaaaaaaaaaagccgggtgcagtggctcatgcctgtaatcccagcactttgggaggccaagccaggcagatcacctgaggtcaggagttcgagaccagcctgaccaacatggagaaaccctatctctactaaaaatacaaaatcagcca

SEQ ID NO: 550144 - DNA, 565 bp, Homo sapiens
ttctggaaaggggtttctgaggaaagtgaaaggaaagacaaggttgcaatgttaatatctagactttttgaagacatagtatggtaacttcggggtgtgtgtgtgtgtgtgtgtagtttcttttctaccagaaactcattatagaaggcatattgcagggccgggtgcagtggctcactcctgtagtcccagcactttgggaggctgaggcgggtggatcacgaggtcaggagatcgagaccatcctggctaacacggcgaaaccccgtctctactaaaaatacaaaaaattagccrggcgtggtggcgggcgcctgtagtcccagctactcgggaggctgaggcaggagaatggcgcgaacccgggaggcggagcttgcagtgagccgagatcctgccaccgcactgcagcctgggcgacaaagcgagactctgtctcaaaaataaaaagaatgcatattgcataactttatcactttagggatagggtagctagatcatgatgttttagcaatttgccgaaggaaagttagaatattagaaatcaataagtagataaaaaccg

SEQ ID NO: 550145 - DNA, 565 bp, Homo sapiens
ttctggaaaggggtttctgaggaaagtgaaaggaaagacaaggttgcaatgttaatatctagactttttgaagacatagtatggtaacttcggggtgtgtgtgtgtgtgtgtgtagtttcttttctaccagaaactcattatagaaggcatattgcagggccgggtgcagtggctcactcctgtagtcccagcactttgggaggctgaggcgggtggatcacgaggtcaggagatcgagaccatcctggctaacacggcgaaaccccgtctctactaaaaatacaaaaaattagccaggcgtggtggcgggcgcctgtagtcccagctactcgggaggctgaggcaggagaatggcgcgaacccgggaggcggagcttgcagtgagccgagatccygccaccgcactgcagcctgggcgacaaagcgagactctgtctcaaaaataaaaagaatgcatattgcataactttatcactttagggatagggtagctagatcatgatgttttagcaatttgccgaaggaaagttagaatattagaaatcaataagtagataaaaaccg

SEQ ID NO: 550146 - DNA, 565 bp, Homo sapiens
ttctggaaaggggtttctgaggaaagtgaaaggaaagacaaggttgcaatgttaatatctagactttttgaagacatagtatggtaacttcggggtgtgtgtgtgtgtgtgtgtagtttcttttctaccagaaactcattatagaaggcatattgcagggccgggtgcagtggctcactcctgtagtcccagcactttgggaggctgaggcgggtggatcacgaggtcaggagatcgagaccatcctggctaacacggcgaaaccccgtctctactaaaaatacaaaaaattagccaggcgtggtggcgggcgcctgtagtcccagctactcgggaggctgaggcaggagaatggcgcgaacccgggaggcggagcttgcagtgagccgagatcctgccaccgcactgcagcctgggygacaaagcgagactctgtctcaaaaataaaaagaatgcatattgcataactttatcactttagggatagggtagctagatcatgatgttttagcaatttgccgaaggaaagttagaatattagaaatcaataagtagataaaaaccg

SEQ ID NO: 550147 - DNA, 710 bp, Homo sapiens
cctsttttgtgtttggtacctgacagagaagtcatactggctgcgtgtttcttgatcagattttatgttccacttcaggttcatgggtgtccctgtgggaatatggtcctctttacatgcttagaatcaagccattgggttttcattgtcatattatcttggaaccaaatcaatttggccctctataagtaaactccactacgaagtgcataggtttgtcctttaaccaaatctggagatttggacactttatccaagtcaattggtttttccacttagccttccccttatattaatccagccttctgttttgactcctgtgctctactactcaacctcctgttcagactcctggagtccttgtccctctagttctactctgtctcaactcacaaaactgacatcagccataattattaagtaaaggtaatatgtgatcctctgacatcctggagaatgcaaatgaattgatatttctcctaactctgcaatgaagagtcagacttgaaacgctagtactgtcatgtgatttattactataaaaatattcaatgaaaaatgtgcatctttttccaaacttgtcatttgggattggcaattcaaaaaacaataataatgcttggagaatcaaaattatctacctcattctctcaaaatatgagttacccaggtaatcaaagtgacaatgatgaaatagatataggttaagt

SEQ ID NO: 550148 - DNA, 710 bp, Homo sapiens
cctcttttgtgtttggtrcctgacagagaagtcatactggctgcgtgtttcttgatcagattttatgttccacttcaggttcatgggtgtccctgtgggaatatggtcctctttacatgcttagaatcaagccattgggttttcattgtcatattatcttggaaccaaatcaatttggccctctataagtaaactccactacgaagtgcataggtttgtcctttaaccaaatctggagatttggacactttatccaagtcaattggtttttccacttagccttccccttatattaatccagccttctgttttgactcctgtgctctactactcaacctcctgttcagactcctggagtccttgtccctctagttctactctgtctcaactcacaaaactgacatcagccataattattaagtaaaggtaatatgtgatcctctgacatcctggagaatgcaaatgaattgatatttctcctaactctgcaatgaagagtcagacttgaaacgctagtactgtcatgtgatttattactataaaaatattcaatgaaaaatgtgcatctttttccaaacttgtcatttgggattggcaattcaaaaaacaataataatgcttggagaatcaaaattatctacctcattctctcaaaatatgagttacccaggtaatcaaagtgacaatgatgaaatagatataggttaagt

SEQ ID NO: 550149 - DNA, 710 bp, Homo sapiens
cctcttttgtgtttggtacctgacagagaagtcatactggctgcgtgtttcttgatcagattttatgttccacttcaggttcatgggtgtccctgtgggaatatggtcctctttacatgcttagaatcaagccattgggttttcattgtcatattatcttggamccaaatcaatttggccctctataagtaaactccactacgaagtgcataggtttgtcctttaaccaaatctggagatttggacactttatccaagtcaattggtttttccacttagccttccccttatattaatccagccttctgttttgactcctgtgctctactactcaacctcctgttcagactcctggagtccttgtccctctagttctactctgtctcaactcacaaaactgacatcagccataattattaagtaaaggtaatatgtgatcctctgacatcctggagaatgcaaatgaattgatatttctcctaactctgcaatgaagagtcagacttgaaacgctagtactgtcatgtgatttattactataaaaatattcaatgaaaaatgtgcatctttttccaaacttgtcatttgggattggcaattcaaaaaacaataataatgcttggagaatcaaaattatctacctcattctctcaaaatatgagttacccaggtaatcaaagtgacaatgatgaaatagatataggttaagt

SEQ ID NO: 550150 - DNA, 710 bp, Homo sapiens
cctcttttgtgtttggtacctgacagagaagtcatactggctgcgtgtttcttgatcagattttatgttccacttcaggttcatgggtgtccctgtgggaatatggtcctctttacatgcttagaatcaagccattgggttttcattgtcatattatcttggaaccaaatcaatttggccctctataagtaaactccactacgaagtgcataggtttgtcctttaaccamatctggagatttggacactttatccaagtcaattggtttttccacttagccttccccttatattaatccagccttctgttttgactcctgtgctctactactcaacctcctgttcagactcctggagtccttgtccctctagttctactctgtctcaactcacaaaactgacatcagccataattattaagtaaaggtaatatgtgatcctctgacatcctggagaatgcaaatgaattgatatttctcctaactctgcaatgaagagtcagacttgaaacgctagtactgtcatgtgatttattactataaaaatattcaatgaaaaatgtgcatctttttccaaacttgtcatttgggattggcaattcaaaaaacaataataatgcttggagaatcaaaattatctacctcattctctcaaaatatgagttacccaggtaatcaaagtgacaatgatgaaatagatataggttaagt

SEQ ID NO: 550151 - DNA, 710 bp, Homo sapiens
cctcttttgtgtttggtacctgacagagaagtcatactggctgcgtgtttcttgatcagattttatgttccacttcaggttcatgggtgtccctgtgggaatatggtcctctttacatgcttagaatcaagccattgggttttcattgtcatattatcttggaaccaaatcaatttggccctctataagtaaactccactacgaagtgcataggtttgtcctttaaccaaatctggagatttggacactttatccaagtcaattggtttttccacttagccttccccttatattaatccagccttctgttttgactcctgtgctctactactcaacctcctgttcmgactcctggagtccttgtccctctagttctactctgtctcaactcacaaaactgacatcagccataattattaagtaaaggtaatatgtgatcctctgacatcctggagaatgcaaatgaattgatatttctcctaactctgcaatgaagagtcagacttgaaacgctagtactgtcatgtgatttattactataaaaatattcaatgaaaaatgtgcatctttttccaaacttgtcatttgggattggcaattcaaaaaacaataataatgcttggagaatcaaaattatctacctcattctctcaaaatatgagttacccaggtaatcaaagtgacaatgatgaaatagatataggttaagt

SEQ ID NO: 550152 - DNA, 655 bp, Homo sapiens
cattcattagtttgtaattcgaagtataaaatagcaaatactctctaagcataaaatgatggctgtgtcatcaagcatagagaaacaataagtttattgcctctaagttaaaaaagcatattgtttatgtttttagaaatagaattcaaaatatttaaggtctgtagtcttagaggatttaagactctcacatgatatttaaagaaaggaaatacaatctcatttaagaaaaaataccttcaacattttgaggcatgtgattcagaaaacaataccaagtctttctttagtactcccatattagagttgggcatttgamaaatgtatccatctatccactgtatcattgattttagaggtgatttgtcactctgcaaggggtcttctcttgagtttgacagcttttgatgaaaatctgaaattagagaagaattacctgagcagagacagatgagccaaatgacatgaggcactgaagataagtaccccagtcttgttctcagattgatgatttatttatcagaatgcactggggaaagtaaagtttatcacaagtgattgaggaaacaagcaaaaaagataaaagacaataaataaatagtgtaaattgaacacgttactcctgaaatgtccactaatacttaaacaagatgga

SEQ ID NO: 550153 - DNA, 528 bp, Homo sapiens
aagagtgaatatgaatatggacagttttattcttgttattttctgggaatagtgacatctaaacaaaactcttgatgataaaaaagcaagcattgccatcagtagatatatcttacttccttttcaagaaatatcccttgcctattttagctataatgctgcctgccttcaccactctgcccccagtgtgtatatctatacagcagctagagtgtctcatttaaaacttaagttgaaacgattcgtttctccagtggcttctctctttcctactcaggaataaaagccagtaccttacaagctatttgagagcacctcacttagttgttcttttggaaatgtatgtccagccacccctgcaagcttgcaattgcttcaaccctcyggacaaactctgcctcagtattctcacctcagatatgggccaggcttgctgtcttacctatcccaatctgtttctcaaatgtcattttaagaatctgagcttccctgatgaaaaccataaatcaatagaccacaaccccaccc

SEQ ID NO: 550154 - DNA, 528 bp, Homo sapiens
aagagtgaatatgaatatggacagttttattcttgttattttctgggaatagtgacatctaaacaaaactcttgatgataaaaaagcaagcattgccatcagtagatatatcttacttccttttcaagaaatatcccttgcctattttagctataatgctgcctgccttcaccactctgcccccagtgtgtatatctatacagcagctagagtgtctcatttaaaacttaagttgaaacgattcgtttctccagtggcttctctctttcctactcaggaataaaagccagtaccttacaagctatttgagagcacctcacttagttgttcttttggaaatgtatgtccagccacccctgcaagcttgcaattgcttcaaccctccggacaaactctgcctcagtattctcrcctcagatatgggccaggcttgctgtcttacctatcccaatctgtttctcaaatgtcattttaagaatctgagcttccctgatgaaaaccataaatcaatagaccacaaccccaccc

SEQ ID NO: 550155 - DNA, 528 bp, Homo sapiens
aagagtgaatatgaatatggacagttttattcttgttattttctgggaatagtgacatctaaacaaaactcttgatgataaaaaagcaagcattgccatcagtagatatatcttacttccttttcaagaaatatcccttgcctattttagctataatgctgcctgccttcaccactctgcccccagtgtgtatatctatacagcagctagagtgtctcatttaaaacttaagttgaaacgattcgtttctccagtggcttctctctttcctactcaggaataaaagccagtaccttacaagctatttgagagcacctcacttagttgttcttttggaaatgtatgtccagccacccctgcaagcttgcaattgcttcaaccctccggacaaactctgcctcagtattctcacctcagatatgkgccaggcttgctgtcttacctatcccaatctgtttctcaaatgtcattttaagaatctgagcttccctgatgaaaaccataaatcaatagaccacaaccccaccc

SEQ ID NO: 550156 - DNA, 661 bp, Homo sapiens
aatctacagattttgtaggtttgtgccttgacagacgaccggtatctgtttctcttttcatgatgaagtatctaacaaagctctgtccaaaattttgaatttctcgttaaawgcatcatgattatagaacagaggttacaatcaattattcagtcacacaatcactctcatcagtcattaaggtgcatacctggtgttccagttattcagtgtggtataacaaactacctggaacttaatggcttgaaatagtcaccattacattatgattgtccattctctgcatcaataattaggatttggcaaagagggaatggtttgtttacagacagactccaatgtctgggaataacttgaaaatataaagatttctttttaaaaatgttatctttaaatttatttttattccatatatttaaggtgtacacaatgatgttttgatatacacatgaatttggatctatgttttaagatcaccgtctgtatctggtgaggggtaggagagaatagaagaatgctgctagagatggctccttaaacagaccagagaaaagagtctgaagtagtaacttagctagcatgtttaatctacatagagtataactagaaaatagtcatattctaggttgagatacaagaaatgggatgtgtaagagaaaga

SEQ ID NO: 550157 - DNA, 661 bp, Homo sapiens
aatctacagattttgtaggtttgtgccttgacagacgaccggtatctgtttctcttttcatgatgaagtatctaacaaagctctgtccaaaattttgaatttctcgttaaatgcatcatgattatagaacagaggttacaatcaattattcagtcacacaatcactctcatcagtcattaaggtgcrtacctggtgttccagttattcagtgtggtataacaaactacctggaacttaatggcttgaaatagtcaccattacattatgattgtccattctctgcatcaataattaggatttggcaaagagggaatggtttgtttacagacagactccaatgtctgggaataacttgaaaatataaagatttctttttaaaaatgttatctttaaatttatttttattccatatatttaaggtgtacacaatgatgttttgatatacacatgaatttggatctatgttttaagatcaccgtctgtatctggtgaggggtaggagagaatagaagaatgctgctagagatggctccttaaacagaccagagaaaagagtctgaagtagtaacttagctagcatgtttaatctacatagagtataactagaaaatagtcatattctaggttgagatacaagaaatgggatgtgtaagagaaaga

SEQ ID NO: 550158 - DNA, 661 bp, Homo sapiens
aatctacagattttgtaggtttgtgccttgacagacgaccggtatctgtttctcttttcatgatgaagtatctaacaaagctctgtccaaaattttgaatttctcgttaaatgcatcatgattatagaacagaggttacaatcaattattcagtcacacaatcactctcatcagtcattaaggtgcatacctggtgttccagttattcagtgtggtataacaaactacctggaacttaatggcttgaaatagtcaccattacattatgattgtccattctctgcatcaataattaggatttggcaaagagggaatggtttgtttacagacagactccaatgtctgggaataacttgaaaatataaagatttctttttaaaaatgttatctttaaatttatttttattccatatatttaaggtgtacacaatgatgttttgatatacacatgaatttggatctatgtttyaagatcaccgtctgtatctggtgaggggtaggagagaatagaagaatgctgctagagatggctccttaaacagaccagagaaaagagtctgaagtagtaacttagctagcatgtttaatctacatagagtataactagaaaatagtcatattctaggttgagatacaagaaatgggatgtgtaagagaaaga

SEQ ID NO: 550159 - DNA, 548 bp, Homo sapiens
ggaaagtgagagcatttggtggttagagagtaaaaaggtagtagaaaccatggtttggacaaggcaattaaataggagtgaagtagagcaaataaaaggaaacactattaaggcagaaggttgatactatagaattctgagataataatmaactattgtttggaaataaaatttgtttatatttatacttgcttattttaccatctcattttttggttaaagttacaagaagtagagttatgtcctagttttctgtaaccagtgacaatagtaaaaacaagaattaattgaccacatactatttttgagactattttatgtgattttattgattaaataattgatatttcaaacaactctgtgaaaaaggaaatatcactaagcctattacatagacaaaaaagaagagcagagaagcaaagcatcacagggctggtaaattgcagagctgagattagaacgaagtagtttgactttagagcctgcgtgcttacctggactttttcactttcttgaccagaatttagatctgatttctagctatcttt

SEQ ID NO: 550160 - DNA, 617 bp, Homo sapiens
caggcgcctgccaccacgcccggctaatttttcttttctttttttttttttttagtagacacggggtttcaccatgttagccaggatggtctctatctcctgacctcatgatccgcccacctcagcctcccaaattgctgggattacaggcgtgagccaacgcgcccggcaacatcactattataaagctgaaaatcagtgcttgagatattttgcaggcccttcattagaggaatcagctggcaccactcggrtggataaaaggtctcatctgatcttgtgtcccccactcaggaaatgacttaagtgcaagatagctatgattccctataacttcatcttcgactcaaccagtgggcactcctgactcactggctgcccccgacacccaccaaattatccttaacaactctcatcctcaaatgactggggagactgatttaagtaatagtaaaactccagtctcctgcacagctggttctggatgaattactctttctctaatgcaatttccctatcttgataaattggctctgtctaggcagaaggcaagttgaacccagtgaatggttacaatggtacctgcaatttattcacaaactgttgagcaaatagta

SEQ ID NO: 550161 - DNA, 843 bp, Homo sapiens
aggtcataatctcttttaattctgattttttaaaaaatccattcaatataaatagcaactgcttcatattggctaagactaggaaatttctcagacaaaatactattaattttgcatcttattaactggatattattctcatgctttaactgctgcctgtttgtggaaacttaagtatatgttaattatgctaaatataataattagaaaaatgaactagctaaataaaattctcagtaagctggctagaaggaatagagaaaaagaggagcagccaggaatgtggaaggtagacagtattctgtaaacatctgtctcagtacagaagcgaaatcattatagctatagctctggcttcccttaagctccagaagcttggcaaaaaaaaaaaaaaaaaaaaaatcctaaatatacagtttttctcctatgaacatatttttaaggtacaaattttcatttctgtaaaagccctttgagattttataaaactgtatcttttgctatttaggtgatctcatcttgttccatgactacctcagactggacttctccctttgctcccccaaagtcaaytggacacctttgctcaggtgtttctgaagtaacagaacctcatctgtctaaattgaagaaattcgtccgtaaattgagcaaaatggaacaggcatctgaaatttctaaatatgcaatattttatgcctgttcaataaatatgtttaacaagtgaatgcaaaaacaggatatgctacttaaaaatctaaatgggcctagggaaattcacaccttaattaattttattcaaatgattgcttgcttctttgtttttcctaaagtcatgagtag

SEQ ID NO: 550162 - DNA, 843 bp, Homo sapiens
aggtcataatctcttttaattctgattttttaaaaaatccattcaatataaatagcaactgcttcatattggctaagactaggaaatttctcagacaaaatactattaattttgcatcttattaactggatattattctcatgctttaactgctgcctgtttgtggaaacttaagtatatgttaattatgctaaatataataattagaaaaatgaactagctaaataaaattctcagtaagctggctagaaggaatagagaaaaagaggagcagccaggaatgtggaaggtagacagtattctgtaaacatctgtctcagtacagaagcgaaatcattatagctatagctctggcttcccttaagctccagaagcttggcaaaaaaaaaaaaaaaaaaaaaatcctaaatatacagtttttctcctatgaacatatttttaaggtacaaattttcatttctgtaaaagccctttgagattttataaaactgtatcttttgctatttaggtgatctcatcttgttccatgactacctcagactggacttctccctttgctcccccaaagtcaactggacacctttgctcaggtgtttctraagtaacagaacctcatctgtctaaattgaagaaattcgtccgtaaattgagcaaaatggaacaggcatctgaaatttctaaatatgcaatattttatgcctgttcaataaatatgtttaacaagtgaatgcaaaaacaggatatgctacttaaaaatctaaatgggcctagggaaattcacaccttaattaattttattcaaatgattgcttgcttctttgtttttcctaaagtcatgagtag

SEQ ID NO: 550163 - DNA, 948 bp, Homo sapiens
agggtgggattctggcaaaaggaagtgatagtgtttgtaacagaatactgacaaatcaaatagtaaaagtttaaataagaaaataaggaactgatgacaattttatttttaaaaaattggattaattatattaccactaaaattactatctaaatcttcctaaatatctaaagaaatttataaaatattgattaaagaaaacacaatgtgtagagaaagaagcatggcaaatataacaatgcacatgatcattacaacataaaataatttctcagagatgacaccaaacaaaatagcaggtcattaaatgtgaacaagcttaacttacctattaaaatacaatgattattaattggactcaccaagaaagaatcactatgttcaagagaaacattgaaaacaaagtgattaagaaagtctaagaataaaagtatatgcaaattaaatacaaaatgagataccataatatttctattaggatggctaaatttttttaaactaagtgtaatgattgattaagaaagtctaagaataaaagtatatgcaaattaaatataaaatgagataccatattatttccattagaatggataaaaattttaaaacgaactgtaccgatagctagcaagtatgcaaagcaacaggaactctcatttattgctagcaaaaatgcaaaatgacccagccactttgaaagacagtttggcagtttcttaaaaagctaaacatattcttaccctataatccagcagttgcactccttaatatttacccaactgatttgaaaactgcctactcaaaaacctgcatgtgratatttatagcagttttatttatacttacaacacctagaaacaatgttattcaatagttgagtagataataaactgtagtatacccatattatgtattcaataataaaatatttgagctatcaaaatggaaaga

SEQ ID NO: 550164 - DNA, 648 bp, Homo sapiens
ctctggggtggggggtgaggtcagcctgcgctggtctgacccagtccgactcctcagggcggccggagcctgtggtcgggaggcgtgcggggctgtgcccagagcagcgggtcggtctctttggagcacttcccttctgcgcgcgtccagcaccccggaattgattcacagccagtctgggtctgttttctaaccaagcgccttgctcatgaggcacgctggtgtcctttagaagggacccaaagcttaaagttgcctttgtcagttccctaagaacccacataaaactggccacgtccagggcctctcctgcctccccggcacgaagcggtgcggagcagcaaggccagcctggcctccscagggaaagctctgcctccagcctggtcgaggccctcccctcagcagaggcaaccctaacagactccctttcccaggagctgacgggcgagtgccttagagccctgttctcagagccaggcaggccgctgcggaggctgtagggaccaaacaaagtcaggtctgtgaaatgctcggcgcgggggcgcggggcccgcagggagtccgggttctctacgtgtcctccctctggctttcctcatcccttcccttccttcctcctccctctctccttctttctcctcctcc

SEQ ID NO: 550165 - DNA, 1466 bp, Homo sapiens
tattagttattgttgatgtataagaaaactattggtttgttttgatgttcaccttgcccatgcccatcatccccaacttttatttattctgatacctttgcagwgttctgactgatttctcttggaatttctagagggacaacgctgtcatctgcaaataactcaacatgcttattctccatctcattccttatctgatcacatcatctaggatctcgagaagtatcaagtgtttattcttatcaaattttatcattttctttttggtgattttaaaaggaatgcaaaatatttcacaatctattttcaatatttgggagatgacttttatgaagttaagaatgcatgctggccaggcacggtggctcacacctataatcccagcattttgggaggctgaggtgggcaggtcactcgagcccaggagttcaagaccagcctgggcagcatggagaaaccctatctctacaaaaaatacaaaaattagctgggcatggtggcacgtgcctgtagtcccagctactcaggaggctgaggcaagaggattgcttgggcccaggaattcaaggttgcagtgagccatgattacagcatcgcactccagcctgggtgacagtgagaccctatctcaaaaaagaaaagaaaaggaagaaaagaaagcatgctttgccccatagcaaaagagtttttatcatcaagtgttgaattttattgaacatcttggaatttattgatgcatcccatggctttctgttctgataaagcagtgacttgtggtcgctgatgtcctaatattgacccatctttatatttctgaatgtgatgggattctgagcctctgtatttctaggggagactagtctctgtgtgatgtatgacgaatcagaaaattcattccttatctgatcacatcatctaggatctcaagaagtatcaaatgtttattcttatgaaattttatcagtttttctatgatctgtaagaataactttgaatggtgggttgtgtgtgtgtgtgtgtgttttgatacagggtcttgctctgttgcccaggttggagtacagtggcccaatctcggctcactgcaacctctgcctcccaggttcaagcgattctcccgcctcagcctcccgagtagctgggattacaggcacgtgccactacacctggcttatgtttgtattttaagtagagatggggtttcaccacgttggccaggctggtctcgaactcctggactcgagtaatccgcccatctcggcctcccaaagtgctgggattacaggcgtgagccactgccccccagcccactttgaatgtttctgaccactaaacagtaagggttttgtgtgcatgggatcatcgactgtgtgcacttaggcatctgtctcctcccacgcaaccgtgacatttgtgaggctcagccctgctgtcacaccttcctcctcattgccgaaggtcaccac

SEQ ID NO: 550166 - DNA, 1466 bp, Homo sapiens
tattagttattgttgatgtataagaaaactattggtttgttttgatgttcaccttgcccatgcccatcatccccaacttttatttattctgatacctttgcagagttctgactgatttctcttggaatttctagagggacaacgctgtcatctgcaaataactcaacatgcttattctccatctcattccttatctgatcacatcatctaggatctcgagaagtatcaagtgtttattcttatcaaattttatcattttctttttggtgattttaaaaggaatgcaaaatatttcacaatctattttcaatatttgggagatgacttttatgaagttaagaatgcatgctggccaggcacggtggctcacacctataatcccagcattttgggaggctgaggtgggcaggtcactcgagcccaggagttcaagaccagcctgggcagcatggagaaaccctatctctacaaaaaatacaaaaattagctgggcatggtggcacgtgcctgtagtcccagctactcaggaggctgaggcaagaggattgcttgggcccaggaattcaaggttgcagtgagccatgattacagcatcgcactccagcctgggtgacagtgagaccctatctcaaaaaagaaaagaaaaggaagaaaagaaagcatgctttgccccatagcaaaagagtttttatcatcaagtgttgaattttattgaacatcttggaatttattgatgcatcccatggctttctgttctgataaagcagtgacttgtggtcgctgatgtcctaatattgacccatctttatatttctgaatgtgatgggattctgagcctctgtatttctaggggagactagtctctgtgtgatgtatgacgaatcagaaaattcattccttatctgatcacatcatctaggatctcaagaagtatcaaatgtttattcttatgaaattttatcagtttttctatgatctgtaagaataactttgaatggtgggttgtgtgtgtgtgtgtgtgttttgatacagggtcttgctctgttgcccaggttggagtacagtggcccaatctcggctcactgcaacctctgcctcccaggttcaagcgattctcccgcctcagcctcccgagtagctgggattacaggcacgtgccactacacctggcttatgtttgtattttaagtagagatggggtttcaccacgttggccaggctggtctcgaactcctggactcgagtaatccgcccatctcggcctcccaaagtgctgggattacaggcgtgagccactgccccccagcccactttgaatgtttctgaccactaaacagtaagrgttttgtgtgcatgggatcatcgactgtgtgcacttaggcatctgtctcctcccacgcaaccgtgacatttgtgaggctcagccctgctgtcacaccttcctcctcattgccgaaggtcaccac

SEQ ID NO: 550167 - DNA, 970 bp, Homo sapiens
ctgtaaccttgaactcctgggctcagacaatcgtcccgccttggcctcccaaagttctggtattgctggcgtgagactctgagcctggcccatctttttaatatctgtaggatctttctttcttctattttttcattcttgatattggaaatttacrtcagtaccctttaaaaaaaaatcagtctgggccaggcgcggtggttcacacctgtaatctcagcactttgggaggccaaggtgggtgcatcacttgaggtcagcagttccaggccagcctgtccaacatggtgaaaccccatctctactaaaaatacaaaaattagccgggcgtggtggcttatgcctgtaatcccagctactcaggaggctgaggcaggagaatcacttgaacccaggagatggaggctgcagtgagccgagatcacaccattgcactccagcctgggcaacagagtgagactccatcaaaaaaaaaaaaatcagtccagacagaatttccagaagacaaaacaaaacaaaaaaacagcagcttttggcttcagtaatttttctctactgttttggtctgcttcctatttttcattaatttcagttctgatatttattatttcctttcttctgtttactttgtgcttaatttgcttttttcctggcttcttcagttggaggctcaggtcgtgtctttgtgctccttcttttccgcatttagtgctataaatttcccattaagcgctgcattagcttttccccagaaatttggatatgctgttattttcaattaactaaacaaagttttaattgtctcccaagagtcatacaatttattgagaaatgtgttgtttaaaatttcaaaatatgttgggactttccagataactattttttacttcttgcttaactctgttatgacctaaaagcatactttgtaggatttgtgtttttaaaaatttgttaagatatatcttatggc

SEQ ID NO: 550168 - DNA, 1356 bp, Homo sapiens
gtctcttctttgctctccaggagaaaagctgcctttacactcctccgaagaagctcaaaatctgatgggccagtcatcaggtaacacaaagccacactgacaggagaacaggccagggcagcagagcagagccccagtgggaggaggtgtgggggccctgccgctgcagcagtttccagcttccatgggaggctgtgggccagcctcaggtgctgccaagggygtgggtggtgccatgctgccactgtggctggatggtggggcctgaggtgctcagagcagggcaccccggccatgggaggcggccgtgggagcaggaaatagaggtctcaccatggtgtgctttggaaatgggttttgtaggactacaagcaaacccttaaggaggaagatcagtctgtgctggatttgcctgcacccctcccgacttgcattaaaatgttcattcctcagatactgtggggtagcacatagatttgtagattcagtgaccaaggccatgaaacagacacagttgtttgcctggggcttagcaggttcctaggtgcccgtgaagaagatgccacacacgcaccacaccttgtggctccatgtgcacatggccggtgccacagtggcttcctggtggccaggcaggtgtcctgtaatgaccctcccctcaccaaggccctgaggactgcagtgcacacacatgccagccacagcagggttaaattgggtgggcagcgatgggaggtgtttgtggcctctttgaatgctgcggccaggagacttccagcgtgggcttggactgcaggttggggcagcctcctttacccctggtacctggaatgtcgtcatcttcataagaaacagactcacctgggccgtgctgtcctgagatgagtgaacacgtcggccatgccgtcctgagatgaacaaacacgtcggccatgctgtcctgagatgaacaaacacgtcggccgtgccgtcctgaaatgaatgaacacatcagccatgctgtcctgaaatgaatgaacacatcggccatgctgtcctgagatgaatgaacacctgggccatgccgtcctgaaatgaatgaacacgtcggccatgccgtcctgagatgaatgaacacatcggccatgctgtcctgagatgaacaaacacccgggccatgctgtcctgagatgaacgaacacccgggccatgctgtcctgagatgaacgaacacctgggccatgctgtcccgagatgaatgaacatgtcggccgtgccgtcctgagatgaatgaacacaacggtcatgctgtcctgagatgaatgaacacctgggccatgccatcctgaaatgaatgaacacattggccatgctgtc

SEQ ID NO: 550169 - DNA, 1356 bp, Homo sapiens
gtctcttctttgctctccaggagaaaagctgcctttacactcctccgaagaagctcaaaatctgatgggccagtcatcaggtaacacaaagccacactgacaggagaacaggccagggcagcagagcagagccccagtgggaggaggtgtgggggccctgccgctgcagcagtttccagcttccatgggaggctgtgggccagcctcaggtgctgccaagggcgtgggtggtgccatgctgccactgtggctggatggtggggcctgaggtgctcagagcagggcaccccggccatgggaggcrgccgtgggagcaggaaatagaggtctcaccatggtgtgctttggaaatgggttttgtaggactacaagcaaacccttaaggaggaagatcagtctgtgctggatttgcctgcacccctcccgacttgcattaaaatgttcattcctcagatactgtggggtagcacatagatttgtagattcagtgaccaaggccatgaaacagacacagttgtttgcctggggcttagcaggttcctaggtgcccgtgaagaagatgccacacacgcaccacaccttgtggctccatgtgcacatggccggtgccacagtggcttcctggtggccaggcaggtgtcctgtaatgaccctcccctcaccaaggccctgaggactgcagtgcacacacatgccagccacagcagggttaaattgggtgggcagcgatgggaggtgtttgtggcctctttgaatgctgcggccaggagacttccagcgtgggcttggactgcaggttggggcagcctcctttacccctggtacctggaatgtcgtcatcttcataagaaacagactcacctgggccgtgctgtcctgagatgagtgaacacgtcggccatgccgtcctgagatgaacaaacacgtcggccatgctgtcctgagatgaacaaacacgtcggccgtgccgtcctgaaatgaatgaacacatcagccatgctgtcctgaaatgaatgaacacatcggccatgctgtcctgagatgaatgaacacctgggccatgccgtcctgaaatgaatgaacacgtcggccatgccgtcctgagatgaatgaacacatcggccatgctgtcctgagatgaacaaacacccgggccatgctgtcctgagatgaacgaacacccgggccatgctgtcctgagatgaacgaacacctgggccatgctgtcccgagatgaatgaacatgtcggccgtgccgtcctgagatgaatgaacacaacggtcatgctgtcctgagatgaatgaacacctgggccatgccatcctgaaatgaatgaacacattggccatgctgtc

SEQ ID NO: 550170 - DNA, 1064 bp, Homo sapiens
ccctctgcggagccgggggtcccccgggcggttaccctctgcggagccgggggtcccccgggcggttaccctctgcagagcggcccctccccatcactgtcagtccccatgattctcagcagtgatgttgtcccctcgggttgggggcacccaagcccctgcctcgcgtgggcctaagccaggcttgccctgccctccccaccccaaataccccctcacacccgcttcctgtctccgcagggctccaggggacccaagggctacaaggtgagcgtgggctgctgggaggggggagttctgcccccacggcagcatgtctgacctgcatctgactcctgccttcgttttcccgcctcacagggagagaagggcaagcgtggcatcgacggggtggacggcgtgaaggtgactggggggagataggatggacggggagggacgaggaggaatggggcgagatggggagggacggagtggacggcgtgaaggtgacccggggagggatggggtggacagtgtgaaggtgaccaggggaaggacggggagggacggggagggatggggtgaggtgatcccggcaggagggacagggaggagtggggtggacggtgtgaaggtgaccccaggggggtgtctgctaggcagggctttccagggagggtgtggagggcatggagggcaccaagtctgacagktgattggcctcagtttacccacttggccgtcagattttctagttttcttcctctttccagggggagatggggtacccaggcctgccaggctgcaagggctcgcccgggtttgacgtaagtcacttcctctcactgatactttaaaactagcgctgtcagcagcacctcgtgtggaccgttttgacttctgtctgggcggtctggggctgctgccagaggccgcggtggcctctgccggtggtgtcatgctgccctcttttctccagggcattcaaggaccccctggccccaagggagaccccggtgcctttggactgaaaggagaaaaggtgagtgacttgcggcccctggaggaccagggccttcacg

SEQ ID NO: 550171 - DNA, 1064 bp, Homo sapiens
ccctctgcggagccgggggtcccccgggcggttaccctctgcggagccgggggtcccccgggcggttaccctctgcagagcggcccctccccatcactgtcagtccccatgattctcagcagtgatgttgtcccctcgggttgggggcacccaagcccctgcctcgcgtgggcctaagccaggcttgccctgccctccccaccccaaataccccctcacacccgcttcctgtctccgcagggctccaggggacccaagggctacaaggtgagcgtgggctgctgggaggggggagttctgcccccacggcagcatgtctgacctgcatctgactcctgccttcgttttcccgcctcacagggagagaagggcaagcgtggcatcgacggggtggacggcgtgaaggtgactggggggagataggatggacggggagggacgaggaggaatggggcgagatggggagggacggagtggacggcgtgaaggtgacccggggagggatggggtggacagtgtgaaggtgaccaggggaaggacggggagggacggggagggatggggtgaggtgatcccggcaggagggacagggaggagtggggtggacggtgtgaaggtgaccccaggggggtgtctgctaggcagggctttccagggagggtgtggagggcatggagggcaccaagtctgacagttgattggcctcagtttacccacttggccgtcagattttctagttttcttcctctttccagggggagatggggtacccaggcctgccaggctgcaagggctcgcccgggtttgacgtaagtcacttcctctcactgatactttaaaactagcgctgtcagcagcacctcgtgtggaccgttttgacttctgtctgggcggtctggggctgctgccagaggccgcggtggcctctgccggtggtgtcatgctgccctcttttctccagggcattcaaggaccccctggccccaagggagaccccggygcctttggactgaaaggagaaaaggtgagtgacttgcggcccctggaggaccagggccttcacg

SEQ ID NO: 550172 - DNA, 1117 bp, Homo sapiens
ggggagcagccatgccctctgagctcccacaaggggctgtagcaaggagcatgtcccaggcagggaccagttctctgggaaccaagcttctgttgggccagtggtttatagcccttrgcatcaggcttggtggaggagcagggtagggggggtcggggcacacagcagatggtcagagacccggggatgtgagaagcaggtagttccctcagggcccttattctcagctaaagagcctgagggcccaggaggtcccctgagccctcagaacctgtaggcaggagtggctctgggcctgtgtctccaacacaagcagctgcaccgcccccaagcctgggcataagaggctcagactgtgcagaaggaccaagagcaaacctcaaagcccctcatgtccctgccccggtcacaggcactggcctttcctaggtgctcatgtgtgtagctcacggcgtcaccgtaaggcactcggctcctcggacccaccccgtgtggaagagcacagctgggaccacacaccaaccttccaaggacccactgggagccctactcacacggactgtggccagagccctggccaaggggttctcagtggggaatatgctcacttcatcttggaagattcagccaactctccaccagaaagtcatcatcaacagcccctaccctcgaccatggatgagagcaaatgctccctgggcgccagccagatctggatcctttgaccattccgacagcagtgatcgaggaacagaaatgcccagtgtctccctgactggctggggcatcatccagaccaggcctcctggctgcagcccctctcccaggctgtcctctgcacaagggtctgtagcagttgcaggcggaggcaggacagccatcctcaagctgcgactcgcgctacgaacactctctcacacccaggccttgcggtgtccatggtctccctgggcagatcttggccaagggtgtgctttaggtggcctcatctgcgtccggccgaggcctgcccgcccggtccgttttgttttctgtgatttatcgtgaggcttggttgtgttggtggtggggaaatacagttttctattccatctggaaattacttatgtatttggtg

SEQ ID NO: 550173 - DNA, 544 bp, Homo sapiens
cgtaactgaggacgcccccaacccatggccacggcccctcgggccgtcacacagggctgcggctcatggggccctgctagagcaggcgtctgtcctcagtcagtgcgaccgacttgaaacccaccctgactccctgcttcaattacttgggaaagtaaatcacctcagtgttgtttcttggctccgagggtcttgttttatcagcagccgggatgcaacagatgggtcatctcatcctcatgggaagggacgtacggcagaaagcacaacccagtgggccggccacacctccagccctgtgacgggcacccaccaccaccaacccagtgggccggccacacctccagccctgtgacgggcacccaccaccaccaacccagtgggccggccacacctccagccctgtgacgggcacccaccaccaccaacccagtgggccggccacacctccagccctgtgacgggcacccaccaccaccaacccagtgggccggccacacctccagccctgtgatgggcacccaccaccaccamcatcccagtg

SEQ ID NO: 550174 - DNA, 641 bp, Homo sapiens
aaacattctcttatttttaaacaaacattattagctatatgctgcatattgttaaatactggagacgaaacatgattaacatccattcattcccatttcttggactttcccaaatttatacatttcaaaaacaccaaaattacctggtctagtaatcatggacatgaagatgtgtaacgaatccctttttatatgctgggcacagtgtgaggcactttacagacattgactcatttaatccttaatcccttcacaaatgccagtgttaatttcttcactttactgttcaggaagctgagacttcagttaatatgtttaaggttacggtgagattgactcctaggtctgtatgattataaagtccacaatgtgtatcatrtatttatcatcagtttgcctagaattgtattgaaatactttttcaaaataaaatgagcacatctggaatgagcctcatagattgctatttaatatttctgtgatctcactttgcttgcaaagtttaacattcagcaatccacacaaacactgcacttatagactccttttcagtaaatatacacatttatagcaacaaagagaatggtgaacattttaaaagtagatgtatggccctattatctgctttgctacatagagga

SEQ ID NO: 550175 - DNA, 641 bp, Homo sapiens
aaacattctcttatttttaaacaaacattattagctatatgctgcatattgttaaatactggagacgaaacatgattaacatccattcattcccatttcttggactttcccaaatttatacatttcaaaaacaccaaaattacctggtctagtaatcatggacatgaagatgtgtaacgaatccctttttatatgctgggcacagtgtgaggcactttacagacattgactcatttaatccttaatcccttcacaaatgccagtgttaatttcttcactttactgttcaggaagctgagacttcagttaatatgtttaaggttacggtgagattgactcctaggtctgtatgattataaagtccacaatgtgtatcatgtatttatcatcagtttgcctagaattgtattgaaatactttttcaaaataaaatgagcacatctggaatgagcctcatagattgctatttaatatttctgtgatctcactttgcttgcaaagtttaacattcagcaatccacacaaacactgcacttatagactccttttcagtaaatatacacatttayagcaacaaagagaatggtgaacattttaaaagtagatgtatggccctattatctgctttgctacatagagga

SEQ ID NO: 550176 - DNA, 561 bp, Homo sapiens
gtgataataatctaaacagaccaaaggaaataaatgaatatgttaaaaaaaagacagagaatgagccctgtctgatagaaagcataacaaagcaagtagaagaactctcacaaatgcttgatccaataaagctaggtttgtgctccacaacacttcagcattttaatgtgatttttgatgtttgctttttgcaayggtgattcccagttgcctccctcctatgtctttacaagctgaaatcaagtgaagctacttctgactttttctaaaactaaaacacaacatgaaggtctgcgtattctttcacatgtgcacatatgtggcacttttccatgatgcaacagcagcgggtctctagctaagctacagcagcagctctaagaggcaggggaccctgaaacgaggctgaaaaaaagaatagtccataactgacatcaggcaggctgctgttgtaagcaaagaaagaaggctcacaggggcgtggactcaggccagatcaggctattgtgggagaacacggagcacatgtgtcagctggaaaggggccggctcaggagacaa

SEQ ID NO: 550177 - DNA, 239 bp, Homo sapiens
attcttttgatctttccttcctgcacatgtttttttaaaagacggattaaaataatctctagacatcaaaaagtttatgatagacttggtgtctgtcattcttggattggatagcaattatatgtaatttagaactaatttcctctaacaacctaaaaaaatgctattgtggaatccacataagcactcctgagtttgtatgcatatgtctgtttytcattacaattgtagcacaaagt

SEQ ID NO: 550178 - DNA, 595 bp, Homo sapiens
cagcctcccaaagtgttgggatttcagatgtgagtcactgttcctggccccgtctgcactttctaaattctcctggcctaaagttccactgatgatgatgagccctggaattttgaggtcaataatcctgtagctgaatgtcagagaagtctaatttttttaacagaataattttaataatataattacatcatttaaatcaagtagctgataatgtaatcgcccaatgggttctccttgcccactgcccagatagagctgatttatcaagatgggagttgcaatagaaaagagtttaatttacacagagctaggctaaacgggtgaacagagatttaatactcaaattagtctccctgaaaatctgaaractggggttttttaaggctaatttggcaggttgggggtcagggtggtgagtgctgattggtcaggtcggagatgcaatcatagtggggcccgagtgggttcttgctgaattctgttcctgtgtgggatcacagagctggttgagccagatggaaaatgggtctgggtggctccggctggtgcaaaatgggtctgggtggctccggctggtgcatcagaatggggc

SEQ ID NO: 550179 - DNA, 600 bp, Homo sapiens
gaccataaataaataactttctccactctaaaaccattagtgggacttaccaaaataagcacgtcttgccctgtagcaaaatgataaataaatatagcttttagtactataaaagaagaagaaaaaagtatctttgagaaggatttgaggggcactgccataagataggtgggtataggatgtgtgtaaagcctttaataagcctcaaatatattgtamttttcctgctttcaaagaacttataccttcttgaggaggccagctttccatgaacaatgtaattaaatgggataatgtatgaaaagcacatgcttttggttcacattaaataagaccatcaggctgggcatggtggctcacgcctaaaatcctagcactttgggaggctgaggccggcggatcacttgaggtcaggagtttgagaccagcctggccaacatggtgaaaacccattatatggttaggctttgtgtttccacccaaatctcatctttagttgtaatccccacgtgtcaagggagaggccagttgaaggtaattgaatcataggtggtttccctcatcctgttattgtgatagtgagttctcacgagatctgat

SEQ ID NO: 550180 - DNA, 2020 bp, Homo sapiens
ttcctactacatcataatatgacagagtgcatcacatggcaagagagcaagagcatgtcaacctctcaggtctctggtcttcttataaagccaccagtcccattatggaggccctaccctgatgactttatctaatcctaattatctcccaaaggccccacatccaaatgccaccaatctataaatttgggagttacatttccaacacatgaaattaggaggacatgttcaaacaagagcaccatcatatctgtttttccacttaagataaattccaatggatcaaatatctaattttttgaaagaagtaaagctatataaatactagaagaaaatatgatgaaaattttctataatcaagaaattggaaacacttttctaactctaactcaaaatccagatgcaatacaggaaaagaccaaaattggaggtatacaaaacaacaataacatttttgcatagcaaaagacatcataagcaaaattaaaagataaatgacaaaccgggaatatgatttccaatttatgtcatagacaatgggttaatgtccagtaatgtgttcttcccgggagtgggggtcaggaggatgttatcgcatttgccaatttccatagagtaaatactccaccatagccagtgttaacttgccaatgtaatatcagctgcactaatgctacatcagcgggactgcaaaattcctaaaaatttaacagtcagcacttgcaagctggcactagccagctttagcacactgctgcaaatattcctaatatatgatgggcttctaaagatggagaagggaaggaaacccatcctatggaagataggcaagagatacaaacactttgcagttcacacacacacacaaaatgaaaataaaggacctttaaatatatgaaaatgttgaatcgtactacccgtaaaataaatgcaaatttaaactaaaatgagatgccatttttcaactatcagattgggagaaaatctcaaagttcaacaatataatgtgtttaccaggcggtgaggaaagaggcactcatattttgctggtgggaatgcaaaaaatggtaccatccatgaggagggtgtcagccttaagaatgaaactgaggtaaaattagtataaatcaaaagtgtatttgggccaaattcgagtactttaatttcggaaatgtatgttcaagttgccctgaaatatatgctccaattagcagcagttacaagtgggtttccaaaggaaaaaatggggtggttcctaaattgaacatgagctattggttggctatacattattctttatatcactaatcccaagaacatgaatataatgggtgaaggccacatagtgcaatttatgatagcattttaggtaatttatcagctagtctggaaactacaaggaaggaaagaaaaaactaaatgccattaaccaggctgggtgcagtggcttatgcctgtaatcccagcactttgggagtgtgaggcgggtggatcacttgaagccaggactttgagaaccagcctggccaacaaggtgaaaccccatctctacgaaagaatacaaaaattagccaggtgtggtggtatgcacctgtaattacagctcctcgggagtctgaggcacaagaattgcttaaacccagaaggcagagattacagtgagctgagatgtcgtcactgcactccaatctgggtgacagagcaatactctgtatcaaaaaaaaaaaagagagagagagagagagggaaggaaagaaagagaaaggaagaaaaaaaagaaagaaagaaagaaaagaaaagaaaagaaaagaaaagaaaagaaaagaaaaaagaaattgcctttaagcagctgccctggtgagggagaggatgacaccygggaaagggggcaggctgtgattgaagactcattcttttttttttttttttttcttttcaagacagagtctccctgtgtcacccaggctggagtgcacaggtgcgatcttggctcagtgtaacctccgccgcccgggttcaa

SEQ ID NO: 550181 - DNA, 622 bp, Homo sapiens
atgtaagccatgtgtacaacagaatgtaaggatccaggcaattcgtttaactgagtattgacttttttcaattatgatgaattatgataaagtgattaaaaacacactacctcggtcttcacataatatatgttttcatttgtaatatgatttcctactttgataacttcaaacctaatttttttatgtttttcatatggatggtttatggttattaggtaaaaatatttatttagattatgaaataaaagagcctaaattaataaagttggaaacttttgcatacttttcttaaacaactgaaaaagaagcaatttagttactacaggcaacatggtgtccatgattagtacaaaatttaattattcacaaagtgccaggcacatgggatatacaatacgacgtgtctttaaatttcactkatttcattttccattatctttaggtttatattatttcacagataataactacacatttcataactaaatctgaaatctatacaaatgcacattatgagtgtttttggagatatggacccccaaacagatggtgagatgctgaaaatttagactaccatataaaaattactcttgctacactgtacttcaccaaaatacac

SEQ ID NO: 550182 - DNA, 570 bp, Homo sapiens
ctaaaaaaagacaaaagcaaataaaaattgtaactttgcaatatggaaggggcacacacaaaacagaaaatgaactcaaatgccctgttactaccttgcaaatcagcgacaaaactgccaaagaggaaaatcattatcttcaattttccctattaagttctttataggcacgtgatttttctagggggcacacggcacaacagaactatttactgaatttagtataaaaattctcygtacaaaaaattcaaccatcttcacaaatcactaatgtgtgttaatgtccaaattttaccagaaatgactcctgtaatcttgtttgaaatgagatttcataagagacataaggagatttaatttttgggggaaaaaaccccaccattcatacagcaataaagtcccaatttatcactgtgaaaaaccaggccctaacactacactaggacttttgtttaaaaccaaaagtaaacacatcttgccatctaaaactcttcaaattccactccttcccaaggaacttttagaactaggcatttctcatcactgacaaacacagttgtagagcgcttt

SEQ ID NO: 550183 - DNA, 555 bp, Homo sapiens
ctttattgtaaagttggtgtttggtccttagattttcaggccacagaagcccagttctacccacaaataaaggtactagggccctcctccttcacctcaccagacgtcaggattctcttttggtcttagtggttctagttgctccttaaagggtagscacatggtgatgacttattaaagatggttggatgagacaggcattgagtgcagactgggcaaattcccacactattaaagtcatgtcagtatcagcacaggcatctgggtgtaggtttataacatttccactaatgcaaagtcatgaggacatctcctatattatcatctggaaacgatgttgtcttgcctttcacatttaggtctataattcgtctgtaataattaacttacttatgttgtgaggaagaggtaaaatttcgttctttttttccattgaatatctctttgatccagttccttctattgaaaagactatcttttcccttccttcctacattgcctcttttatccacattcaagtgtccaaatatatgtgtgtctgttcattcactccct

SEQ ID NO: 550184 - DNA, 1467 bp, Homo sapiens
cagcatagtagtagaacgaccacacttgaattctttcttttgatcactgggaatcctctagttagttaggtttatctttttgaacatcaggttcaaaagatctatttctaagagagagatctagaaggtaaactgatcccaagaaatactagggaaattgtttaaagttcctcgatatgagttcttaaaattttgctccctctcctaaaggagggaaattcctgttagttgaagttaaaactgatgttgaatgcttaaaattccactctcttccactcacctaattcttatccacccaaaactatagtagaaaattttacttcaggaaattagaatagactgaattcccataatcatgaaaatgtggctgggcccggtagtgcatggctgtaatcccagtactttgggaggccaaggcaggcagattactcgaggtcaaaaaagaccagcctagccaacagggtgaaacccctgtctctactaaaaatacaaaaaaaaaagaaaaattagcctggcgtggtggtgggcacctgtaatcccagctactcaggaggctgagggaacagaatcacttgaacccaggaggcagaggttgcagtgagccgaggtcgcaccaytgcactccagcctgggcgacagagctagactccctctcaaaaaaaaggtgacttgaaaacataatcactcatatcaacttaaaggaaaatatacagcacctcctaggtgatcactattatgttaagtgggtaaatgctttatgtttttttcacaactgaagccaatgctgaatgaagagcgtctgttctacattttgcaaggactggaatgttggtataatcgagacaagatggctggctcactgacagtttaggtgagagaaatgcacaccaaagccatctgttttgttacctcaccacaaggagaagggacacactcttatgaggaatactcactgcttgatataccttaacatgaatacagatattttaagggcttcatgcagaattagacaatatacctcactgtgttacctggcagtcaagaattactcactttcagagtgaattcactctggcctatgcataaatcagggcaaacaacaacaacaaaaaaccatcaaacatgcagaggaagatgtgaaagaccaatgtttctaacgtaattctcgtcaagctcgtcggtatgtaggaaaaatgtatgtaacactttattctagaaatttccatttaaagccaccgctctgagttccctgacactcctgcatagtctgaccttgcttaggaagactgagaatctgtggagctgctctagaaaaagggtgggcgggggtggataagcagccctcttatccctacttttcccttttactaagaacccaggatggttgaatgcaaggtccgtttttattctgaggatagaaaaaattcagggctttcccaggctatttcacccacactatctatctca

SEQ ID NO: 550185 - DNA, 1467 bp, Homo sapiens
cagcatagtagtagaacgaccacacttgaattctttcttttgatcactgggaatcctctagttagttaggtttatctttttgaacatcaggttcaaaagatctatttctaagagagagatctagaaggtaaactgatcccaagaaatactagggaaattgtttaaagttcctcgatatgagttcttaaaattttgctccctctcctaaaggagggaaattcctgttagttgaagttaaaactgatgttgaatgcttaaaattccactctcttccactcacctaattcttatccacccaaaactatagtagaaaattttacttcaggaaattagaatagactgaattcccataatcatgaaaatgtggctgggcccggtagtgcatggctgtaatcccagtactttgggaggccaaggcaggcagattactcgaggtcaaaaaagaccagcctagccaacagggtgaaacccctgtctctactaaaaatacaaaaaaaaaagaaaaattagcctggcgtggtggtgggcacctgtaatcccagctactcaggaggctgagggaacagaatcacttgaacccaggaggcagaggttgcagtgagccgaggtcgcaccactgcactccagcctgggcgacagagctagactccctctcaaaaaaaaggtgacttgaaaacataatcactcatatcaacttaaaggaaaatatacagcacctcctaggtgatcactattatgttaagtgggtaaatgctttatgtttttttcacaactgaagccaatgctgaatgaagagcgtctgttctacattttgcaaggactggaatgttggtataatcgagacaagatggctggctcactgacagtttaggtgagagaaatgcacaccaaagccatctgttttgttacctcaccacaaggagaagggacacactcttatgaggaatactcactgcttgatataccttaacatgaatacagatattttaagggcttcatgcagaattagacaatatacctcactgtgttacctggcagtcaagaattactcactttcagagtgaattcactctggcctatgcataaatcagggcaaacaacaacaacaaaaaaccatcaaacatgcagaggaagatgtgaaagaccaatgtttctaacrtaattctcgtcaagctcgtcggtatgtaggaaaaatgtatgtaacactttattctagaaatttccatttaaagccaccgctctgagttccctgacactcctgcatagtctgaccttgcttaggaagactgagaatctgtggagctgctctagaaaaagggtgggcgggggtggataagcagccctcttatccctacttttcccttttactaagaacccaggatggttgaatgcaaggtccgtttttattctgaggatagaaaaaattcagggctttcccaggctatttcacccacactatctatctca

SEQ ID NO: 550186 - DNA, 1467 bp, Homo sapiens
cagcatagtagtagaacgaccacacttgaattctttcttttgatcactgggaatcctctagttagttaggtttatctttttgaacatcaggttcaaaagatctatttctaagagagagatctagaaggtaaactgatcccaagaaatactagggaaattgtttaaagttcctcgatatgagttcttaaaattttgctccctctcctaaaggagggaaattcctgttagttgaagttaaaactgatgttgaatgcttaaaattccactctcttccactcacctaattcttatccacccaaaactatagtagaaaattttacttcaggaaattagaatagactgaattcccataatcatgaaaatgtggctgggcccggtagtgcatggctgtaatcccagtactttgggaggccaaggcaggcagattactcgaggtcaaaaaagaccagcctagccaacagggtgaaacccctgtctctactaaaaatacaaaaaaaaaagaaaaattagcctggcgtggtggtgggcacctgtaatcccagctactcaggaggctgagggaacagaatcacttgaacccaggaggcagaggttgcagtgagccgaggtcgcaccactgcactccagcctgggcgacagagctagactccctctcaaaaaaaaggtgacttgaaaacataatcactcatatcaacttaaaggaaaatatacagcacctcctaggtgatcactattatgttaagtgggtaaatgctttatgtttttttcacaactgaagccaatgctgaatgaagagcgtctgttctacattttgcaaggactggaatgttggtataatcgagacaagatggctggctcactgacagtttaggtgagagaaatgcacaccaaagccatctgttttgttacctcaccacaaggagaagggacacactcttatgaggaatactcactgcttgatataccttaacatgaatacagatattttaagggcttcatgcagaattagacaatatacctcactgtgttacctggcagtcaagaattactcactttcagagtgaattcactctggcctatgcataaatcagggcaaacaacaacaacaaaaaaccatcaaacatgcagaggaagatgtgaaagaccaatgtttctaacgtaattctcgtcaagctcgtcggtatgtaggaaaaatgtatgtaacactttattctagaaatttccatttaaagccaccgctctgagttccctgacactcctgcatagtctgaccttgcttaggaagactgagaatctgtggagctgctctagaaaaagggtgggcgggggtggataagcagccctcttatccctacttttcccttttactaagaacccaggatggttgaatgcaaggtccrtttttattctgaggatagaaaaaattcagggctttcccaggctatttcacccacactatctatctca

SEQ ID NO: 550187 - DNA, 654 bp, Homo sapiens
tgtggcctctggcaacagagccccgggcaaaagtttgggttcccctttccttctcagtgaactcagatcaccagagacattgcagttctacctagaatcctgctttatactattggaaggatcatgtgggtcaagagatgtacaagctcatgactgttttaaggttgccaaaattaaggatgccactgctttctgggctagagtggtgttgattcttgtaattgcattaagagggaaatttcaatatttagatatgatatatagttttcagctcacaaacacaggtaacattcatggatgttctgaactgatcagggctccagaactggtgtagcgaaatgatgaggtggacacaaaaggaatttgccttttgcctccagccaacagtcacaccactgttgagtgacaagggggaattcttcccacaagctgaggggatgttctgatgttttttaataaccctccctggggcagagattgctgcccacaatgaaatttcttaataacctccccatgctttaatcctatraggcccatggcaaatttccattagatgtttcttccaattcaattgggaaacaagggacaaatctgtatatgcaaattaaggagacaaacttcctaaacaaaggaacttcaaagaaagaatacgta

SEQ ID NO: 550188 - DNA, 667 bp, Homo sapiens
ttgtttgtttttgagacggagtctcattctgtcgcccaggctggagtgcagtggcgtgatctcagctcactgtgatctccggctcctgggttcaagcaattctcccgcctcagcctcctgagtatctgggactacaggcgcgtgccaccaccatgcccggctaatttttgtgtatttttagtagagacggggtttcaccatgttggccagggtctcaaactcctggcctcaaatgatctgcctgcctcggcctcccaaagtgcatggattacaggtgtgagccaccgtgcccagcrtgatgtttccaaatgcctgaccaattgcctagaatgaggaaatggaggcaaggtgtttgaccttgctcaaggtcacacggctaagaagtgaggagcctggacacaaacccaggttctcatccccacctatcccagtccttcccactctcaaaggcccagctctcgcactgagccagcctcccagagcaggggactagcttgttctcaggtgacctttctccctacccctctaggccaccccaaaagccccatcagggccagaactaggtaccatcccctcacccagcccaacccaccgctgggcactcaacaggatgggcttgtgattggtggatgcaactatttccctgaaaaataaaaccaacctggca

SEQ ID NO: 550189 - DNA, 541 bp, Homo sapiens
tttattttgtttccattgttgctaaataaataaaatgatgctttctgattcacaacttacagagctgatttcatgtacttctaacaagcttgtgatgattccaaaagctacgactctttgtcccctctgggaattgcatgggtggggcacatcaccctccctgtattctgatactttttagaatgccagtttcacagcaccatggccagctttaagtagtatctttttaatcatatagttcatttcaggcttccacattgtccttctagaacctaactctattttttttcttttttaaatcccagatcttctgaatgtgtccctgctctgtgagcccacagtgatctgtttgttttgcctggtcccagcttatgcattcttcgagtcttggtaaccaggatgttttgtctgttcaggctctaaaacgatcagtgggataggaaccgaagttaagtagctyaggatgcgtcaagatgaacctgggaaaaccgcgagctgctgtgctgactggactgcttctctgaatcggctggaacttctt

SEQ ID NO: 550190 - DNA, 594 bp, Homo sapiens
tgaaatacaaaaaattagctgggtgtggtggcgggtgcctgtaatcccagctactcgggaggctgaggcaggagaattgcttgaacccgggaggcggatgttgcagtgagccaagatcgcgccactgcactccagcctgggcgacagagcaagactctgtctcaaaaaaaaaaaaaaaaaaaaaaaaaattccagcataatcagcactttctgcccctcatccaggcttagaagacatgtaagtggttggctctcggctgtacaatcacagcccggcttcctcggctatccaatcacagccgtatttggctctcagctgtccaatcatagccatacttggccctcagctgtccaatcacagcccggcttcctccactgctcgctgcactcagctggatcttttccacccaaagtgccacttgctccagtttgcagggttcatagaaacggctgctgagctgcagacctggtgatgyttgggtccagccgagctgctctctccaaagctggacactgctctgccgcccgtgtggagatggggtgtggatagcgtgtgtaccaccccatactccctatcgtcccacctgctctagt

SEQ ID NO: 550191 - DNA, 641 bp, Homo sapiens
tgagtcaattattattattagggctgccaaatggtggtttttctaatttcataatttctttaacatttattacaaatgttgccttcctattgttagaaaacttccttctcattcatatgtttgtttatatgtttatattaacatgaactcatggagttttaccctatccagtgggtacaaacttttactgtcattatttattttgattctaaatggtcccagacttgtctggtgggggcccctcaagctggctcctaaatttcatttatttcattttattttgagacagagtctcactgtgtcacccaggctggagtgcagtggcaagatctcggctcactgcagtctctgcctcctgggttcaagcaattctcctgtctcagcctcccargtagctgggattacaggcgcctgccaccatgcccagataatttttgtatttttagtagagacggggtttcactgcattggccaggctggtctcaaactcctgtcttcaggtgatccacctgccttggcctcccaaagtgctgggattcaggtgtgaaccaccatgcctggacaaatttcactgatatttaatcaattttcaagtggttttctttgcatcttatattcacatccctaccaacctcacactt

SEQ ID NO: 550192 - DNA, 641 bp, Homo sapiens
tgagtcaattattattattagggctgccaaatggtggtttttctaatttcataatttctttaacatttattacaaatgttgccttcctattgttagaaaacttccttctcattcatatgtttgtttatatgtttatattaacatgaactcatggagttttaccctatccagtgggtacaaacttttactgtcattatttattttgattctaaatggtcccagacttgtctggtgggggcccctcaagctggctcctaaatttcatttatttcattttattttgagacagagtctcactgtgtcacccaggctggagtgcagtggcaagatctcggctcactgcagtctctgcctcctgggttcaagcaattctcctgtctcagcctcccaagtagctgggattacaggcgcctgccaccatgcccagataatttttgtatttttagtagagacggggtttcacygcattggccaggctggtctcaaactcctgtcttcaggtgatccacctgccttggcctcccaaagtgctgggattcaggtgtgaaccaccatgcctggacaaatttcactgatatttaatcaattttcaagtggttttctttgcatcttatattcacatccctaccaacctcacactt

SEQ ID NO: 550193 - DNA, 557 bp, Homo sapiens
tacaaaaataaggcagccgatatgtgaaaatgttaacaatatctagttttagaggctaggactagagatgattagtgcaatatttttcaaatcctccttrtccttgtttggcaaaaaaaaaaaaaaaaagatttcgcctaaaactataatactaacttattcgggaaaaaataatgttaacattggtaaattctcccagaacaataatttattcagctagactacctaattccagcaaaactaaaggaaatattatgaaaacatttcttcaaaatatatctcataaagaatcattttcagttttactattaaaaacgaagctttattctcattttctgatgctactctgcttctaattttaccaagctgtttgagatacaggccttagaagcagatacttatggccctggattagtcaacttctcatcagagagcaggagggcaggaagtgatgaacaactattgctgttttactttgaacatacgttcaaaaaccccacctttgtgaattatgggggatcccaagacagtataaatataaacctgtttcagtttaa

SEQ ID NO: 550194 - DNA, 557 bp, Homo sapiens
tacaaaaataaggcagccgatatgtgaaaatgttaacaatatctagttttagaggctaggactagagatgattagtgcaatatttttcaaatcctccttgtccttgtttggcaaaaaaaaaaaaaaaaagatttcgcctaaaactataatactaacttattcgggaaaaaataatgttaacattggtaaattctcccagaacaataatttattcagctagactacctaattccagcaaaactaaaggaaatattatgaaaacatttcttcaaaatatatctcataaagaatcattttcagttttactattaaaaacgaagctttattctcattttctgatgctactctgcttctaattttaccaagctgtttgagatacaggccttagaagcagatacttatggccctggattagtcaacttctcatcagagagcaggagggcaggaagtgatgaacaactattgctgttttactttgaacayacgttcaaaaaccccacctttgtgaattatgggggatcccaagacagtataaatataaacctgtttcagtttaa

SEQ ID NO: 550195 - DNA, 636 bp, Homo sapiens
agcataataaagaattttaaaaaaagagttagaggtgattataggatgaaactgagtgttcaaaagttaaggacatactgtgaattagaatagccctgttttagtgtcagatggcttgccaaaggcactatagaaaaattggccgtgtgttttaaggtggtgactagggtcagagaacagccaggacattcagacctagtctttatattgactcatggctaaatgaatgcagccctgcctagcagtttactgtagaatgctcgcagctcacggcaagagaaaatcagctgctctggcagctacagagttaaaaggagacacagaggcttgtagcacctcccagccaaaagtgaaagtaaaatcagctgccccagcarctgaagacaaatgaaaaaatctcagaaaaggcagaaaaaccggttttgtcacaaccacagaaaagaatagagaccgctcctccttacattccaatctaccccctttaccaaggtaactgtccctaaggagttaagttcaaatggatacatgctgccagtctcacccgagaaggtgaaatgagagcgaaaatcaggcaggccgtctcaggtctggtcgtgcataagatatgctcatgcctcttaagaggacaggaggacc

SEQ ID NO: 550196 - DNA, 636 bp, Homo sapiens
agcataataaagaattttaaaaaaagagttagaggtgattataggatgaaactgagtgttcaaaagttaaggacatactgtgaattagaatagccctgttttagtgtcagatggcttgccaaaggcactatagaaaaattggccgtgtgttttaaggtggtgactagggtcagagaacagccaggacattcagacctagtctttatattgactcatggctaaatgaatgcagccctgcctagcagtttactgtagaatgctcgcagctcacggcaagagaaaatcagctgctctggcagctacagagttaaaaggagacacagaggcttgtagcacctcccagccaaaagtgaaagtaaaatcagctgccccagcaactgaagacaaatgaaaaartctcagaaaaggcagaaaaaccggttttgtcacaaccacagaaaagaatagagaccgctcctccttacattccaatctaccccctttaccaaggtaactgtccctaaggagttaagttcaaatggatacatgctgccagtctcacccgagaaggtgaaatgagagcgaaaatcaggcaggccgtctcaggtctggtcgtgcataagatatgctcatgcctcttaagaggacaggaggacc

SEQ ID NO: 550197 - DNA, 653 bp, Homo sapiens
tgccctgcaatcttttgatgagattcagaaatttataaaacaactgtgtaatgtagtatgtacaaacttgcttactacaagataatacaacaatcagtgaggctgtacatcctggtacttcattaacagtgtcttcaatgtgtcttctctgggcttgtgtgtgtatttttaaggtaaagrtattttttcccattgttttccagacactgtggtcctttgcttccgcagttgattgtagtgtttgtttctctgaggctgtggtaagcatgtaacttctcttctcagcagtcataagttatcattctcattactctgccatttcctttagcattccctgtttggggagacagaatctagtcatcagcggtagcccacaaagccaaacctttgaacatatgttccactgttctcattctacactgagggatatactaaaagttggacgttttctcttgagcccaattgctgttctgggaaagaagaagggatgtggtgaatataagccagacctggttgcctcgtacagcaagcttttccaacccgccttgttttgtttttgttatggctctgttttgttttaggtttttagcagcctgcagcaatggtttttgggttctgtgtctagtgataagtggaaaagggggatgaggaaa

SEQ ID NO: 550198 - DNA, 653 bp, Homo sapiens
tgccctgcaatcttttgatgagattcagaaatttataaaacaactgtgtaatgtagtatgtacaaacttgcttactacaagataatacaacaatcagtgaggctgtacatcctggtacttcattaacagtgtcttcaatgtgtcttctctgggcttgtgtgtgtatttttaaggtaaagatattttttcccattgttttccagacactgtggtcctttgcttccgcagttgattgtagtgtttgtttctctgaggctgtggtaagcatgtaacttctcttctcagcagtcataagttatcattctcaytactctgccatttcctttagcattccctgtttggggagacagaatctagtcatcagcggtagcccacaaagccaaacctttgaacatatgttccactgttctcattctacactgagggatatactaaaagttggacgttttctcttgagcccaattgctgttctgggaaagaagaagggatgtggtgaatataagccagacctggttgcctcgtacagcaagcttttccaacccgccttgttttgtttttgttatggctctgttttgttttaggtttttagcagcctgcagcaatggtttttgggttctgtgtctagtgataagtggaaaagggggatgaggaaa

SEQ ID NO: 550199 - DNA, 653 bp, Homo sapiens
tgccctgcaatcttttgatgagattcagaaatttataaaacaactgtgtaatgtagtatgtacaaacttgcttactacaagataatacaacaatcagtgaggctgtacatcctggtacttcattaacagtgtcttcaatgtgtcttctctgggcttgtgtgtgtatttttaaggtaaagatattttttcccattgttttccagacactgtggtcctttgcttccgcagttgattgtagtgtttgtttctctgaggctgtggtaagcatgtaacttctcttctcagcagtcataagttatcattctcattactctgccatttcctttagcattccctgtttggggagacagaatctagtcatcagcggtagcccacaaagccaaacctttsaacatatgttccactgttctcattctacactgagggatatactaaaagttggacgttttctcttgagcccaattgctgttctgggaaagaagaagggatgtggtgaatataagccagacctggttgcctcgtacagcaagcttttccaacccgccttgttttgtttttgttatggctctgttttgttttaggtttttagcagcctgcagcaatggtttttgggttctgtgtctagtgataagtggaaaagggggatgaggaaa

SEQ ID NO: 550200 - DNA, 653 bp, Homo sapiens
tgccctgcaatcttttgatgagattcagaaatttataaaacaactgtgtaatgtagtatgtacaaacttgcttactacaagataatacaacaatcagtgaggctgtacatcctggtacttcattaacagtgtcttcaatgtgtcttctctgggcttgtgtgtgtatttttaaggtaaagatattttttcccattgttttccagacactgtggtcctttgcttccgcagttgattgtagtgtttgtttctctgaggctgtggtaagcatgtaacttctcttctcagcagtcataagttatcattctcattactctgccatttcctttagcattccctgtttggggagacagaatctagtcatcagcggtagcccacaaagccaaacctttgaacatatgttccactgttctcattctayactgagggatatactaaaagttggacgttttctcttgagcccaattgctgttctgggaaagaagaagggatgtggtgaatataagccagacctggttgcctcgtacagcaagcttttccaacccgccttgttttgtttttgttatggctctgttttgttttaggtttttagcagcctgcagcaatggtttttgggttctgtgtctagtgataagtggaaaagggggatgaggaaa

SEQ ID NO: 550201 - DNA, 692 bp, Homo sapiens
agagcaaaagtgcaggcattggggtttggttcacatatttcagaaacaccaaggacaaatgtttcttcctcataattttcagtcctattatttcaaatgtgttcctgcaaaaaaatcagaaaaaaaatttatcagagcccaaagcacctcagcacatatgataaagttgaatcttctatttcactttattctttttttcatctctggtaatgtaggtcaaaaagttttctttcccttagtagaaactaacttagaaatgtgaactctctatgccaaacatgtcacctgtggaatagtttattgtatctactcatctcaaagaatttttaargaccttaatccatagaaaaacttagaaacatgccaggaatagaacaaattcttaactgttacattatttcttaatgagttattttattaattaatcttatataaagcttagtgggactgtgatctgtacgttttccctgtcctgtttttacctatgtcaaattagcctataactttagcttcaggggtttcagaaaacatacttgaatttatgtgttatataaaaagtgaattggatggtatgcacatcacattaagaaaagttttagtttgtgtctaagttcactgcatagaaaaacttatcattagtgtttccatttactttcctcaacatttatctgaatgatagtataatttatttc

SEQ ID NO: 550202 - DNA, 692 bp, Homo sapiens
agagcaaaagtgcaggcattggggtttggttcacatatttcagaaacaccaaggacaaatgtttcttcctcataattttcagtcctattatttcaaatgtgttcctgcaaaaaaatcagaaaaaaaatttatcagagcccaaagcacctcagcacatatgataaagttgaatcttctatttcactttattctttttttcatctctggtaatgtaggtcaaaaagttttctttcccttagtagaaactaacttagaaatgtgaactctctatgccaaacatgtcacctgtggaatagtttattgtatctactcatctcaaagaatttttaaggaccttaatccatagaaaaacttagaaacatgccaggaatagaacaaattcttaactgttacattatttcttaatgagttattttattaattaatcttatataaagcttagtgggactgtgatctgtacgttttccctgtcctgtttttacstatgtcaaattagcctataactttagcttcaggggtttcagaaaacatacttgaatttatgtgttatataaaaagtgaattggatggtatgcacatcacattaagaaaagttttagtttgtgtctaagttcactgcatagaaaaacttatcattagtgtttccatttactttcctcaacatttatctgaatgatagtataatttatttc

SEQ ID NO: 550203 - DNA, 692 bp, Homo sapiens
agagcaaaagtgcaggcattggggtttggttcacatatttcagaaacaccaaggacaaatgtttcttcctcataattttcagtcctattatttcaaatgtgttcctgcaaaaaaatcagaaaaaaaatttatcagagcccaaagcacctcagcacatatgataaagttgaatcttctatttcactttattctttttttcatctctggtaatgtaggtcaaaaagttttctttcccttagtagaaactaacttagaaatgtgaactctctatgccaaacatgtcacctgtggaatagtttattgtatctactcatctcaaagaatttttaaggaccttaatccatagaaaaacttagaaacatgccaggaatagaacaaattcttaactgttacattatttcttaatgagttattttattaattaatcttatataaagcttagtgggactgtgatctgtacgttttccctgtcctgtttttacctatgtcaaattagcctataactttagcttcaggggtttcagaaaacatacttgaatttatgtgttatataaaaagtgaattggatrgtatgcacatcacattaagaaaagttttagtttgtgtctaagttcactgcatagaaaaacttatcattagtgtttccatttactttcctcaacatttatctgaatgatagtataatttatttc

SEQ ID NO: 550204 - DNA, 2416 bp, Homo sapiens
  misc_feature 905, 906, 907, 908, 909, 910, 911, 912, 913, 914, 915, 916,917, 918, 919, 920, 921, 922, 923, 924, 925, 926, 927, 928,929, 930, 931, 932, 933, 934, 935, 936, 937, 938, 939, 940,941, 942, 943, 944, 945, 946, 947, 948, 949, 950, 951: n = A,T,C or G
  misc_feature 952, 953, 954, 955, 956, 957, 958, 959, 960, 961, 962, 963,964, 965, 966, 967, 968, 969, 970, 971, 972, 973, 974, 975,976, 977, 978, 979, 980, 981, 982, 983, 984, 985, 986, 987,988, 989, 990, 991, 992, 993, 994, 995, 996, 997, 998: n = A,T,C or G
  misc_feature 999, 1000, 1001, 1002, 1003, 1004: n = A,T,C or G
ctcaccgcaccttccgcctcccgggttcgagcgcttctcctgcctcagcctcccgattagcggggatkacagggaggcacccccacgcctggcttggctgatgtttgtgtttttagtaggcacgccgtgtctctccatgttgctcaggctggtctccaactcccgacctcctgtgatgcgcccacctcggcctctcgaagtgctgggatgacgggcgtgagccaccgtgcccggcctgttgactcatttcgcttttttatttctttcgtttccacgcgtttacttatatgtagtaatgtaaacgtttctgtacgcttatatgcaaacaacgacaacgtgtatctctgcattgaatactcttgcgtatggtaaatacgtatcggttgtatggaaatagacttctgtatgatagatgtaggtgtttgtgttatacaaataaatacacatcgctctataaagaagggatcgtcgataaagacgtttattttacgtatgaaaagcgtcgtatttatgtgtgtaaatgaacgagcgtacgtagttatctctgtttcctttcttcctctccttcgtgtttttcttccttcctttcttcctttctctccttctttaggtttttcttcctctcttcctttccttctttctctctttctgtccttttttccttcgtgctttatttctctttcgttccctgtctttccttcttttttctttcctctctgtttctttttcccttctttccttcgtttctttcctcattctttctctctttttcgtgtttctttcctttccgcctgtcttttaaaaaatggagtgtttcagaagtttactttgtgtatctacgttttctaaattgtctctcttttctccattttcttcctccctccctccctccctccctccctgannnnnnnnnnnnnnnnnnnnnnnnnnnnnnnnnnnnnnnnnnnnnnnnnnnnnnnnnnnnnnnnnnnnnnnnnnnnnnnnnnnnnnnnnnnnnnnnnnnnaaaaaacccaaccaccagccaagccagggttgggggtgcatcccggtaatcccccctaatcggaaggttaaggcagaaaaaacacaaaaaccgggaaggcgaaaaaaaaaataagcaaagattgggtcattgcctccctccctccctccctccctccctgcttccgagaggcatctccaaacacccacgcgccgtgggttgtcttctgactctgtcgcggtcgaggcagagacgcgttttgggcaccgtttgtgtggggttggggcagaggggctgcgttttcggcctcgggaagagcttctcgactcacggtttcgctttcgcggtccacgggccgccctgccagccggatctgtctcgctgacgtccgcggcggttgtcgggctccatctggcggccgctttgagatcgtgctctcggcttccggagctgcggtggcagctgccgagggaggggaccgtccccgctgtgagctaggcagagctccggaaagcccgcggtcgtcagcccggctggcccggtggcgccagagctgtggcgcgtcgcttgtgagtcacagctctggcgtgcaggtttatgtgggggagaggctgtcgctgcgcttctgggcccgcggcgggcgtggggctgcccgggccggtcgaccagcgcgccgtagctcccgaggcccgagccgcgacccgcggggacccgccgcgcgtggcgcgggaggctggggacgcccttcccggcccggtcgcgggtccgcgctcatcctggccgtctgaggcggcggccgaattcgtttccgagtccccgtggggagccggggaccgtcccgcccccgtcccccgggtgccggggagcggtccccgggccgggccgcggtccctctgccgcgatcctttctggcgagtccccgtgcggagtcggagagcgctccctgagcgcgcgtgcggcccgagaggtcgcgcctggccggccttcggtccctcgtgtgtcccggtcgtaggaggggccggccgaaaatgcttccggctcccgctctggagacacgggccggccccctgcgtgtggcacgggcggccgggagggcgtccccggcccggcgctgctcccgcgtgtgtcctggggttgaccagagggccccgggcgctccgtgtgtggctgcgatggtggcgtttttggggacaggtgtccgtgtcgcgcgtcgcctgggccggcggcgtggtcggtgacgcgacctcccggccccgggggaggtatatctttcgctccgagtcggcattttgggccgccgggttattgctgacacgctgtcctctggcgacctgtcgctggagaggttgggcctccggatgcgcgcggggctctggcctaccggtgacccggctagccggccgcgctcctgcttgagccgcctgccggggccc

SEQ ID NO: 550205 - DNA, 2416 bp, Homo sapiens
  misc_feature 905, 906, 907, 908, 909, 910, 911, 912, 913, 914, 915, 916,917, 918, 919, 920, 921, 922, 923, 924, 925, 926, 927, 928,929, 930, 931, 932, 933, 934, 935, 936, 937, 938, 939, 940,941, 942, 943, 944, 945, 946, 947, 948, 949, 950, 951: n = A,T,C or G
  misc_feature 952, 953, 954, 955, 956, 957, 958, 959, 960, 961, 962, 963,964, 965, 966, 967, 968, 969, 970, 971, 972, 973, 974, 975,976, 977, 978, 979, 980, 981, 982, 983, 984, 985, 986, 987,988, 989, 990, 991, 992, 993, 994, 995, 996, 997, 998: n = A,T,C or G
  misc_feature 999, 1000, 1001, 1002, 1003, 1004: n = A,T,C or G
ctcaccgcaccttccgcctcccgggttcgagcgcttctcctgcctcagcctcccgattagcggggatgacagggaggcacccccacgcctggcttggctgatgtttgtgtttttagtaggcacgccgtgtctctccatgttgctcaggctggtctccaactcccgacctcctgtgatgcgcccacctcggcctctcgaagtgctgggatgacgggcgtgagccaccgtgcccggcctgttgactcatttcgcttttttatttctttcgtttccacgcgtttacttatatgtagtaatgtaaacgtttctgtacgcttatatgcaaacaacgacaacgtgtatctctgcattgaatactcttgcgtatggtaaatacgtatcggttgtatggaaatagacttctgtatgatagatgtaggtgtttgtgttatacaaataaatacacatcgctctataaagaagggatcgtcgataaagacgtttattttacgtatgaaaagcgtcgtatttatgtgtgtaaatgaacgagcgtacgtagttatctctgtttyctttcttcctctccttcgtgtttttcttccttcctttcttcctttctctccttctttaggtttttcttcctctcttcctttccttctttctctctttctgtccttttttccttcgtgctttatttctctttcgttccctgtctttccttcttttttctttcctctctgtttctttttcccttctttccttcgtttctttcctcattctttctctctttttcgtgtttctttcctttccgcctgtcttttaaaaaatggagtgtttcagaagtttactttgtgtatctacgttttctaaattgtctctcttttctccattttcttcctccctccctccctccctccctccctgannnnnnnnnnnnnnnnnnnnnnnnnnnnnnnnnnnnnnnnnnnnnnnnnnnnnnnnnnnnnnnnnnnnnnnnnnnnnnnnnnnnnnnnnnnnnnnnnnnnaaaaaacccaaccaccagccaagccagggttgggggtgcatcccggtaatcccccctaatcggaaggttaaggcagaaaaaacacaaaaaccgggaaggcgaaaaaaaaaataagcaaagattgggtcattgcctccctccctccctccctccctccctgcttccgagaggcatctccaaacacccacgcgccgtgggttgtcttctgactctgtcgcggtcgaggcagagacgcgttttgggcaccgtttgtgtggggttggggcagaggggctgcgttttcggcctcgggaagagcttctcgactcacggtttcgctttcgcggtccacgggccgccctgccagccggatctgtctcgctgacgtccgcggcggttgtcgggctccatctggcggccgctttgagatcgtgctctcggcttccggagctgcggtggcagctgccgagggaggggaccgtccccgctgtgagctaggcagagctccggaaagcccgcggtcgtcagcccggctggcccggtggcgccagagctgtggcgcgtcgcttgtgagtcacagctctggcgtgcaggtttatgtgggggagaggctgtcgctgcgcttctgggcccgcggcgggcgtggggctgcccgggccggtcgaccagcgcgccgtagctcccgaggcccgagccgcgacccgcggggacccgccgcgcgtggcgcgggaggctggggacgcccttcccggcccggtcgcgggtccgcgctcatcctggccgtctgaggcggcggccgaattcgtttccgagtccccgtggggagccggggaccgtcccgcccccgtcccccgggtgccggggagcggtccccgggccgggccgcggtccctctgccgcgatcctttctggcgagtccccgtgcggagtcggagagcgctccctgagcgcgcgtgcggcccgagaggtcgcgcctggccggccttcggtccctcgtgtgtcccggtcgtaggaggggccggccgaaaatgcttccggctcccgctctggagacacgggccggccccctgcgtgtggcacgggcggccgggagggcgtccccggcccggcgctgctcccgcgtgtgtcctggggttgaccagagggccccgggcgctccgtgtgtggctgcgatggtggcgtttttggggacaggtgtccgtgtcgcgcgtcgcctgggccggcggcgtggtcggtgacgcgacctcccggccccgggggaggtatatctttcgctccgagtcggcattttgggccgccgggttattgctgacacgctgtcctctggcgacctgtcgctggagaggttgggcctccggatgcgcgcggggctctggcctaccggtgacccggctagccggccgcgctcctgcttgagccgcctgccggggccc

SEQ ID NO: 550206 - DNA, 2482 bp, Homo sapiens
tactagcaaacaacataaacaaaagttaattccagatacagtgttgatttaaatgtgaatggtgaaacaataaggtttcaagaaagtaacgtaagagactatcttcaagacttttcaactgaaaatgatttcccaaagaaaacataaaaagtattaatcataaattaaaattaatacattctgtttatcaaaagaaatctttaagagatttaagaggttagatacactgggaggggatatcatctgaaatgcttatacaataagtatcacctatgccaaacatagaatgacatcctcaagtgaaaagtgggtaaaagtctaagccatttcataaaagagcataaactaattgccaattaatatagaaaaacatgttattctcatttgtcatgaaggatatgcaaaataaaacaatactatacattctaaattatgccaatttagaatagctaaaattaagaagatggacaaaactagtgatcgtgaagatatggaagaactggaaatcttgcgtactactggtaagattgcaaattggaaaaaacctttaggaaaacygtgtagcaatagcaaatactaggagggaacttttaatgtgttcataatattctatttcttgatctgtagggtggttgctcatcaagctgtatccttgtgatttgtgcaagtatcaatatgtatgccatttttaaatgaatacatatttatttagttttttttttttactacccatgttattttcacatgttgattaggtatttaatggtaaattgatgtaagtctaattttatttcttattttcagtgacaacatctcaacaatgaatatttgatcttacaagaaaagtgttatggccaaattacaaaaaaatgcatatgttaactttttatagtagatatgactgcattttaactttagcaatgcaataatcctcagaaactacatctgcaaggagcctcaaagcaagtgttttttttaagttgacaaaaatgttctttgatctgtaagactatataaatcagtcaacaaacatttattggaccctttttatatataacatggggtactatacaaaattcagaaaagcacaagacatgatctctcctagggaatttgaattcaaaactggaaaaacaaactgcactcatgtactcaaaaaaatatatattatcaatccagtgtattaaatggacactaaactaatagtacagattgcaaagaagaagaaagcattgtacatggggtctggtcaaggaacactttctgaaggaagtaatttaagcaatattataaagaatatatttgggagacattaagcaccaaaggctaatgtttaggtatgactgaaatgtttaaaatgaaattctaattgaataagtgagtgttggatacagattgtgtaagactaaggagaatgggaatcactgaatgttttgaaccaaaaaatgatatgatttcttcatttgatgaaaagtgaatcactcatttctcccataacacatagcttaatctaattctggtttgttcttcctatgcttatgttgcccattgcatagtaactagtctttttgaaggaaagcatcagttaacagtcatatttatttcttctagaacatccagattagagccttacacacaactaccactcaatagttgtgtgctaaataaatgaatcaatcaatatcaataaagacagctaaaaaagagaaacttattgatgaacatacaatgaaatacaataaatttaggcttgaggcaacagaaagaggcttacacatcaatgaattcatattcataattcagaaaaccatatctagaatcatatgttgtattagttgtaataagttaattgtgaaattatgaaactaaaaagagataactggaaatgattatatttttaaaaagcaaaacaggttcctagtgaccatggggaaaaaaaaagatcctgagttgtctgtgtgatctaatagagagcttaaagaaaatcaagagaatcagagattgaagaatttccagtgcctgagatggtagtggatattaaatgctttatatatttgggaccagctcctttagggctaaggaagttgaaatttacagacgctcaccataattataattacttttgttggaaattaatagataaatctagtattgcaattagtttgggaagtcatgagatgaaacatgctccgtacgaagcagcaaattatatacattcaaccagttagctgtattcagcttctaatcattaccactgaaaatattctaagatacgcaataaaaaaggaagcattcatttttcttatagcttttaactaacttaatgatctttaaagtggcttctggtgtatttaaattgagtggcattaccatgtagctttcacaaaacagacctgagtaaatcctgtctccttgaccagcgtcgagttgcattgacttttagcctaccaatgttgaagagggcattaactacactaatgca

SEQ ID NO: 550207 - DNA, 621 bp, Homo sapiens
tgcctgaattgtaggggttccatggttaggtggcatagttagtaccggcaagttacttaagacaatatacaaatttcattagtcaccttttcattcagtaagamtttgagtgtttttgagccaggaaggcaagatgttagaggtcatgcagagtccaagagagaagatatattccctgccccacaggagcagaggaaataagagagaactcaaataattagagtaatgagataggatgctaattaggaatgttgacaaaaacatttaaatgggctagaagttgacagtacttttggctagtttaaaataaattggtactgtctggttaggagaaacctcttctgttggagttttagggagacaataagtagtatcccttttcccctgttcccagtttgaaaaaaatttttaatatgtgtctcctgagaacaagaacactttgctatatggctacaacacaattattgaacccgagaaattcaaaatggattctaggctgtttcagtaaacagagctgggaaaaaaaggtgtatttccctctaattaaaaatctcatctagttcttcctcactctctcatgttctatattcacatctcccttctcctttttgataacttttt

SEQ ID NO: 550208 - DNA, 621 bp, Homo sapiens
tgcctgaattgtaggggttccatggttaggtggcatagttagtaccggcaagttacttaagacaatatacaaatttcattagtcaccttttcattcagtaagactttgagtgtttttgagccaggaaggcaagatgttagaggtcatgcagagtccaagagagaagatatattccctgccccacaggagcagaggaaataagagagaactcaaataattagagtaatgagataggatgctaattaggaatgttgacaaaaacatttaaatgggctagaagttgacagtacttttggctagtttaaaataaattggtactgtctggttaggagaaacctcttctgttggagttttagggagacaataagtagtatcccttttcccctgttcccagtttgaaaaawatttttaatatgtgtctcctgagaacaagaacactttgctatatggctacaacacaattattgaacccgagaaattcaaaatggattctaggctgtttcagtaaacagagctgggaaaaaaaggtgtatttccctctaattaaaaatctcatctagttcttcctcactctctcatgttctatattcacatctcccttctcctttttgataacttttt

SEQ ID NO: 550209 - DNA, 994 bp, Homo sapiens
tgccagtaccatgctgttttgattactatagctttgcatatatatgatttgttgatcattgataaaagaatattcatttgttgttgaaagatctaaaggagaattttggggtaaaaaaccaaaggtacttggaaaactatgtaaattttaaaaagacaatgattatcattaggaaatattcaaaggaaagcattattctgatagactatttggctctgatgtaaacaatatttaaatgtcattaacagtacaatcactgactttggattaacaaagttttgtaattaagtattttgggaggataataggagtgtaagaaagccaaatcctcatctacacaaaaaggaagtcaataaatgaagtctgaagttgataaatctgtcagttggcctttgccatgtaacaaacaactacaaatgctagtggtttaaaacaagaaccatattaattgttctagattctatggggtaacaatttaggctgcgcttagatgggataatgtatccttgctccgtgggatttcagcttatccatgtgttgtagtcagttaatggtaggtgacttcacacatgtatgtgggcagtcgctggctgttagctgtgccagtgatggcaactgagccttgtgtcactcatccaataaactagccaaggcttgtttacatcgtagtagctctatgagcagtgatgaagcaaaccctgatgcaaacctctgcttttatcatgtcttctaatgacacactggccaaagcaagtcacatggccaggcccagactcaaaaggtagagaaatagactttacctcttcaaggaggagctacaaaattatatttaaaatgtgcctaaattcagaaatcagaaaaatgtatggttatttttgaaatctaccatgctaaacagtaatagcataatcaagccactatattatacaaatcacacacacacatacacatatatatrtatttatgtgtgtgtgtgtatatatatatatatata

SEQ ID NO: 550210 - DNA, 994 bp, Homo sapiens
tgccagtaccatgctgttttgattactatagctttgcatatatatgatttgttgatcattgataaaagaatattcatttgttgttgaaagatctaaaggagaattttggggtaaaaaaccaaaggtacttggaaaactatgtaaattttaaaaagacaatgattatcattaggaaatattcaaaggaaagcattattctgatagactatttggctctgatgtaaacaatatttaaatgtcattaacagtacaatcactgactttggattaacaaagttttgtaattaagtattttgggaggataataggagtgtaagaaagccaaatcctcatctacacaaaaaggaagtcaataaatgaagtctgaagttgataaatctgtcagttggcctttgccatgtaacaaacaactacaaatgctagtggtttaaaacaagaaccatattaattgttctagattctatggggtaacaatttaggctgcgcttagatgggataatgtatccttgctccgtgggatttcagcttatccatgtgttgtagtcagttaatggtaggtgacttcacacatgtatgtgggcagtcgctggctgttagctgtgccagtgatggcaactgagccttgtgtcactcatccaataaactagccaaggcttgtttacatcgtagtagctctatgagcagtgatgaagcaaaccctgatgcaaacctctgcttttatcatgtcttctaatgacacactggccaaagcaagtcacatggccaggcccagactcaaaaggtagagaaatagactttacctcttcaaggaggagctacaaaattatatttaaaatgtgcctaaattcagaaatcagaaaaatgtatggttatttttgaaatctaccatgctaaacagtaatagcataatcaagccactatattatacaaatcacacacacacatacacatatatatatrtttatgtgtgtgtgtgtatatatatatatatata

SEQ ID NO: 550211 - DNA, 994 bp, Homo sapiens
tgccagtaccatgctgttttgattactatagctttgcatatatatgatttgttgatcattgataaaagaatattcatttgttgttgaaagatctaaaggagaattttggggtaaaaaaccaaaggtacttggaaaactatgtaaattttaaaaagacaatgattatcattaggaaatattcaaaggaaagcattattctgatagactatttggctctgatgtaaacaatatttaaatgtcattaacagtacaatcactgactttggattaacaaagttttgtaattaagtattttgggaggataataggagtgtaagaaagccaaatcctcatctacacaaaaaggaagtcaataaatgaagtctgaagttgataaatctgtcagttggcctttgccatgtaacaaacaactacaaatgctagtggtttaaaacaagaaccatattaattgttctagattctatggggtaacaatttaggctgcgcttagatgggataatgtatccttgctccgtgggatttcagcttatccatgtgttgtagtcagttaatggtaggtgacttcacacatgtatgtgggcagtcgctggctgttagctgtgccagtgatggcaactgagccttgtgtcactcatccaataaactagccaaggcttgtttacatcgtagtagctctatgagcagtgatgaagcaaaccctgatgcaaacctctgcttttatcatgtcttctaatgacacactggccaaagcaagtcacatggccaggcccagactcaaaaggtagagaaatagactttacctcttcaaggaggagctacaaaattatatttaaaatgtgcctaaattcagaaatcagaaaaatgtatggttatttttgaaatctaccatgctaaacagtaatagcataatcaagccactatattatacaaatcacacacacacatacacatatatatatatktatgtgtgtgtgtgtatatatatatatatata

SEQ ID NO: 550212 - DNA, 994 bp, Homo sapiens
tgccagtaccatgctgttttgattactatagctttgcatatatatgatttgttgatcattgataaaagaatattcatttgttgttgaaagatctaaaggagaattttggggtaaaaaaccaaaggtacttggaaaactatgtaaattttaaaaagacaatgattatcattaggaaatattcaaaggaaagcattattctgatagactatttggctctgatgtaaacaatatttaaatgtcattaacagtacaatcactgactttggattaacaaagttttgtaattaagtattttgggaggataataggagtgtaagaaagccaaatcctcatctacacaaaaaggaagtcaataaatgaagtctgaagttgataaatctgtcagttggcctttgccatgtaacaaacaactacaaatgctagtggtttaaaacaagaaccatattaattgttctagattctatggggtaacaatttaggctgcgcttagatgggataatgtatccttgctccgtgggatttcagcttatccatgtgttgtagtcagttaatggtaggtgacttcacacatgtatgtgggcagtcgctggctgttagctgtgccagtgatggcaactgagccttgtgtcactcatccaataaactagccaaggcttgtttacatcgtagtagctctatgagcagtgatgaagcaaaccctgatgcaaacctctgcttttatcatgtcttctaatgacacactggccaaagcaagtcacatggccaggcccagactcaaaaggtagagaaatagactttacctcttcaaggaggagctacaaaattatatttaaaatgtgcctaaattcagaaatcagaaaaatgtatggttatttttgaaatctaccatgctaaacagtaatagcataatcaagccactatattatacaaatcacacacacacatacacatatatatatatttrtgtgtgtgtgtgtatatatatatatatata

SEQ ID NO: 550213 - DNA, 994 bp, Homo sapiens
tgccagtaccatgctgttttgattactatagctttgcatatatatgatttgttgatcattgataaaagaatattcatttgttgttgaaagatctaaaggagaattttggggtaaaaaaccaaaggtacttggaaaactatgtaaattttaaaaagacaatgattatcattaggaaatattcaaaggaaagcattattctgatagactatttggctctgatgtaaacaatatttaaatgtcattaacagtacaatcactgactttggattaacaaagttttgtaattaagtattttgggaggataataggagtgtaagaaagccaaatcctcatctacacaaaaaggaagtcaataaatgaagtctgaagttgataaatctgtcagttggcctttgccatgtaacaaacaactacaaatgctagtggtttaaaacaagaaccatattaattgttctagattctatggggtaacaatttaggctgcgcttagatgggataatgtatccttgctccgtgggatttcagcttatccatgtgttgtagtcagttaatggtaggtgacttcacacatgtatgtgggcagtcgctggctgttagctgtgccagtgatggcaactgagccttgtgtcactcatccaataaactagccaaggcttgtttacatcgtagtagctctatgagcagtgatgaagcaaaccctgatgcaaacctctgcttttatcatgtcttctaatgacacactggccaaagcaagtcacatggccaggcccagactcaaaaggtagagaaatagactttacctcttcaaggaggagctacaaaattatatttaaaatgtgcctaaattcagaaatcagaaaaatgtatggttatttttgaaatctaccatgctaaacagtaatagcataatcaagccactatattatacaaatcacacacacacatacacatatatatatatttatgtgtgtgtrtgtatatatatatatatata

SEQ ID NO: 550214 - DNA, 994 bp, Homo sapiens
tgccagtaccatgctgttttgattactatagctttgcatatatatgatttgttgatcattgataaaagaatattcatttgttgttgaaagatctaaaggagaattttggggtaaaaaaccaaaggtacttggaaaactatgtaaattttaaaaagacaatgattatcattaggaaatattcaaaggaaagcattattctgatagactatttggctctgatgtaaacaatatttaaatgtcattaacagtacaatcactgactttggattaacaaagttttgtaattaagtattttgggaggataataggagtgtaagaaagccaaatcctcatctacacaaaaaggaagtcaataaatgaagtctgaagttgataaatctgtcagttggcctttgccatgtaacaaacaactacaaatgctagtggtttaaaacaagaaccatattaattgttctagattctatggggtaacaatttaggctgcgcttagatgggataatgtatccttgctccgtgggatttcagcttatccatgtgttgtagtcagttaatggtaggtgacttcacacatgtatgtgggcagtcgctggctgttagctgtgccagtgatggcaactgagccttgtgtcactcatccaataaactagccaaggcttgtttacatcgtagtagctctatgagcagtgatgaagcaaaccctgatgcaaacctctgcttttatcatgtcttctaatgacacactggccaaagcaagtcacatggccaggcccagactcaaaaggtagagaaatagactttacctcttcaaggaggagctacaaaattatatttaaaatgtgcctaaattcagaaatcagaaaaatgtatggttatttttgaaatctaccatgctaaacagtaatagcataatcaagccactatattatacaaatcacacacacacatacacatatatatatatttatgtgtgtgtgtrtatatatatatatatata

SEQ ID NO: 550215 - DNA, 600 bp, Homo sapiens
ttttagaattgacaaaatgttggcttagcagtattgagtaatttgcaaaagatccagcaacaaatgtttcccattgggatctgaacgctagcctagtgcctcaaattaaatgtcttatgacatgataactacaacagtcaaaaggtccccactagaaatgacaaaggaatattgcaaaactggggacttggaaggaacatgttacaaagcagctaccaaggtggtgagagaggccctcgggatggcacagacacgcccaaattctcatcctcacctgcagttcttccctcgccatcctcagattatgatccataaagcctctctgaagaggcagccgacagccctgtrcttgctaacaacctgcgtatcctctgaatagtatctccatcctctcctgacaatggggagttcctgttactgtctgctgttagaggcaggaagccacagaagagaatggcttcttcctagcttgaatgcttcagttccataatggagctgacttccaggcactgatggggcctgggctaagaagcagtgtggagtggggactctttccaggaggcaaaggatgctgggatttcatatttgaaagtgaattca

SEQ ID NO: 550216 - DNA, 635 bp, Homo sapiens
tcaggggactggtagtcacccaatcttggagaggtgcaaaaagcactgggggctacccgttagctgcatctgccctggctgtttgcccgttcatgtcacaaactgccactactatgtacctgcagtggggttgcagagatgggggagactcaagtcttactccccaggagctcccagggcccaaggaggagaatgctgcctcctttcagtctggtctacacccactttctggtagcctctctgcttcctgtaattctggctgtttttccagactcagctcaaatagtgcccctccttaagcccatccctcgcccccagcctgaggtgatctttccctcctctgaactattagagcagttactgtctgttcagttcgtttggcaggcacacacagtggcataaattctattgttttgaactctgatttaaaattaaattgcagctgggcgtrgtggctcatgcttgtaatcccaacacttagggagtcaggagaatcacttgagctcaggagttctagaccaatctgggcaacagagagaccccatctcttttaaataaaaagttaaattgcttaatttcccccgtattcctggcctgtctgcccctttcacataattttaacctggtttcttgta

SEQ ID NO: 550217 - DNA, 2949 bp, Homo sapiens
agtgctctttttttatttattttggtctcttcttttcataaataattacctacacatttgtttctgttttccatactggtcatatgttttctctcattattttcatagtttatctttgccctctgcagttctgaagaaactgagtgctccttcagtttcctttgcacaaatctgattctgttatttgttgcctccaaagacagatatcattcttctgtaacatttttgtttcttttcaattgtctgtactttaatatatccaatctctgtgttttttatttctgagtcattcaatgcatacacaaggatggaaaacaattttctaaaacattttttctgctttctgtattaactcttgctttatatatgcttttcctctgagactttaattttccatgtcaagtaattactactgacaacgagttttgctttaatggtcttgttatttttttctttactgatctgagattgtgataaaaatctattgaagtgtagggttttctaacagacaagtgacaagattgaccattagcccttggttctactgataacttgttttttttttcagcagaaagcttctaagcttcacagttgaagagtagattgttatgaagaaattcaggcccaaattccaatgagtagcagcattcaattaatgcaattcttctagaattgttggtagatggatcatcgtctttcyccattctgtggtcgtctcaccttgatctgataaaatatctagagcctctctctctctctctcacacacacacacatacacatacacacacacacactgtgagcatgcacacattactactgtctctattcccactactgtaacacctacagtgcttttgggactatatctctttcccgggacatactgcattactgtaagttcttccttcctttcttcccttttcagagggagcagaaaaagtaatcactttttctgtagatgtagaggcactgattgaagaaaggtgcccatgtatgactgcttgattttctgagtgatacaaatcttggatctttgagtcatggggaagaaacacagggtctctctacattacttaaggccataggttttctttactttagtttgtgaatttcaatttagcaatgtagagtcttcccagaaactaataataggttgactgaaagtgtcagttttgaatattatcataaaatgtcatctttctctgggcccttacagccattttaagctaaatcaagcactgctaagaaaaaaaaacttatttctgacatcttaaactatgataaaaaacattccatcagcatcattttgagaaaaattcaatcttcctttaatgtttactcacaaccaaaagctattcccgaacatctgtgtaatattactttgacacagatggtaaaataattattaataaaatagcacatgtaaatatttggatccatttcagtagaactgagaaagccacaaaatcatcttacaaagtaaattttcattgctgactcaatgtgcattttactttgcaccaaaagtgctgcaattttctttggtagttttgaaatgaacaagtaacatttattttcaagccccttcaatgtagtgtgcaaatgagttcatttttatttcacaggaggccaggatccacctttatctcttagaattgtacacaggtcggtaaactgctttgaactgacaaggtctagtctcctaaatacagcttaacttaccttctcaaagaataaaaaaagaaaaaagaagagacataaaaaaacttgagaaagtttttcaaaaacataacacatattgaatttttagaagtctagatgtcttataaatcaatgtagaataagtcatttctacaggcttccaaatgtttcccctaattttttaatgtcagttgtttcatactactcttttataatttttgtcatttttcatttttcttgcaccagtttcattttaacaatttggaagttgatcttcttgtcccttggaccatacaacaggtttgttactgtgtgttcaggcagccaagggtactatgagaagtcctggactaggagatggaaaatctagattgagtgtttcacttgcatcacatgagttttaccagtgctgtatggtcagctgtcacctgtctgtatggtcaggctggtgtcaatttgcaaacaataactggtctgcaccatgaggattatggatattgggagaaagtatgaaaaatgttatataaatgaggtaattttttgtttgtagaatgataataaataagaataaaaatataaatctgtatattttctgtcttctttttatcatttcattttttctagcaagttttagtaattttacaaaaacattcaatctacaatgcattaaaaataaactgactcttaacccacagagagtctgagaagcactgagctctaatacatccagagagccaattagtctctcagaacctgaatttatctgtaaaaatatgaataatgaactccaccctgcattttttacagagtatgtgaaaactaaacacaattacgtattcataagctatttatacctataaggcctcatataaatatacagtcatcatatactaagtaataattatttgtgaagtagcatggcatctcagctaaaagaagcctggcatctattagatactaaaggtttttatactttttgtataaatacaaaaatagaaattttggcagtggatacaattgcacacaaaataactgtctcagggagcagcatatgatttaaaggcaagtcacatcatctgttaatagcaaactttctttatctataaaacaagggtaattatgactattaattttaggttgaggtgaggttgaaataatacacgaaagtatttagtggttattacttggtatgtgaaaagtattaagtattagtcttatatctttaagctctttatgctaagaaaac

SEQ ID NO: 550218 - DNA, 2949 bp, Homo sapiens
agtgctctttttttatttattttggtctcttcttttcataaataattacctacacatttgtttctgttttccatactggtcatatgttttctctcattattttcatagtttatctttgccctctgcagttctgaagaaactgagtgctccttcagtttcctttgcacaaatctgattctgttatttgttgcctccaaagacagatatcattcttctgtaacatttttgtttcttttcaattgtctgtactttaatatatccaatctctgtgttttttatttctgagtcattcaatgcatacacaaggatggaaaacaattttctaaaacattttttctgctttctgtattaactcttgctttatatatgcttttcctctgagactttaattttccatgtcaagtaattactactgacaacgagttttgctttaatggtcttgttatttttttctttactgatctgagattgtgataaaaatctattgaagtgtagggttttctaacagacaagtgacaagattgaccattagcccttggttctactgataacttgttttttttttcagcagaaagcttctaagcttcacagttgaagagtagattgttatgaagaaattcaggcccaaattccaatgagtagcagcattcaattaatgcaattcttctagaattgttggtagatggatcatcgtctttctccattctgtggtcgtctcaccttgatctgataaaatatctagagcctctctctctctctctcacacacacacacatacacatacacacacacacactgtgagcatgcacacattactactgtctctattcccactactgtaacacctacagtgcttttgggactatatctctttcccgggacatactgcattactgtaagttcttccttcctttcttcccttttcagagggagcagaaaaagtaatcactttttctgtagatgtagaggcactgattgaagaaaggtgcccatgtatgactgcttgattttctgagtgatacaaatcttggatctttgagtcatggggaagaaacacagggtctctctacattacttaaggccataggttttctttactttagtttgtgaatttcaatttagcaatgtagagtcttcccagaaactaataataggttgactgaaagtgtcagttttgaatattatcataaaatgtcatctttctctgggcccttacagccattttaagctaaatcaagcactgctaagaaaaaaaaacttatttctgacatcttaaactatgataaaaaacattccatcagcatcattttgagaaaaattcaatcttcctttaatgtttactcacaaccaaaagctattcccgaacatctgtgtaatattactttgacacagatggtaaaataattattaataaaatagcacatgtaaatatttggatccatttcagtagaactgagaaagccacaaaatcatcttacaaagtaaattttcattgctgactcaatgtgcattttactttgcaccaaaagtgctgcaattttctttggtagttttgaaatgaacaagtaacatttattttcaagccccttcaatgtagtgtgcaaatgagttcatttttatttcacaggaggccaggatccacctttatctcttagaattgtacacaggtcggtaaactgctttgaactgacaaggtctagtctcctaaatacagcttaacttaccttctcaaagaataaaaaaagaaaaaagaagagacataaaaaaacttgagaaagtttttcaaaaacataacacatattgaatttttagaagtctagatgtcttataaatcaatgtagaataagtcatttctacaggcttccaaatgtttcccctaattttttaatgtcagttgtttcatactactcttttataatttttgtcatttttcatttttcttgcaccagtttcattttaacaatttggaagttgatcttcttgtcccttggaccatacaacaggtttgttactgtgtgttcaggcagccaagggtactatgagaagtcctggactaggagatggaaaatctagattgagtgtttcacttgcatcacatgagttttaccagtgctgtatggtcagctgtcacctgtctgtatggtcaggctggtgtcaatttgcaaacaataactggtctgcaccatgaggattatggatattgggagaaagtatgaaaaatgttatataaatgaggtaattttttgtttgtagaatgataataaataagaataaaaatataaatctgtatattttctgtcttctttttatcatttcattttttctagcaagttttagtaattttacaaaaacattcaatctacaatgcattaaaaataaactgactcttaacccacagagagtctgagaagcactgagctctaatacatccagagagccaattagtctctcagaacctgaatttatctgtaaaaatatgaataatgaactccaccctgcattttttacagagtatgtgaaaactaaacacaattacgtattcataagctatttatacctataaggcctcatataaatatacagtcatcatatactaagtaataattatttgtgaagtagcatggcatctcagctaaaagaagcctggcatctattagatactaaaggtttttatactttttgtataaatacaaaaatagaaattttggcagtggatacaattgcacacaaaataactgtctcagggagcagcatatgatttaaaggcaagtcacatcatctgttaatagcaaactttctttatctataaaacaagggtaattatgactattaattttaggttgaggtgaggttgaaataatacacgaaagtatttagtggttaktacttggtatgtgaaaagtattaagtattagtcttatatctttaagctctttatgctaagaaaac

SEQ ID NO: 550219 - DNA, 685 bp, Homo sapiens
ggatcctgacaaagttttggagaaattctagtcaagagacacacaaaaagtgagttctatgtgggccattcattcaatactgaaatgctgacagtgtccaaataaacccagatccctgcctccccccaaaaatgcctggtctttcaggggagacaaacctataagttacaaatacagggtgacttctgtaaacagtggtcactgtctcagttgctgcaggaaaacaaaagttttaatgtcacagaaagtcacaaatgagctgactacttgtaatgtgctaagtttgagtgtgttccctagaattcttgtgttagaaacttggtccccactgcagcagtgttgagaggcagaacttttgggaggtgactgggtcatgagagctctaccctcatgaatggattgatgcattcaaggattgatggattaatgggttattgagggaacgggttagttatcgtgagagtggagctgttttacaagtcagtttggctgtccctcgtgaacccccttgacaggtgatgtcctgcactgcggattccccactagcaagaaaacccttaccagaagcrgcccctccaacttggacttcccagcctccagaattaaaagaaaacagactaagacacaacattagtgcctacctgaacagtcctccaccccaaacactagcatctacttatctggt

SEQ ID NO: 550220 - DNA, 361 bp, Homo sapiens
aaaactggatgagtttcctttcatttctgtgttagcagartttagtgcaatgcctgatacatacatgcctaataactgtttacccaatgcaattactttcctaagattctggtttccaaaggacatttttagggttaatgtcagttactaatttactttccaagaatatgcaccaaggctacatgtgagcactttttgacgatggtacagcacaggatttgggatgcaggcctggtcctccatggtccaggatccactgactaatgctggacccttattatccagccaggcatctatcaagccagtgtaaaaaaagtgaggaatcaactgattccccacatctgctccaaatcagacaatt

SEQ ID NO: 550221 - DNA, 565 bp, Homo sapiens
caggaagtaggcgctagggctaggtgaacatgttttagagtaattccattaagatataataatagtgaatttgtggaaaatttacatttattaagagggtagggacagaggatctatactttagaagatgcctactgtctgaaaagatagagccaacagaggcactccacatgttctactgtgtggaatggccctttccttagacagcttgggctggtgtaacaaaatgccataaactgggtggckcaaacaacacatgtatttctcatagttctgggggctgggaagtctaagatcaaggtaccagcagattccattgttggtgagagctctcttcccggctcgtagacagccgccttctcagtgtgtgctcacctggcctttccttggtatggaaagaaacagaactctgtcttcctctttttatttatttatttatttatttatttttgaaatggagtcttgctctgtcacccacgctggagtgcagtggcaccatctcggctcactgcaacctctgcctcccgggttcaagcacttctccctgcctcagactcctgagtag

SEQ ID NO: 550222 - DNA, 565 bp, Homo sapiens
caggaagtaggcgctagggctaggtgaacatgttttagagtaattccattaagatataataatagtgaatttgtggaaaatttacatttattaagagggtagggacagaggatctatactttagaagatgcctactgtctgaaaagatagagccaacagaggcactccacatgttctactgtgtggaatggccctttccttagacagcttgggctggtgtaacaaaatgccataaactgggtggcgcaaacaacacatgtatttctcatagttctgggggctgggaartctaagatcaaggtaccagcagattccattgttggtgagagctctcttcccggctcgtagacagccgccttctcagtgtgtgctcacctggcctttccttggtatggaaagaaacagaactctgtcttcctctttttatttatttatttatttatttatttttgaaatggagtcttgctctgtcacccacgctggagtgcagtggcaccatctcggctcactgcaacctctgcctcccgggttcaagcacttctccctgcctcagactcctgagtag

SEQ ID NO: 550223 - DNA, 783 bp, Homo sapiens
acccagaagtttaaaaggcacaaggcagaggggatattcatttgaagaactcagctttctctccaaacaatgacagctgctactttattgccaatgtgaaaagcctcttgttctcacagaacagcccaataaaatgaatctcattcagaaagactgatatcctttgatttcatttgtaattaagacctctgtggagtggtcatttacaacatgaaatgtactgaaattccaaaattgtattctgacctgcattttggggtcctgcatagaaatcttcaagccttgactccagtggcccagggattcctaaaaaaaaamcaaaaaaaaaaacaaaaaaaaaaaaaaacaagcaatgtaaattacaaatgccaataattaaatttggcaacagttaatactgtgtgatagcacaactaaacttggaaataagcttagtttttgagaattaaacaagattcacttgactctgcttcactccattgccttcctatattctctttttttttgagacaaagtctcactctgtctcacccaagctggagtgcagcggcgtgatcactgcaacctccgaagtgattctcctgcctcagcctcccaagtagctgggattacaggtgcccaccaccacgcccagctaacttttgtattttttagtagagacggagtttcaccaggttggccatgctggtcttgaactcctcacctcaggtgatccactggcctccacctccccaagtgctgggattacaggcgtgagccaccacacccgaccctatattcttt

SEQ ID NO: 550224 - DNA, 554 bp, Homo sapiens
gttttttctataactgctctcaaatcctttttggacactgttaaaaaaacttcttattaagtgtaaatttatctggagccaaaatgtgccttggatgcccaaggtttagaacagtgcctkacacaagacaattgttaattagtattattaaagcttttctgattatatgaataagtgtaaacaaattaagatattataataaaaataacatacaaacggcatccaagaatataaattcctatgaattccaccccctcaaatctattctgacatctctttctatgcagttgaaattctaaaaatgtcattctattgacatagtgcttccctcttctcatcattcatgacaatgcatttttctttctcattttatgggtagaagccattggcatttttctagagaagcatttgcagggattatacattctcacagtttgctgcattctttgatagaaaaatgtgctgcattgacctgatagtcgtaaaatacttgagatttactatccttctctcctgtggatgatgagaaaagctcttctctgctaaatagtaaa

SEQ ID NO: 550225 - DNA, 301 bp, Homo sapiens
ccagcctgggtgacagagcaaaactctgtctcaaaaaataaaaaaaccttgaacaatcattcaacagagatgtartagagtcccagggcttgaggaggaaaggtacagcatttaccctaatatggtttattcgctttgataatctttggaaacgttggacttggtttttgtgattaaaagactctggatctttattctgagctgctagattaatctgttcattccagataacaatgcagggaaatggtatatacacagaaaccaatgttactagtagcgttactaccaggtgagtaggaaa

SEQ ID NO: 550226 - DNA, 1923 bp, Homo sapiens
taatgtaatggacctctctcactcatcccacctctgtcccatagccttctctctctcctgggccagcttatttagtcttttataacctgcccccaacatgtcaactctccttgccatgaaaacacccctgggcttgaagttcttttcctgctctgactgctttctggagaaaatttgcctttattgcttttatggtttttctctcttgaagagagtaaagaaggcaaaaaagctgactaggcagagggaaaggggaacacatgaaaataaactttacgctgtactgtgttccgtaggaacatttytagcaatgccagtataaagcgacctctgacttgaactgagcagaattgtaacagaacatttaaaaatttttaagtaggtatttcaatagcatgttataattttcagaagctttacttgtagagatagaaatgaaagagcatatataggaaaatatctaaatatgatgtaaaaacaaggatatgaaaaaagtatatacatacaatattgatgactagatttgtgcaaatacaggctctgaggtcagactgttcaggttcaatttttgctcccttcactgacggatattcctgaatcctcatctctaaaatggagtaatactaattccttctgcatagggatggtgtaaaggccaaatgaataaacaatactgattgtaattactaacttaataatgatatataaaatgataatgtatgaactaacatttttagcattactacatgcccaattctgagctaaagtactttacatgtcatatttaattcatacaattacttgtgagacaggaatagtatatattaagtacttagtagagtacctggcctataataagctttcagtaaagagtaactaatataacaattattactttaaatgttattgttatgattagccaatgttataataaaacttctccttgttggaagcattttttaccacaggtactaattatagagaatggatacacatgtattttagaactgcagctaatatatattgttttcagtcaggaagaaatatcaagatgataaggggtaggatttttaaaaagagcaagaagaggtagggcctgagtctgccaaaagaagtgaagaggcaggtctgtgacttgtacagccactgacttatatcacatatttatcaaggtatcagagataaacacttcctccgggtattcagggtcagttttaccagcggccttagcccagtcctcctgttgagtcatttccctggatccctccacctccatcttcaccatccctccaggattctggagatatttgatcagagagaccaaggaccggctcctttaactcattcatcaccatctagaaaattctacaaagaaaaaattagatgattctgcagagctagctgttgagtgatttcagggacccttttttccttttcccctttgcactgtctttaagcgaaggaaaaaaaacacaactatttgctaatgcttgaaattcatttgacaaggtgggggtgaggcagcatgtggtctaaaattagagagaagaggccaataaaagaaaatgcatatgtctggtgggtggggtggggggtgaaaattttaatgcgagtaagtttcagataaaatgtaaccaatcaatcaaaggtaaaggaatggtattggtcattttcctattttgataggggagttggagtgaggagagccggaggtatcaggagtttagagtagtaggtagacctaggacaacaaaggtgaggagtccttcatgaacggaccccacattcacctgagctcaatctgtgtgcatccaactaagccagtgcctgcagaggccctacactgggctgtcttgacctgtgtctgggaaagcaagcagagctgccctaagaaagctatcctgtggctgctttattttaaag

SEQ ID NO: 550227 - DNA, 623 bp, Homo sapiens
gccgttctcctgcctcagcctcccgagtagctgggactacaggcgcccgccaccacgctcggctaattttttgtatttttagtggagacggggtttcaccgtgttagccaagatggtcttgatctcctgacctcgtgatccgcccacctcagcctcccaaagtgctgggattacaggcgtgagccaccgygcccggctattagtactagttctaatattaagactggtttagcatcgtgctgtttattgtttatctaagcgctcattattctgccttgcacttcagaaaaatatgtcaataaattcacaaggaagttatactgtaattcctttgtcttaacacagtacttctatttttcagtcaccaggagactaaagtccatcaaaaacatccagaaaattaccaagtctatgaaaatggtagcggcagcaaaatatgcccgagctgagagagagctgaaaccagctcgaatatatggattgggatctttaggtaagggaagagtgtaattcacaaattaggaagaactgtttcacacaaggaagactactgatgacttacatttagagcttacagtgatgtcaagcctatctgagcacttgccatgtacttatttttcatc

SEQ ID NO: 550228 - DNA, 623 bp, Homo sapiens
gccgttctcctgcctcagcctcccgagtagctgggactacaggcgcccgccaccacgctcggctaattttttgtatttttagtggagacggggtttcaccgtgttagccaagatggtcttgatctcctgacctcgtgatccgcccacctcagcctcccaaagtgctgggattacaggcgtgagccaccgtgcccggctattagtactagttctaatattaagactggtttagcatcgtgctgtttattgtttatctaagcgctcattattctgccttgcacttyagaaaaatatgtcaataaattcacaaggaagttatactgtaattcctttgtcttaacacagtacttctatttttcagtcaccaggagactaaagtccatcaaaaacatccagaaaattaccaagtctatgaaaatggtagcggcagcaaaatatgcccgagctgagagagagctgaaaccagctcgaatatatggattgggatctttaggtaagggaagagtgtaattcacaaattaggaagaactgtttcacacaaggaagactactgatgacttacatttagagcttacagtgatgtcaagcctatctgagcacttgccatgtacttatttttcatc

SEQ ID NO: 550229 - DNA, 623 bp, Homo sapiens
gccgttctcctgcctcagcctcccgagtagctgggactacaggcgcccgccaccacgctcggctaattttttgtatttttagtggagacggggtttcaccgtgttagccaagatggtcttgatctcctgacctcgtgatccgcccacctcagcctcccaaagtgctgggattacaggcgtgagccaccgtgcccggctattagtactagttctaatattaagactggtttagcatcgtgctgtttattgtttatctaagcgctcattattctgccttgcacttcagaaaaatatgtcaataaattcacaaggaagttatactgtaattcctttgtcttaacacagtacttctatttttcagtcaccaggagactaaagtccatcaaaaacatccagaaaattaccaagtctatgaaaatggtagcggcagcaaaatatgcccgagctgagagagagctgaaaccagctcgaatatatggattgggatctttaggtaagggaagagtgtaattcacaaattaggaagaactgtttcacacaaggaagactactgatgacttacatttagagcttacastgatgtcaagcctatctgagcacttgccatgtacttatttttcatc

SEQ ID NO: 550230 - DNA, 899 bp, Homo sapiens
ggtaaagtcttttttcttaaacacattgtgtatttcccagtcyctctttctgtatctattttatatattcatcaaggttccaaattcccttaataaccagagaaaacctttttgttttccaattataggtaaaggttcaaatgcaaatgaagtgtggggtttgagtaattcaaattcacattaaagtgcaagtgactaacaccagagtccttcctcaaagtgaggatcctttgctactgacctggaaggcctgaaactgttctgttctgcgagcaggcataatgcaaattggatctgttgcttaatatttctcctttttctgtgtgactctgttgttttgaatcaacagattgattctgtagcaccaataacacattcatcacttctgcatgttatctcttggcttttggataatatgtagcattggaataattataactgaggctgttttgtcatagattaaaaacatatgattcgaaataaacatacctttagaaaaagacatttggaacttgttatctttgtatgcataggtttttcttttttttttaaagacaatcgtatgggattcaaatgctttgactgacctaacagagagcagtaaagagcttaatgcatttctttcctcacacagctttcctagccagagctatgatctgaatgattggcaagccctgtaactgaatttccaggaaaacaaatgacctcatagatggagtggctccatattaggaagtgcaacaaaagttatgaaatgcagtcacagcagggaaagaagtttgtttgcacttggatggtgaccttttgtttctaaggtgccatagagtgggtcacgctactaagtgccattaccttggtcctaggggaaaatattgggtctctcttcccctccttctctc

SEQ ID NO: 550231 - DNA, 899 bp, Homo sapiens
ggtaaagtcttttttcttaaacacattgtgtatttcccagtccctctttctgtatctattttatatattcatcaaggttccaaattcccttaataaccagagaamacctttttgttttccaattataggtaaaggttcaaatgcaaatgaagtgtggggtttgagtaattcaaattcacattaaagtgcaagtgactaacaccagagtccttcctcaaagtgaggatcctttgctactgacctggaaggcctgaaactgttctgttctgcgagcaggcataatgcaaattggatctgttgcttaatatttctcctttttctgtgtgactctgttgttttgaatcaacagattgattctgtagcaccaataacacattcatcacttctgcatgttatctcttggcttttggataatatgtagcattggaataattataactgaggctgttttgtcatagattaaaaacatatgattcgaaataaacatacctttagaaaaagacatttggaacttgttatctttgtatgcataggtttttcttttttttttaaagacaatcgtatgggattcaaatgctttgactgacctaacagagagcagtaaagagcttaatgcatttctttcctcacacagctttcctagccagagctatgatctgaatgattggcaagccctgtaactgaatttccaggaaaacaaatgacctcatagatggagtggctccatattaggaagtgcaacaaaagttatgaaatgcagtcacagcagggaaagaagtttgtttgcacttggatggtgaccttttgtttctaaggtgccatagagtgggtcacgctactaagtgccattaccttggtcctaggggaaaatattgggtctctcttcccctccttctctc

SEQ ID NO: 550232 - DNA, 692 bp, Homo sapiens
aagctttgcctctggagaagggcttgttctgggatgggatctggagctaggaaggagacatctcaggagtattttggtcaccagcacaacttgtcaacacagatattcagttcttttctctactgttgtctgagtggcccctagcaatctggctgaccatgtgcctgactgtattctcttgttatctgaagattctgcacttatcttttcattgttacctccttaagtgctaycctagatacttgggctcagaagattgtaaactgagaagactcttcttcctctgtcttcctagtcttgattttgtagcctgtcctgatgatttttccttttttaaatagactattctttagaggagttttaggtttatagcaacattgaatgggaggtgcagattccctgtataactcattttttctttgtattgcctttgcttctttgtcaaagatcagttgactatatctgtgtggatctatttctgggctgtctatctgttccattgatctatgtgtttattcttttgctagtaagacactgtcttgattactgtagctttatagtaagtgttaaaattgggtagttgctagctagattaacaaagaaaaacaaagaagatccaactaagtataaccagaaatgacaaagttgacattacaactaatcccacaaaaatacaaaagatcctcggggac

SEQ ID NO: 550233 - DNA, 2242 bp, Homo sapiens
ggatccattcttagatatttaaactaagaaaaaccaaaaaacaagcaaaaacaaaaataagattgataaagacaaaatgtagggccatgcttggtgtctgacacttataatttcagtgactggggaggctaagatgggaggatgcctgggcaatatagtgagatccccttctctaaaaaaaaatgttttttttttttcttgagacagggtctcactctgtctcccaggtaggagtgcagaagcacacaatcttggctcactgcaacctccacctcctgggttcaagcaattctccttcctcaacctcccaagtggctgggattgcaggcatgtgtcaccacgctgggctaatcttgctatttttagtagagacagggtatcaccatatttgctaggctgttctcaaactcctggcctcaagcgatccacccgccttggcctcccaaagtgctgcgattataggcgtgagccaacgtgtctggcccaaaaaatttttaaataaaaaacatatatataggagagttatacaaggactggttaattactaatgacattctagttttttgttttttttttttttttgagacatagcctcactctgtggcccaggctggagtccaatggcacaatctcagctcaatgcagcttccatctcccaggttcaagcgattctccctacctcagccaaccaagtagctggattatagatgtgtgccaccatgcccagctaatttttgtatttttaataggaacagkgtttcaccatgttgatcaggctggtctcgaactcctgacctcagatgatccacccgcattggcctcccaaagtgctgggaattataggcatgagccactgcgcccagcccaacattctagttcttaaactgccctttattttgatgatgtatttgtgtactctgtgaaaagtgagatatactgttcataagattgtgtgagtgatcgctgttcgcctagctcaaagttcttcctgtctctcccacggaattggggagagttatatacagggcctacttaattactaatgacattttagttcttaaactgggtttttaagtaccaaccatttgttttacaattcttgtttatgttgcatatacccttttgtgcagatataatatttactataaaaatgtttaaaactctcctgagatctcaatcagagacaggaaacctcaatgccactctacagtttttgtcattttttaaatttcccctatctttttcttacttatgtgccacatcaccatttttattcatatagatataaaagtgcagaaattttagtctttagcaggaatttcaaaaatcacaaatggcaatgttacctgcctcattaaaatcatttaagggtctcaatccaatcttgtcagttgaatatctgatatgtgtagtttggatgtagttaagggccttcatctgcacttttctttctgtttcttcttgcagttgcagattgtatcactggactcctctccctctggttttctttgtgtatgttcattttgtgtctctccaacgtattagttcatcctctttaggtgaatttctttctttttatcctactcttcacgtctgtctctctttccattgtgtctgtttcttttttctctccctctgccacttttcccttaatacggtttaaattttctctcatttgtctttctcctttttctctactgactagatataccatcagaggttttttttttcatttctaacaacctcttatagtcattaaagaaatgcttcattttccattcttttaacataagaagaacaagaagcatttttctctttttgcaacacagcccaccaaggtaggtgaagatgttttctaacagactagatccaagccagactgcctaaatcatcattctggttacacctagtataagcgatggggtttggggcaggatgccgcaacttgggtactctaatttccctttctgttaaatgagaacaaaagtaatatcacatgtttttttgtttgtttgttttgttttgttttttgagatggagtcttgctgttgctctgtcacgtaggctggagtgcaatggtgcggtctcggctcactgcaacctcggcctcccgggatctccttcagcctcccaagtagctgagactacaggcatgcgccaccacgcccggctaatttttgtatttttagcagcgacagggttccactatattggccaggctggtctcaaactcctgatctcg

SEQ ID NO: 550234 - DNA, 659 bp, Homo sapiens
ttggggctgcagtaaagggtggttcctctagggatgtgtcaggagattaacccgagagaagttggcttgtggagagccttggatgcagtttgggagcctggacttgaggtgtaggcagggggcccctggtggggtagggttggctatgccagtcagaggattgacaggatcagatttgcagtttagaaagactagtctgatggatgtctagaggatggattgctgagggaaagccaggaaacaagatgggaaaaggcttttccttaacatgtaagtcaggctctgagaggtcagggttataggggaaaaagaaaaggaacctgtttctctgtaatggggatgctcaggtgtagcttctggggcttgacttggtgcgtattcartgcttcatccacgaggactctaggatgttcagctttgggtccctctcatgtttactcaaattttgctgcatcccacaggtaggataaagaaaacgttggtaagaacaatgtccaaaatacaggtcttgttctcaattcacattcagctcaatcctcattgtcctctttggtaatgaaaactgctattcagagtggtagaaataaagcaggtatgatcctcaggtgtagattgtactttacagtttacaaagattgcctgtgtgcccgcgtgatgct

SEQ ID NO: 550235 - DNA, 557 bp, Homo sapiens
tgagcattactaccacaagaaaatctgagaatcccttttgggataatttaagaaatgtgtagtatatgcatagttacacttaatgcagcgtagctccacaatgcttatgcttcgtttatgaataattctatattcttttttttctgatataatttttgtgctatcttggtactttactagcaacatgtcattaagaccagataarcaaattttatcttaaattgttagctgatctcatagtacagatgtctgatttctatttaaaatccagttctacacatttattctccagttatgaagctgtgggttttggttctttcatttcaaatctatggataagcataagtggtctgttcacagccttttttttttcttttttggtttcattgcatttatatcattgacctttgcttcagaaagcattcaagtctttaacagagagagaccatgaaagggagtgttgtaaagtctttattctacgaaggaagtcacacaggcaaagctttatatttgctgagtgatttcttttctttcttttttttttttttttttttttt

SEQ ID NO: 550236 - DNA, 557 bp, Homo sapiens
tgagcattactaccacaagaaaatctgagaatcccttttgggataatttaagaaatgtgtagtatatgcatagttacacttaatgcagcgtagctccacaatgcttatgcttcgtttatgaataattctatattcttttttttctgatataatttttgtgctatcttggtactttactagcaacatgtcattaagaccagataagcaaattttatcttaaattgttagctgatctcatagtacagatgtctgatttctatttaaaatccagttctmcacatttattctccagttatgaagctgtgggttttggttctttcatttcaaatctatggataagcataagtggtctgttcacagccttttttttttcttttttggtttcattgcatttatatcattgacctttgcttcagaaagcattcaagtctttaacagagagagaccatgaaagggagtgttgtaaagtctttattctacgaaggaagtcacacaggcaaagctttatatttgctgagtgatttcttttctttcttttttttttttttttttttttt

SEQ ID NO: 550237 - DNA, 557 bp, Homo sapiens
tgagcattactaccacaagaaaatctgagaatcccttttgggataatttaagaaatgtgtagtatatgcatagttacacttaatgcagcgtagctccacaatgcttatgcttcgtttatgaataattctatattcttttttttctgatataatttttgtgctatcttggtactttactagcaacatgtcattaagaccagataagcaaattttatcttaaattgttagctgatctcatagtacagatgtctgatttctatttaaaatccagttctacacatttattctccagttatgaagctgtgggttttggttctttcatttcaaatctatggataagcataagtggtctgttcacagccttttttttttcttttttggtttcattgcatttatatcattgacctttgcttcagaaagcattcaagtctttaacagagagagaccatgaaagggagtgttgtaaagtctttattctacgaaggaagtcacacaggcaaagctttatatttgctgagtgatttcttttctttctttyttttttttttttttttttt

SEQ ID NO: 550238 - DNA, 557 bp, Homo sapiens
tgagcattactaccacaagaaaatctgagaatcccttttgggataatttaagaaatgtgtagtatatgcatagttacacttaatgcagcgtagctccacaatgcttatgcttcgtttatgaataattctatattcttttttttctgatataatttttgtgctatcttggtactttactagcaacatgtcattaagaccagataagcaaattttatcttaaattgttagctgatctcatagtacagatgtctgatttctatttaaaatccagttctacacatttattctccagttatgaagctgtgggttttggttctttcatttcaaatctatggataagcataagtggtctgttcacagccttttttttttcttttttggtttcattgcatttatatcattgacctttgcttcagaaagcattcaagtctttaacagagagagaccatgaaagggagtgttgtaaagtctttattctacgaaggaagtcacacaggcaaagctttatatttgctgagtgatttcttttctttctttttttyttttttttttttttt

SEQ ID NO: 550239 - DNA, 3009 bp, Homo sapiens
atatattttggagggaacttggttttctttttatttttattttttgccatgtcaggcttgagcaggatagcaaatatataaattgagctctctaattataatctcaatatatgaattcttgctaattaaaatactttgcaccagcaaaaacaatttccacatatgtgtttaggtggtagttaagtaactccatataaaaataagtgcactttcccctcctttcttcagtgactagaaaacttccatacttttaaaataatcaaataataatttagagagcaacagctctcaactctttgctggtgcttatcacactgcctttcttcactccattcttagctctgctaattccttcttgtctgtaatgataataagggaatgtgggtgggtcagcacttctgtgtaggtcccctttccaaatttgtcttccaaaaagccaaccaaataaacaaccaaaaaatcgtgcaacaaaacacaaatagcattccaacagcttggcaagtgatgcattcacctgagattaagtggttttaggctgtcagtaacaaaattctgctttactgtcttattagaaaggcaacaaattcttcaaagaaaccaagaagtttacaaccttgacaaagtctctcattaccttcctcctcttatgtcttttctcttcacattatctgttgtgtatctactatagaaggctgcaaaacatacagcagaaatgatggcttgaaggcaattgatgtttgtaaataaatacacaacaggatccaagctgaagaggtgaacacatcagccgggtgggacaattctcagcatgggcaaacatagaaaaattctagcctatgttacattaaaaacaatgtcagtgcattttttcatgttaaagagttgttcaaagctaaagcatgttccttgctatgctgaccacaaacaagttttaagagtttcggaagtctggcaaaaatagaaacaaacaaacaaaaaaaaaaaaactgaagcaacattaaaccgcacaatgtaagcattgggcatgcacaaattttcaaaacaaaggaaggaaatcatccctctctacaacgtggttaggctgatttttatgaaataaaatgtaagaaatcagaaaagcaaaggttaggcacctacatatccaatatctggcaccgcgcagagtagaagagtgaaagaaataatgaagaacaaagtggttactttgcttcaggagttcatgatctatagttagaaaccaatataagcattttgagtatatttcaaagaaagagcaaaagcaggccgggtgtggtggcttgcacctgcagtaataacactttgggaggccaaggtgggaagattgcttgagctcatgagtttgataccagcctgagaaatatagtaaaacctcatctctataaaaaattaattaaaaaaaggcagagcaaaaacaaatatgaaagaaaacattagaaatcagagcttgggcaaagagttcaacgtgagcaaagcarctctgccctgggggacctctggagcatcccagcttcctgtagaggccccaccacatggccctttcccatcactgggaaccatcttctgtatcatgccaggattttcccccaaacttctcaacctaatttattcagccaaaacttatatatttcttgaatctttactaagagcaaggcactgttcaacataatgaaaatatggcaatgatttaaaacaaaaatgtttaccctcatgcaaattatattccagtgagaaaagacagatcattaataaaataactatggaaaatatataatatgccagaaggtaataagtggcacagagaaaaattaagtgtggaagggagctcaggaatgctgggagcgggtagatgtgaaggtagttagaatgctcaaggagggagtaataggcagaagaatggcctttctacatgtccatatccctatatggcaaaaaggacctgtggatgtgatgaagttatggatcatgagatgaggagattattctggattacccaggttggcccaatgtcatcacaagagtacttaaaagcaaaagagggaggcaggagagtctgaggcaagacgcatgacagctagggtcagaatgatgtggttgctgcctggaagggggccaggggccaagggatgcaggcatcctttcaaagctggagaaggtaagaaagtgttctctctcccctagagagagtgtgtgttctcttaggctactagaggtgtgctaatttattccagcaatcatagaaaacttatatagaaggtctcacagagaagataacatttgaacaaagattccaaggaggtgagggcaccagctatgcagatatctggggaagagcactcgaagaagaaaaggcaggcaaacagcagggtgcgtagcccatgtgcatgaagtagagaatactgggagtcagaaggctaacaggagacaggtcagagagagggactggggtgggtcaactcacactcagcctcactggctattgttagaactttgagttattctgagacactgagtataggagagtctatgaatatttatagaaattctgaacgtttacaggatgaataaaagttgtatgctagtaaacctattggttgggtggggagaagcccagatttgtagcatttgctaatttccattgtgtaaatatttctactgatggtttgacaaacacttcacaaaatttctgggtacttaattatcagctccagtagagtgctgcatgtatgacaccccatttgccaattccacactagattctattgggaacaagctgtatgagagtcaactggtggcagaaataaggaagtcctcaataaaaatcagcatttacttttgacagatgtgagattctggaacttatttctctttacttgctctgcctggtgattaaattatgattttaaaagaaatagttttaatttcttattagaatgctgccaccaaataaataaaatacgtactttaactatatgcaatattgtctatatt

SEQ ID NO: 550240 - DNA, 3009 bp, Homo sapiens
atatattttggagggaacttggttttctttttatttttattttttgccatgtcaggcttgagcaggatagcaaatatataaattgagctctctaattataatctcaatatatgaattcttgctaattaaaatactttgcaccagcaaaaacaatttccacatatgtgtttaggtggtagttaagtaactccatataaaaataagtgcactttcccctcctttcttcagtgactagaaaacttccatacttttaaaataatcaaataataatttagagagcaacagctctcaactctttgctggtgcttatcacactgcctttcttcactccattcttagctctgctaattccttcttgtctgtaatgataataagggaatgtgggtgggtcagcacttctgtgtaggtcccctttccaaatttgtcttccaaaaagccaaccaaataaacaaccaaaaaatcgtgcaacaaaacacaaatagcattccaacagcttggcaagtgatgcattcacctgagattaagtggttttaggctgtcagtaacaaaattctgctttactgtcttattagaaaggcaacaaattcttcaaagaaaccaagaagtttacaaccttgacaaagtctctcattaccttcctcctcttatgtcttttctcttcacattatctgttgtgtatctactatagaaggctgcaaaacatacagcagaaatgatggcttgaaggcaattgatgtttgtaaataaatacacaacaggatccaagctgaagaggtgaacacatcagccgggtgggacaattctcagcatgggcaaacatagaaaaattctagcctatgttacattaaaaacaatgtcagtgcattttttcatgttaaagagttgttcaaagctaaagcatgttccttgctatgctgaccacaaacaagttttaagagtttcggaagtctggcaaaaatagaaacaaacaaacaaaaaaaaaaaaactgaagcaacattaaaccgcacaatgtaagcattgggcatgcacaaattttcaaaacaaaggaaggaaatcatccctctctacaacgtggttaggctgatttttatgaaataaaatgtaagaaatcagaaaagcaaaggttaggcacctacatatccaatatctggcaccgcgcagagtagaagagtgaaagaaataatgaagaacaaagtggttactttgcttcaggagttcatgatctatagttagaaaccaatataagcattttgagtatatttcaaagaaagagcaaaagcaggccgggtgtggtggcttgcacctgcagtaataacactttgggaggccaaggtgggaagattgcttgagctcatgagtttgataccagcctgagaaatatagtaaaacctcatctctataaaaaattaattaaaaaaaggcagagcaaaaacaaatatgaaagaaaacattagaaatcagagcttgggcaaagagttcaacgtgagcaaagcagctctgccctgggggacctctggagcatcccagcttcctgtagaggccccaccacatggccctttcccatcactgggaaccatcttctgtatcatgccaggattttcccccaaacttctcaacctaatttattcagccaaaacttatatatttcttgaatctttactaagagcaaggcactgttcaacataatgaaaatatggcaatgatttaaaacaaaaatgtttaccctcatgcaaattayattccagtgagaaaagacagatcattaataaaataactatggaaaatatataatatgccagaaggtaataagtggcacagagaaaaattaagtgtggaagggagctcaggaatgctgggagcgggtagatgtgaaggtagttagaatgctcaaggagggagtaataggcagaagaatggcctttctacatgtccatatccctatatggcaaaaaggacctgtggatgtgatgaagttatggatcatgagatgaggagattattctggattacccaggttggcccaatgtcatcacaagagtacttaaaagcaaaagagggaggcaggagagtctgaggcaagacgcatgacagctagggtcagaatgatgtggttgctgcctggaagggggccaggggccaagggatgcaggcatcctttcaaagctggagaaggtaagaaagtgttctctctcccctagagagagtgtgtgttctcttaggctactagaggtgtgctaatttattccagcaatcatagaaaacttatatagaaggtctcacagagaagataacatttgaacaaagattccaaggaggtgagggcaccagctatgcagatatctggggaagagcactcgaagaagaaaaggcaggcaaacagcagggtgcgtagcccatgtgcatgaagtagagaatactgggagtcagaaggctaacaggagacaggtcagagagagggactggggtgggtcaactcacactcagcctcactggctattgttagaactttgagttattctgagacactgagtataggagagtctatgaatatttatagaaattctgaacgtttacaggatgaataaaagttgtatgctagtaaacctattggttgggtggggagaagcccagatttgtagcatttgctaatttccattgtgtaaatatttctactgatggtttgacaaacacttcacaaaatttctgggtacttaattatcagctccagtagagtgctgcatgtatgacaccccatttgccaattccacactagattctattgggaacaagctgtatgagagtcaactggtggcagaaataaggaagtcctcaataaaaatcagcatttacttttgacagatgtgagattctggaacttatttctctttacttgctctgcctggtgattaaattatgattttaaaagaaatagttttaatttcttattagaatgctgccaccaaataaataaaatacgtactttaactatatgcaatattgtctatatt

SEQ ID NO: 550241 - DNA, 3009 bp, Homo sapiens
atatattttggagggaacttggttttctttttatttttattttttgccatgtcaggcttgagcaggatagcaaatatataaattgagctctctaattataatctcaatatatgaattcttgctaattaaaatactttgcaccagcaaaaacaatttccacatatgtgtttaggtggtagttaagtaactccatataaaaataagtgcactttcccctcctttcttcagtgactagaaaacttccatacttttaaaataatcaaataataatttagagagcaacagctctcaactctttgctggtgcttatcacactgcctttcttcactccattcttagctctgctaattccttcttgtctgtaatgataataagggaatgtgggtgggtcagcacttctgtgtaggtcccctttccaaatttgtcttccaaaaagccaaccaaataaacaaccaaaaaatcgtgcaacaaaacacaaatagcattccaacagcttggcaagtgatgcattcacctgagattaagtggttttaggctgtcagtaacaaaattctgctttactgtcttattagaaaggcaacaaattcttcaaagaaaccaagaagtttacaaccttgacaaagtctctcattaccttcctcctcttatgtcttttctcttcacattatctgttgtgtatctactatagaaggctgcaaaacatacagcagaaatgatggcttgaaggcaattgatgtttgtaaataaatacacaacaggatccaagctgaagaggtgaacacatcagccgggtgggacaattctcagcatgggcaaacatagaaaaattctagcctatgttacattaaaaacaatgtcagtgcattttttcatgttaaagagttgttcaaagctaaagcatgttccttgctatgctgaccacaaacaagttttaagagtttcggaagtctggcaaaaatagaaacaaacaaacaaaaaaaaaaaaactgaagcaacattaaaccgcacaatgtaagcattgggcatgcacaaattttcaaaacaaaggaaggaaatcatccctctctacaacgtggttaggctgatttttatgaaataaaatgtaagaaatcagaaaagcaaaggttaggcacctacatatccaatatctggcaccgcgcagagtagaagagtgaaagaaataatgaagaacaaagtggttactttgcttcaggagttcatgatctatagttagaaaccaatataagcattttgagtatatttcaaagaaagagcaaaagcaggccgggtgtggtggcttgcacctgcagtaataacactttgggaggccaaggtgggaagattgcttgagctcatgagtttgataccagcctgagaaatatagtaaaacctcatctctataaaaaattaattaaaaaaaggcagagcaaaaacaaatatgaaagaaaacattagaaatcagagcttgggcaaagagttcaacgtgagcaaagcagctctgccctgggggacctctggagcatcccagcttcctgtagaggccccaccacatggccctttcccatcactgggaaccatcttctgtatcatgccaggattttcccccaaacttctcaacctaatttattcagccaaaacttatatatttcttgaatctttactaagagcaaggcactgttcaacataatgaaaatatggcaatgatttaaaacaaaaatgtttaccctcatgcaaattatattccagtgagaaaagacagwtcattaataaaataactatggaaaatatataatatgccagaaggtaataagtggcacagagaaaaattaagtgtggaagggagctcaggaatgctgggagcgggtagatgtgaaggtagttagaatgctcaaggagggagtaataggcagaagaatggcctttctacatgtccatatccctatatggcaaaaaggacctgtggatgtgatgaagttatggatcatgagatgaggagattattctggattacccaggttggcccaatgtcatcacaagagtacttaaaagcaaaagagggaggcaggagagtctgaggcaagacgcatgacagctagggtcagaatgatgtggttgctgcctggaagggggccaggggccaagggatgcaggcatcctttcaaagctggagaaggtaagaaagtgttctctctcccctagagagagtgtgtgttctcttaggctactagaggtgtgctaatttattccagcaatcatagaaaacttatatagaaggtctcacagagaagataacatttgaacaaagattccaaggaggtgagggcaccagctatgcagatatctggggaagagcactcgaagaagaaaaggcaggcaaacagcagggtgcgtagcccatgtgcatgaagtagagaatactgggagtcagaaggctaacaggagacaggtcagagagagggactggggtgggtcaactcacactcagcctcactggctattgttagaactttgagttattctgagacactgagtataggagagtctatgaatatttatagaaattctgaacgtttacaggatgaataaaagttgtatgctagtaaacctattggttgggtggggagaagcccagatttgtagcatttgctaatttccattgtgtaaatatttctactgatggtttgacaaacacttcacaaaatttctgggtacttaattatcagctccagtagagtgctgcatgtatgacaccccatttgccaattccacactagattctattgggaacaagctgtatgagagtcaactggtggcagaaataaggaagtcctcaataaaaatcagcatttacttttgacagatgtgagattctggaacttatttctctttacttgctctgcctggtgattaaattatgattttaaaagaaatagttttaatttcttattagaatgctgccaccaaataaataaaatacgtactttaactatatgcaatattgtctatatt

SEQ ID NO: 550242 - DNA, 3009 bp, Homo sapiens
atatattttggagggaacttggttttctttttatttttattttttgccatgtcaggcttgagcaggatagcaaatatataaattgagctctctaattataatctcaatatatgaattcttgctaattaaaatactttgcaccagcaaaaacaatttccacatatgtgtttaggtggtagttaagtaactccatataaaaataagtgcactttcccctcctttcttcagtgactagaaaacttccatacttttaaaataatcaaataataatttagagagcaacagctctcaactctttgctggtgcttatcacactgcctttcttcactccattcttagctctgctaattccttcttgtctgtaatgataataagggaatgtgggtgggtcagcacttctgtgtaggtcccctttccaaatttgtcttccaaaaagccaaccaaataaacaaccaaaaaatcgtgcaacaaaacacaaatagcattccaacagcttggcaagtgatgcattcacctgagattaagtggttttaggctgtcagtaacaaaattctgctttactgtcttattagaaaggcaacaaattcttcaaagaaaccaagaagtttacaaccttgacaaagtctctcattaccttcctcctcttatgtcttttctcttcacattatctgttgtgtatctactatagaaggctgcaaaacatacagcagaaatgatggcttgaaggcaattgatgtttgtaaataaatacacaacaggatccaagctgaagaggtgaacacatcagccgggtgggacaattctcagcatgggcaaacatagaaaaattctagcctatgttacattaaaaacaatgtcagtgcattttttcatgttaaagagttgttcaaagctaaagcatgttccttgctatgctgaccacaaacaagttttaagagtttcggaagtctggcaaaaatagaaacaaacaaacaaaaaaaaaaaaactgaagcaacattaaaccgcacaatgtaagcattgggcatgcacaaattttcaaaacaaaggaaggaaatcatccctctctacaacgtggttaggctgatttttatgaaataaaatgtaagaaatcagaaaagcaaaggttaggcacctacatatccaatatctggcaccgcgcagagtagaagagtgaaagaaataatgaagaacaaagtggttactttgcttcaggagttcatgatctatagttagaaaccaatataagcattttgagtatatttcaaagaaagagcaaaagcaggccgggtgtggtggcttgcacctgcagtaataacactttgggaggccaaggtgggaagattgcttgagctcatgagtttgataccagcctgagaaatatagtaaaacctcatctctataaaaaattaattaaaaaaaggcagagcaaaaacaaatatgaaagaaaacattagaaatcagagcttgggcaaagagttcaacgtgagcaaagcagctctgccctgggggacctctggagcatcccagcttcctgtagaggccccaccacatggccctttcccatcactgggaaccatcttctgtatcatgccaggattttcccccaaacttctcaacctaatttattcagccaaaacttatatatttcttgaatctttactaagagcaaggcactgttcaacataatgaaaatatggcaatgatttaaaacaaaaatgtttaccctcatgcaaattatattccagtgagaaaagacagatcattaataaaataactatggaaaatatataatatgycagaaggtaataagtggcacagagaaaaattaagtgtggaagggagctcaggaatgctgggagcgggtagatgtgaaggtagttagaatgctcaaggagggagtaataggcagaagaatggcctttctacatgtccatatccctatatggcaaaaaggacctgtggatgtgatgaagttatggatcatgagatgaggagattattctggattacccaggttggcccaatgtcatcacaagagtacttaaaagcaaaagagggaggcaggagagtctgaggcaagacgcatgacagctagggtcagaatgatgtggttgctgcctggaagggggccaggggccaagggatgcaggcatcctttcaaagctggagaaggtaagaaagtgttctctctcccctagagagagtgtgtgttctcttaggctactagaggtgtgctaatttattccagcaatcatagaaaacttatatagaaggtctcacagagaagataacatttgaacaaagattccaaggaggtgagggcaccagctatgcagatatctggggaagagcactcgaagaagaaaaggcaggcaaacagcagggtgcgtagcccatgtgcatgaagtagagaatactgggagtcagaaggctaacaggagacaggtcagagagagggactggggtgggtcaactcacactcagcctcactggctattgttagaactttgagttattctgagacactgagtataggagagtctatgaatatttatagaaattctgaacgtttacaggatgaataaaagttgtatgctagtaaacctattggttgggtggggagaagcccagatttgtagcatttgctaatttccattgtgtaaatatttctactgatggtttgacaaacacttcacaaaatttctgggtacttaattatcagctccagtagagtgctgcatgtatgacaccccatttgccaattccacactagattctattgggaacaagctgtatgagagtcaactggtggcagaaataaggaagtcctcaataaaaatcagcatttacttttgacagatgtgagattctggaacttatttctctttacttgctctgcctggtgattaaattatgattttaaaagaaatagttttaatttcttattagaatgctgccaccaaataaataaaatacgtactttaactatatgcaatattgtctatatt

SEQ ID NO: 550243 - DNA, 1401 bp, Homo sapiens
tcattccccctactttgggaattacaattcaacatgagatttttatggggacacagagtcaaaccataccaaatcagcatctggatgatgggatcattcataccccaaaactcagcaatatgagatatacccatgtaacaaactggcacatgtacccctgaatgtaaaatacaagttaaaattattttcaaaataaattaattaatkaataaataaatatgattaaatgaaattaaaattttgaattaaaaaatttgagagtgatttcagcttgacagttatgtaagttatgtaaattgaaacagtgagttctatagggtttggatcaattgcattatctgtactaagttgatgaccagttgtttggatgaaaagaaaagaggtgaaacatatagatctaacaggaaaaaaatggaccagtttttatgatagcaaaaagaagaatggaggaaataggactgaggttatagtgattgatagatattaatagacgactaagtcaaaagccattggctgcagaaaatattgattaattttgttttattgcagtcagacaaaaaaatcctataacctgcctctagagaaaacccttttagccctataattatctttattccaagcaccattccattcattaagtagtgtatagggtgattaataagtgaattattcatagaattaagacaaaatttttgagtattacaggatattaatagtatagccaatgaactaaaataaaatttgactagaggtatgatcaccatgaatgccatgttggtctcttgttagatttggcaacctaaagttgacaaatttattaataaataaacattccttgatgattaatttacatttagtagacctgctctttcttcttccttccctttcttattcattcattcattcattcctacagagcagtgactttcattctaagattcccagaatcctaaggaattcttgaatgtcatcatagggagccaggtgtgaggattcctaaaaattgtacttaatacttgaaaaatctcaaaaagttatatatttacaccagaaaaatctatacaggttttaagttatatgtatatagttgaatactttttatttctatccagtactaagtcattagagttaataatgttgattatttcatactgacctaatgggtagcctttatatatcattgattacttattagtaaaataagaacccccccaaaattacaaaataaatatattttgtgggtttttcttaaggcttttgaaacataaaatcagaggaggggattaaaagtaatccttgattattagaaaggcagcgaactactaacttagaaaattgtatgaaaacagcaagatatatacatggccctcaggccagctgcctgttttaataaagttttat

SEQ ID NO: 550244 - DNA, 1401 bp, Homo sapiens
tcattccccctactttgggaattacaattcaacatgagatttttatggggacacagagtcaaaccataccaaatcagcatctggatgatgggatcattcataccccaaaactcagcaatatgagatatacccatgtaacaaactggcacatgtacccctgaatgtaaaatacaagttaaaattattttcaaaataaattaattaattaataaataaatatgattaaatgaaattaaaattttgaattaaaaaatttgagagtgatttcagcttgacagttatgtaagttatgtaaattgaaacagtgagttctatagggtttggatcaattgcattatctgtactaagttgatgaccagttgtttggatgaaaagaaaagaggtgaaacatatagatctaacaggaaaaaaatggaccagtttttatgatagcaaaaagaagaatggaggaaataggactgaggttatagtgattgatagatattaatagacgactaagtcaaaagccattggctgcagaaaatattgattaattttgttttattgcagtcagacaaaaaaatcctataacctgcctctagagaaaacccttttagccctataattatctttattccaagcaccattccattcattaagtagtgtatagggtgattaataagtgaattattcatagaattaagacaaaatttttgagtattacaggatattaatagtatagccaatgaactaaaataaaatttgactagaggtatgatcaccatgaatgccatgttggtctcttgttagatttggcaacctaaagttgacaaatttattaataaataaacattccttgatgattaatttacatttagtagacctgctctttcttcttccttccctttcttattcattcattcattcattcctacagagcagtgactttcattctaagattcccagaatcctaaggaattcttgaatgtcatcatagggagccaggtgtgaggattcctaaaarttgtacttaatacttgaaaaatctcaaaaagttatatatttacaccagaaaaatctatacaggttttaagttatatgtatatagttgaatactttttatttctatccagtactaagtcattagagttaataatgttgattatttcatactgacctaatgggtagcctttatatatcattgattacttattagtaaaataagaacccccccaaaattacaaaataaatatattttgtgggtttttcttaaggcttttgaaacataaaatcagaggaggggattaaaagtaatccttgattattagaaaggcagcgaactactaacttagaaaattgtatgaaaacagcaagatatatacatggccctcaggccagctgcctgttttaataaagttttat

SEQ ID NO: 550245 - DNA, 1837 bp, Homo sapiens
tgggttaacttgaatgtggtgatggtgtcacaggtctataagtatgtcaaaatgtgccggattgtacccttcaaatatgcgaagtttatcatgtaccaattattcaattacacatcaataaacctttttgtcaactatcaatgttttaataaggccaaagaatgcttgtaaaataaaacagccctgggtagatgaagggtttggaataaatccaaaaaaagatttaaaaagaatttttaagttagagcttatcaaaaggacatcaaagctggaacaatttaggccacaaaatacagaatgatagtattaaatagaataaaataaacatcattaagccacaagtgatgtaaataaataaataaataaacaaataaaatggggagatgggacagcatttccttacagaataactacaagtaataaatgcagaaggaaagagggaaatagaaactcaacatcagtcaaacaccacagcaaaacttgccatagaaagatccatggatgggtgctaaaattggtgagcaaaagtttgaggaaaagcaatatattcacrtagtctcaaatatctccctcaagatgtttattacttacaaaaagacctaaacagtggagaaactcaacagatactaccttacccaaatgatcaaagggaacatcaccctcatattcgtataactcatagtcctatcacaaacccctcatttcataagaaaacattagataaagccaaaatactgtacaaaataactggaggcaaagagcatgcagactgtgttcaccatgatgtccctagcaattactgtaacatttaacacatagtagacatttaataaatatttttaaatgatggaattcattagaaaaatgagttccagttattgagaaaacttctaaagtttcttatgagaggttttgttttgtttcgttttgttttgagatggagtcttactctgtctcccaggctggagtgcagtggcacaatctcggctcactgcaacctctgtctcctgggtttaagccattctcctacctcagcctccccagtagctgggattacaggcacgtgccaccacaagctgctaatttttttatttttagtggagacggggtttcaccatgttggccaggctgggctcaaactcctgacctcaggcaatccacctgcctcagcctcccaaagtgctgggattacaggcatgagccactgtgcccagctgacagttttttaaaaagtaaaaattgacaatcactttggggtaattgaattatggcccaatttctaaggaaatgtatgaatttcataggtaatcaagactttgtggttttactgtagcattttttttttcagagtcaaaaattcggtgttttgtaaatacaaaaaggcaaatattgttgggataaaaagcctcccagaaagttgatttccatggaatagaaataatttttctattccaattgccttgtttgcttgtgcttagggaacacaaatcatgggtaattttacttgtgatattctttttttttttttttttgagacagagtctcactctgtctcccagactggagtgtagtggtgccatcttggctcgctgcaacctccacttcccgggttcaagcgattctcctgcctcagccacctgagtagctgggactacaggcatgcgccacccatgcccagctaatttttgtatttttagtagagatgatgtttcaccctgttggccagactggtctcaaactcctgacctcaagtgatcccccgcctcagcctcccaaagtgctgggactacaggcatgagccactgtgcctgaccttagttgtgatgttctttaattg

SEQ ID NO: 550246 - DNA, 1837 bp, Homo sapiens
tgggttaacttgaatgtggtgatggtgtcacaggtctataagtatgtcaaaatgtgccggattgtacccttcaaatatgcgaagtttatcatgtaccaattattcaattacacatcaataaacctttttgtcaactatcaatgttttaataaggccaaagaatgcttgtaaaataaaacagccctgggtagatgaagggtttggaataaatccaaaaaaagatttaaaaagaatttttaagttagagcttatcaaaaggacatcaaagctggaacaatttaggccacaaaatacagaatgatagtattaaatagaataaaataaacatcattaagccacaagtgatgtaaataaataaataaataaacaaataaaatggggagatgggacagcatttccttacagaataactacaagtaataaatgcagaaggaaagagggaaatagaaactcaacatcagtcaaacaccacagcaaaacttgccatagaaagatccatggatgggtgctaaaattggtgagcaaaagtttgaggaaaagcaatatattcacatagtctcaaatatctccctcaagatgtttattacttacaaaaagacctaaacagtggagaaactcaacagatactaccttacccaaatgatcaaagggaacatcaccctcatattcgtataactcatagtcctatcacaaacccctcatttcataagaaaacattagataaagccaaaatactgtacaaaatarctggaggcaaagagcatgcagactgtgttcaccatgatgtccctagcaattactgtaacatttaacacatagtagacatttaataaatatttttaaatgatggaattcattagaaaaatgagttccagttattgagaaaacttctaaagtttcttatgagaggttttgttttgtttcgttttgttttgagatggagtcttactctgtctcccaggctggagtgcagtggcacaatctcggctcactgcaacctctgtctcctgggtttaagccattctcctacctcagcctccccagtagctgggattacaggcacgtgccaccacaagctgctaatttttttatttttagtggagacggggtttcaccatgttggccaggctgggctcaaactcctgacctcaggcaatccacctgcctcagcctcccaaagtgctgggattacaggcatgagccactgtgcccagctgacagttttttaaaaagtaaaaattgacaatcactttggggtaattgaattatggcccaatttctaaggaaatgtatgaatttcataggtaatcaagactttgtggttttactgtagcattttttttttcagagtcaaaaattcggtgttttgtaaatacaaaaaggcaaatattgttgggataaaaagcctcccagaaagttgatttccatggaatagaaataatttttctattccaattgccttgtttgcttgtgcttagggaacacaaatcatgggtaattttacttgtgatattctttttttttttttttttgagacagagtctcactctgtctcccagactggagtgtagtggtgccatcttggctcgctgcaacctccacttcccgggttcaagcgattctcctgcctcagccacctgagtagctgggactacaggcatgcgccacccatgcccagctaatttttgtatttttagtagagatgatgtttcaccctgttggccagactggtctcaaactcctgacctcaagtgatcccccgcctcagcctcccaaagtgctgggactacaggcatgagccactgtgcctgaccttagttgtgatgttctttaattg

SEQ ID NO: 550247 - DNA, 1837 bp, Homo sapiens
tgggttaacttgaatgtggtgatggtgtcacaggtctataagtatgtcaaaatgtgccggattgtacccttcaaatatgcgaagtttatcatgtaccaattattcaattacacatcaataaacctttttgtcaactatcaatgttttaataaggccaaagaatgcttgtaaaataaaacagccctgggtagatgaagggtttggaataaatccaaaaaaagatttaaaaagaatttttaagttagagcttatcaaaaggacatcaaagctggaacaatttaggccacaaaatacagaatgatagtattaaatagaataaaataaacatcattaagccacaagtgatgtaaataaataaataaataaacaaataaaatggggagatgggacagcatttccttacagaataactacaagtaataaatgcagaaggaaagagggaaatagaaactcaacatcagtcaaacaccacagcaaaacttgccatagaaagatccatggatgggtgctaaaattggtgagcaaaagtttgaggaaaagcaatatattcacatagtctcaaatatctccctcaagatgtttattacttacaaaaagacctaaacagtggagaaactcaacagatactaccttacccaaatgatcaaagggaacatcaccctcatattcgtataactcatagtcctatcacaaacccctcatttcataagaaaacattagataaagccaaaatactgtacaaaataactggaggcaaagagcatgcagactgtgttcaccatgatgtccctagcaattactgtaacatttaacacatagtagacatttaataaatatttttaaatgatggaattcattagaaaaatgagttccagttattgagaaaacttctaaagtttcttatgagaggttttgttttgtttcgttttgttttgagatggagtcttactctgtctcccaggctggagtgcagtggcacaatctcggctcactgcaacctctgtctcctgggtttaagccattctcctacctcagcctccccagtagctgggattacaggcacgtgccaccacaagctgctaatttttttatttttagtggagacggggtttcaccatgttggccaggctgggctcaaactcctgacctcaggcaatccacctgcctcagcctcccaaagtgctgggattacaggcatgagccactgtgcccagctgacagttttttaaaaagtaaaaattgacaatcactttggggtaattgaattatggcccaatttctaaggaaatgtatgaatttcataggtaatcaagactttgtggttttactgtagcattttttttttcagagtcaaaaattcrgtgttttgtaaatacaaaaaggcaaatattgttgggataaaaagcctcccagaaagttgatttccatggaatagaaataatttttctattccaattgccttgtttgcttgtgcttagggaacacaaatcatgggtaattttacttgtgatattctttttttttttttttttgagacagagtctcactctgtctcccagactggagtgtagtggtgccatcttggctcgctgcaacctccacttcccgggttcaagcgattctcctgcctcagccacctgagtagctgggactacaggcatgcgccacccatgcccagctaatttttgtatttttagtagagatgatgtttcaccctgttggccagactggtctcaaactcctgacctcaagtgatcccccgcctcagcctcccaaagtgctgggactacaggcatgagccactgtgcctgaccttagttgtgatgttctttaattg

SEQ ID NO: 550248 - DNA, 1837 bp, Homo sapiens
tgggttaacttgaatgtggtgatggtgtcacaggtctataagtatgtcaaaatgtgccggattgtacccttcaaatatgcgaagtttatcatgtaccaattattcaattacacatcaataaacctttttgtcaactatcaatgttttaataaggccaaagaatgcttgtaaaataaaacagccctgggtagatgaagggtttggaataaatccaaaaaaagatttaaaaagaatttttaagttagagcttatcaaaaggacatcaaagctggaacaatttaggccacaaaatacagaatgatagtattaaatagaataaaataaacatcattaagccacaagtgatgtaaataaataaataaataaacaaataaaatggggagatgggacagcatttccttacagaataactacaagtaataaatgcagaaggaaagagggaaatagaaactcaacatcagtcaaacaccacagcaaaacttgccatagaaagatccatggatgggtgctaaaattggtgagcaaaagtttgaggaaaagcaatatattcacatagtctcaaatatctccctcaagatgtttattacttacaaaaagacctaaacagtggagaaactcaacagatactaccttacccaaatgatcaaagggaacatcaccctcatattcgtataactcatagtcctatcacaaacccctcatttcataagaaaacattagataaagccaaaatactgtacaaaataactggaggcaaagagcatgcagactgtgttcaccatgatgtccctagcaattactgtaacatttaacacatagtagacatttaataaatatttttaaatgatggaattcattagaaaaatgagttccagttattgagaaaacttctaaagtttcttatgagaggttttgttttgtttcgttttgttttgagatggagtcttactctgtctcccaggctggagtgcagtggcacaatctcggctcactgcaacctctgtctcctgggtttaagccattctcctacctcagcctccccagtagctgggattacaggcacgtgccaccacaagctgctaatttttttatttttagtggagacggggtttcaccatgttggccaggctgggctcaaactcctgacctcaggcaatccacctgcctcagcctcccaaagtgctgggattacaggcatgagccactgtgcccagctgacagttttttaaaaagtaaaaattgacaatcactttggggtaattgaattatggcccaatttctaaggaaatgtatgaatttcataggtaatcaagactttgtggttttactgtagcattttttttttcagagtcaaaaattcggtgttttgtaaatacaaaaaggcaaatattgttgggataaaaagcctcccagaaagttgatttccatggaatagaaataatttttctattccaattgccttgtttgcttgtgcttagggaacacaaatcatgggtaattttacttgtgatattctttttttttttttttttgagacagagtctcactctgtctcccagactggagtgtagtggtgccatcttggctcgctgcaacctccacttcccgggttcaagcgattctcctgcctcagccacctgagtagctgggactacaggcatgygccacccatgcccagctaatttttgtatttttagtagagatgatgtttcaccctgttggccagactggtctcaaactcctgacctcaagtgatcccccgcctcagcctcccaaagtgctgggactacaggcatgagccactgtgcctgaccttagttgtgatgttctttaattg

SEQ ID NO: 550249 - DNA, 620 bp, Homo sapiens
gaattgtatttaatttaattagaataattttaractacaatgtttttccttttttttttcgtattcttctctttctttttctttctttttagtctgaacgggtcacaaaccatttaatacagtgctgaatatttagaacgttagttatttcagtagcagtaggttactctttgcccatagaatagggcatatgtcctgaccaggctgggttttacacataaaaaatacagatttatcatgctaagtgcagtccaaagaaagcgtaaataatgataagaaatttcattatatactttcttgactgatctggacaggcttgattagaatacatttttttcgctctttggtgttttgaatgcttacacgttatggatttgttagcatttttgtgatacgtttgccctctataaaagtcaagttgtgtgtcattgctattctagcttagaatactgtcactataatattgaaatctgttcataagtaatgaatggtcaaaaaacttgccactcctcaaaatctaaactgaacctcatagaaataatctctctttttaagcaaaataaactgtaaacaatttattcttattatttaatctgggaacaatatcccagtaatagatg

SEQ ID NO: 550250 - DNA, 1367 bp, Homo sapiens
taaatggataggtagacataggtatgtgtatgtagatatttatgtgtgtgtgtgtgtatatatatatatatatgtatatttgtaattattctgagcttgattttagtactttaggacctgagttttccttcagttgcttcttagagcacagctctctctctggctgcactatccatatttattgctgtaggttgttgctacaaatggctgctgctcaatgtttaatataaattatcaaaggtatgaaggagaaaaatgacttagtcttgtgagtgtacatcttcaactatttaccttaatgactgccttggaattttctctattctcttgtctccatttattttgggctaagatttccctcaagcctatcttacttcatgttttttttccctataagctgatttaaagcactctaagctatttttgtttctttttatacctgatcttggctatctttcaggaattccttcccctttttcttttgttttcatgaatagtcgcaaatttattttatcatttttcaataccctttttgccattttgtgggatttaggtaagaggcaagtgtttacctgccattttgatttaatgtcctgtttaaacttttcatgtaggtgaactagttcagtcctatttgcccaggacttttctgggtatagcactgaaagtcttgtctcccagagaacctttcagtccctgtaaaatagaggagttggtcaccttattttctgagacagtgggaaatttagtttaactttctacatctaggtggttggtccaacagtatcttctcctacatactcatgaatggacaactcaaataactaatgtgataagaatggtgaaaatgttttgagttttgctgggagaggaggaataaaaatatataagaagagtatagatatccaagaaagataatattggtatgaggttcaaagaagctataatagaactattgccattaggccattcaggcagaaggggaacttcagtgtcacttctcatacaaatactgagaaaaaaatgagatgcattgctgtccccccatctcctccctgccaccacacctatcatatcctctatttcagtaattgattagttgaccctaggtccacaattttaccatgttatgtatcaaggcatatatttcttctacctgtgtcaaagcaagggtcttacaacatatttgcaggtatgaaacctatggcacttggaagaatctcatatgtgcacatactcatataygcattgtcagcctattaatgctatggaaaagttttacttgctctaggcaacaaaagtaactcacataattgtgaatcaagatagacaaaagcaagaaggttgccatcaatatgcaaattagg

SEQ ID NO: 550251 - DNA, 614 bp, Homo sapiens
atttggtgatttggtcaaagggcaatgcaaatagcattaccttaaattcaagatatctgagactgatgcctcctcttgaaagaagactaaacatgtttcaaatagtttattattctacaaacagttaaaacaaattgatggcctcttatctaaatgaagaaaaagataaagattttaattcaaggcactggttcttgttttaagcaaactacttccactattttacctgatgctctttctaaaagaaggggcagaacatatcatcactgaagaccatgtgcttttctagcagtatgcaaaagtcataaataattctaagttttcattttcayttcaaactatgagaattgtgaaagaacatcattaacagtggttttcactctggtttagatctatatctaaacagatgagttatatataaaattgtctaaatcatgaaactttgggagaatgaagtgcaaataaggcctatcatttatactggcttcacttagggagaaattataaataaaatcatccagaaaagccattaattcctttcaaagttttgtcccttctttatcatgcaatgacatttttaataaacaccatgtccttaaattatagtttaatga

SEQ ID NO: 550252 - DNA, 581 bp, Homo sapiens
aaatgacagtcattaccctcacaagacctataatctacccaataataatgggaggcaagcctttagagttttttaatttggagttttcagagatttcctgaagcttctggactgacgtttctattgtacttgagtcccatcatttgacattagaagatctccttccaagaaatatttcttaccaccaaaagacagttaactttkacttcagacagaacattctggtctgcacccagaacctttaatacctgaatcttttaaatcagtgatggtctcttcttctaaaaagtaaaaggtaaatcaaattcagtatgtctcaattaattggaagggagtttcaagctcataggaaatgaactacgaagccatgttgggatatgaactgaatggttgctattgagatggagcaaatgtacctggatatcattaggtggaaccagactggaaaatgggggtccttccttgacctcagtgaagatttggccctttcagcctcaagtagtatcccagctccagaactggacctgagttactggataatgctgtcattaggaaactgtgaccacctaggagttggactg

SEQ ID NO: 550253 - DNA, 581 bp, Homo sapiens
aaatgacagtcattaccctcacaagacctataatctacccaataataatgggaggcaagcctttagagttttttaatttggagttttcagagatttcctgaagcttctggactgacgtttctattgtacttgagtcccatcatttgacattagaagatctccttccaagaaatatttcttaccaccaaaagacagttaactttgacttcagacagaacattctkgtctgcacccagaacctttaatacctgaatcttttaaatcagtgatggtctcttcttctaaaaagtaaaaggtaaatcaaattcagtatgtctcaattaattggaagggagtttcaagctcataggaaatgaactacgaagccatgttgggatatgaactgaatggttgctattgagatggagcaaatgtacctggatatcattaggtggaaccagactggaaaatgggggtccttccttgacctcagtgaagatttggccctttcagcctcaagtagtatcccagctccagaactggacctgagttactggataatgctgtcattaggaaactgtgaccacctaggagttggactg

SEQ ID NO: 550254 - DNA, 2018 bp, Homo sapiens
gaaatgccttgccacatcttcacccatgaaagttccatattacccccaaagctcacatgttacctgctccatgaatttgatactaattatctgacttacctctttcctaagctgctctaacaaacttaccgtgggcactgttgctattgtatgcactcttgtatttgtcctgagattccagctagactgaaagacttcaagggtaaaagaaaagtatttgaatttgttcagtatctattacctgttacatagtagaacctgaatatgtgtgatttcattttaaatctgttacttatatatggttattataattaatatttgtgcataagaattaaaccataagcagctgaacagaaaaaaaagagaaaatgtcttaattaaggatgatggacaaaagagaaaatagacagtatgctggtggaaacaacgcaggtacagaggctagacacgtttgttcccttcaccaccattttgattaaagaggtgtctgagctaactgaccctgcccaagcatgcacattctcagtagtatctctttttatcaagagcctcgcctcaatccgtgcagcctattctcaacaacatagacagagtgacattgtctaaagttaagtcaaattatctcaaacctgtcttaaaaatctccactggtttcccttttggctcagaatgaaaacaaaattacttattatgaaccatgtatgagtcaagatactttataagcagtaacaagcagcccccagagtcttagtggtttcaaatacaacccaagtttacttctgccttctgctatgttttcattgcggcggttgtgagttctttcctttataggcatccagggataaagactgatagagcaggcaatatctcaagtaygtttgacaccatgctgaggcaagtatatactctggactctggcctacaagaattacatgtcatgttttgctcacaaatctttgtccagagcccttttacataactgcactgaaacatgggggcaggaaatagaaatatacctgaaatggtacttgaaaaggtacccatggggccttatgtgatcacatcagcctctgcccatgttacctctgagatctcatctcctattactctcgcccttacttgatttcaattctgccacaatagcttcattgctgctacatgaacaccccatgcatgttcttactgttgcctaaaatgtcttattttaggtatctccatggttaactccctccctgctctctgatctttactcaaaagagactgtttcaaggggaactccccttgttgttttatctaaaatgaatgtctctgtagatgtgtaaacaaattatcatgactgtatcccaataaaactttatggacactgaaaaatagtgagtgcctccccacctgcatgtttttttttctccttgttcacataatatgttgtcagggtctcccggaaaattaaaatttaatgaagagcgggaattttcatttgctttgtgctgctatattttcagcatatagaacagtgcctcaccatgataagtgtttaataaatatttgtttgcatacatcttaagtaaaaattattaacaagcctcttaacttattgcaattatgaccacaatagcatacttgtaattacagtttataattatttggctaccatatgaatgtctattacatgcaagcattttactaggtactttctcatgggctgactcattttgtttcatgatagccctgtaaagtagatacagtcatcccattttacaaatgaataagctctaagaattagtttgcttaagaacccacaggaataaaactaagttacctgaacatggtaaagttttcatttaatgtttggttttagctaaataattctccctatagacctttaagtgtaagaacaatattatttgttctaatgataaaaggaggtaggagaaatttggttacctgcaatgattttcaagtcatgaaagtataccaaataaacatttcacattcacatttctgcaacttttccaagg

SEQ ID NO: 550255 - DNA, 644 bp, Homo sapiens
taaagttaagcagaaatctgcaaggtttcttaaggccatatctcaaaggtgtcatgctttcccttctactctactccattgacaagttacatggccaagcccaataatgtgccatggaaagggtgcatatgatcatgaggctactaatttgatctaccacagaagaattgcagtgtctaacagagatctagtttagcagattaaattccaaaaactgacaagatggctcggtacgggcatttagataaaagctcagccgtgtggacataagctgtgttgtagctgtttacattgcctaaatctcaggaatatttagattaagcttattgctgactctattctagatggtctggttcagggttcagatgcaaaacattttattaaaggagcaggtcaacagttaggtgaagatacggctgtttggtgtgcacccctgatgccacaaccgcctctgtaaaagacagatgttcacctagcaattttcaactcatttttattccrctagattttatattgaatcttcttcatataaataatgtatttttcaacaaacaaactgataaagtaatctaccatagttaaagtgagtgttggacatctatttttattgtttgtgcagtaaaaatagatttgtgtccataccg

SEQ ID NO: 550256 - DNA, 797 bp, Homo sapiens
tgttggttacttcccatttaaaattccttcccttcttgctgaagtaaaaattctgtgatggactgtgttatggaatatcaatggtaaaataaatagctgtctattgaaaagactcagatcccccattttttgtcaacagccatatctttagctttaaggcataaaatcaattggatagacttgttccctaacaccttcatggcttacaattcagatgatgttagtggtttgaagtatacatgctggaagaaggatttttgctcattaataataatattcattgtcatcaaacaacaaatcttataagccgattaatactctggaaaataggacatataatattcatgtttcttccttatcccaggatatcccagagcaactctgctaaagtatccttaaagaacaatttaatattaataaaataagcaattcagaagtctgatttaaatgctagctctgttactacagtctctaaaaaaaattttagcctttctatctcaattwtttatctacaaaagaaggacttgtgatatagtacttactttttttaaaataaagttttggacctgaagtgaatttgcaccaaagcagcagctgcattgccacagttctgtcttcaccttcaccatgttcctcttggtcaaaaacgcaccaagtcgtctccaagtttgaagcattcagcaaacaatggcaaggcagagccaccggaaacgtacacctgattttcatgataaatatggtagtgctgtattagctagtggaaccactttctgtattgctatatggacataggtagc

SEQ ID NO: 550257 - DNA, 953 bp, Homo sapiens
tgtaattatagttaaaaacagatgtctgcaggattgtggtggatgccacagaaacacatttacaaatgacccctaccagtctgtgcctatgtggattattaactggggtgcactcccagaccattgtgctttcttgagggaaaggcaatgaatagcatccctactgtattcattcacagacatcagtgtaacttctccatccatgattttttaaaaatctttttacaagaattgagagcagaacttcttaattgaactgcctggtggaatacttatcccataataatatattttatggaatatcatagcacagtgtarcactctaaaggggtccaaagaatcagatttgaaaacaagtcttccttccttttttctttccttcttctttgaacattcagcccaaaatcctgagtgagaaagaattagaggaagtgtgggagggctggaatcagaaccttgagaggaaagtggtaaagtgagacaggaacagcctggctggagggtgccacccaggggaggaaagtgactgagtggatggaagtggcttaggagagaggagagtccacaggaggcagacagtctagatcagtgacccactgaggaacggaaacaattacaattaggggaactgagcaaatagcaagcataccgaagataatgaaagacaagttttgcactacaggagaagaaaattacaaatatggaaaaggaaaaacaactagaatgaagcctgcagtgttgaattggaattggggatgtgaactcacggttttctttctgtttgtttgtttttgagacagtctcactctgtcaccaggctggagtgcagtggcgcaatgtcagctcactgcaacctctgcctcccaggttgaagcgattatcctgactcagcctcccaagtagctgggactacaggcacgtgccaccacgcccagctaatttttatcttttta

SEQ ID NO: 550258 - DNA, 552 bp, Homo sapiens
aatgtaattttgtaggaaaagtgatgcttgttttttcagatattccaagatgttgtatgtatgtgttttatttcttatgtttcttgatctattcaaagaatttgrtggtgttctctccttcttcatattaaatgcctgacatcttccttaagtattgttctaaaactagtcaagtgcagtagtgagaaggagctgggggtgggggggaatataacaaagagtttaatctataactgaccgtgaacaattgagattgagataacttgctacctctggaccagtctctcctcaactttttgatactgctcctctcaaacatttctcccagcttgctgactgctcctcctggtcttctttgctctgtatttctggctttccttaatcttgttcctccttagggaacaactgtaaattatcttatctactcattctatggaatccccttcagtgatataaaatgatgattcaaaaaatacatatcacgagttcaaagctctctctgagataaaatccacatccagagcaacagagcgaactttcacttggctgcca

SEQ ID NO: 550259 - DNA, 1041 bp, Homo sapiens
ggtttctaataatattttaggccaggcctattaccatgttttccaacttaagagtatcttggcttatcttttccctgtggtcctttttttctttttttgacggagtctcgctccgtcacccaggctggagtcagtggcgcgatctcggctcactgcaagctccacctcccgggttcacgccattctcctgcctcagccttccacgtaactgggcctacaggcacccaccaccacgtccggctaattttttgtattttttatagagacggggtttcaccgtgttagctaggatggtctcgatctcctaacctcgtgatccgcccaccttggcctcccaaagtgctgggattacaggcgtgagccaccgcgcccggcctgtggtccttttttttcaattgatttctatttccattgtttccatggaaatcaatgttaagatttctataatcttatagaagttgtttatttcaagttgatgtatacattcctataacttctatgcccatttcaataattgggagaaatttcccagcttcaagcatgatgtatctaagaaatgtatatgttgtcatagaaaataaagtcagagaagccagtaatcaaatatctacaaacatttcctatacttactttaagaggcatctttgcrtgttcatttaataatggaacatcaaatactaatcttctgagtaagtgctgcatcatagaaggtctcagttgtctgttggaacaaagctaatgttcataatgccaagaaatgtttctaaactaagtagatcattcattagaataaattatatcagccaaggacctgaatctatacctcacttcagatggtattcattagatgttctttgtccaaagattaaccacttagttactttattttatataaggttagatttcccaacttatctctatcccctagatctgaagaccaccccttctttgatacagaagatgtttctgttctcctcctttctttcctaaccactcacaaatgcagactccactgtttcctaagactttcctccattaact

SEQ ID NO: 550260 - DNA, 609 bp, Homo sapiens
ttggtcgaactttatttactttttcttatggatacccagttgtcccagcaccatttgttgaaaagactattcttttcccattgtrttctttcgttaagtttgtataaaatcaattgactgtaaaagtgcaagcttatttttagattgtcaattcttagcttctttatgtctattcttatgtcaaagcccaatcgaattgaatgagaagtttttttcaatcatgttgcatattaccagttgtcttatgtcataataaaaattaaatttagtggaatatctgtaacttcaccttttgtgtcacaaaggagtctctggccagcttataccttacttcgtctaagacatgatcagacgccaggcttacaagacacatttaatttctttttttctccattcaagcctttagtctcttttccattgcctcccgctatagttatattttcagtaagttttggtcgcaggatctgctgacatagtctaatatttagtgcattatgttttactaactcattataattcatagaaccttccatagatgtttaccatcgaggaaggagaagtttaagtctgaaccaccagctttcctcagtggaaatcaagtgaagtcat

SEQ ID NO: 550261 - DNA, 2319 bp, Homo sapiens
tgttctgtcctgtcctctgaatccgcttccaagtcgcaagacgctgtgagctccaagtccacgcagagtccgccaaacgctccggccgctgatccgctccgcgaagatctgagtacaggccagccagggtgggtttaaatagcctcgggcgcagcctagcagcggaaagggyggagcttcactcctcctttccatcagtcacccccaactttcccaggctacacctcgtaggaaactgttctcctgctttgatttcatgcgccacctttgggacaatctaagaacttacaagttttcttggccagaaatattaggaattgtatgcactgaaacactgaaaacccactagtggttctgtggttcccacgttgtggttttgacaccagcagcatccttgccacagtcaaacgccggagatccgcagatctgtgttgtaacaagacctccccctgaccctgatgcatggcagttgaagaagtctttccgtgtaagcgaaaagactttgaagaaaaggtggagatatgcgttgtatcaacatccttttgctctggaaccacgtagagacttgggagccagttgggtggagcattcgttggatgagggtgctcgggttaggaatatcaaggtgtggctccagataatccaatcatctaattaagattccagttatgctcatctgttttaaaattccgtttgggtaaattcttttagtcagactgagaatggcaaagcctcaaccccaatttccagggagggtggagagccccaggtggttttgatcaccaatagcctatggtttaacccatcatgcctatagaatgaggtctccatcataacccaaaaggactgggttcagagagcttctggataacacttcctggaaggtagtgcgcccctccccacatgccgggccccacatttatttctgaactttgtgcaatgtccgctaaaatacaatggcaaatgtaagtgtttccctgcgtgctgtgagctcttccagcaaatgaatgcaactaaatctgggagtggtggcaacctgatttatagccagtggctgagaagcacaggtaaagcaacgtagggcttcccattgttattagtgtgggaggcctgtctggcgggactcggccctttggaatctaatgctatgtcccggtagatagcgtcaccattgaattagaagacacacatatgttgagaataatcattctggtcatttgctgcatgtcttatcgacaatatgtaatcacatcctttatcctgaccttatggcacctgggttgagaaccatgatttgaaccagacgttggtctgtcactttctcagtttgaaactttattttgcctttagcgttttgctattgctttttcgttgtcttttgtttcgtttcgttcctaagttctggggtatatgtgcaggatgtgcagatttgttactaaggtaaacgtgtgccatggtggtttgctgcacctgtcaacccatcacctaggtattaggcccagcatgcagtagctgtttttcttaacgctctgtctcccggaaggccccagtgtgtgttgttccccttcctgtgtccatgggatctcatttttcagctcccattataagtgagttgtggcgtttggttttcttttccctggataagtttgctgagggtaatgaccacacatcaccactgtttttgttttttagtataaagagtagtattttattgaataagatttgctcacagaaaaataagcttacatctacaatgaatgccagaccctacagcagaaagccattttctcacttttccacacacaatggttcctactaagtgaaaaaaaagccataaaatttcattcacaaatgtactactctgtctcaaaacatcgcacataatcatgcactgtactaaagccattagatcagttcttcagtcaggttaaagaagtatccctctaataactgacttttataatgctatcaatatccactcccaatcagtctgccattgttaatggtgtacagcattactgaatacaatggaattgatgacgcccatatccacggacaaaccgtgacttatgatggtttgatttacgatttttcaacgttatgatgggtttactggaatattagatgcgtttctgagttacactgggtttatgagtatgcgaccctatactccagaaacagctgtataaggaaaaacaggtttacctaatgaaaatatgcttagtgacttgggataaaccaatagatgttcacaactgatggagagccgtgaaagagagataacggtaaatagttacaataacacaattttcctgcacc

SEQ ID NO: 550262 - DNA, 2319 bp, Homo sapiens
tgttctgtcctgtcctctgaatccgcttccaagtcgcaagacgctgtgagctccaagtccacgcagagtccgccaaacgctccggccgctgatccgctccgcgaagatctgagtacaggccagccagggtgggtttaaatagcctcgggcgcagcctagcagcggaaagggcggagcttcactcctcctttccatcagtcacccccaactttcccaggctacacctcgtaggaaactgttctcctgctttgatttcatgcgccacctttgggacaatctaagaacttacaagttttcttrgccagaaatattaggaattgtatgcactgaaacactgaaaacccactagtggttctgtggttcccacgttgtggttttgacaccagcagcatccttgccacagtcaaacgccggagatccgcagatctgtgttgtaacaagacctccccctgaccctgatgcatggcagttgaagaagtctttccgtgtaagcgaaaagactttgaagaaaaggtggagatatgcgttgtatcaacatccttttgctctggaaccacgtagagacttgggagccagttgggtggagcattcgttggatgagggtgctcgggttaggaatatcaaggtgtggctccagataatccaatcatctaattaagattccagttatgctcatctgttttaaaattccgtttgggtaaattcttttagtcagactgagaatggcaaagcctcaaccccaatttccagggagggtggagagccccaggtggttttgatcaccaatagcctatggtttaacccatcatgcctatagaatgaggtctccatcataacccaaaaggactgggttcagagagcttctggataacacttcctggaaggtagtgcgcccctccccacatgccgggccccacatttatttctgaactttgtgcaatgtccgctaaaatacaatggcaaatgtaagtgtttccctgcgtgctgtgagctcttccagcaaatgaatgcaactaaatctgggagtggtggcaacctgatttatagccagtggctgagaagcacaggtaaagcaacgtagggcttcccattgttattagtgtgggaggcctgtctggcgggactcggccctttggaatctaatgctatgtcccggtagatagcgtcaccattgaattagaagacacacatatgttgagaataatcattctggtcatttgctgcatgtcttatcgacaatatgtaatcacatcctttatcctgaccttatggcacctgggttgagaaccatgatttgaaccagacgttggtctgtcactttctcagtttgaaactttattttgcctttagcgttttgctattgctttttcgttgtcttttgtttcgtttcgttcctaagttctggggtatatgtgcaggatgtgcagatttgttactaaggtaaacgtgtgccatggtggtttgctgcacctgtcaacccatcacctaggtattaggcccagcatgcagtagctgtttttcttaacgctctgtctcccggaaggccccagtgtgtgttgttccccttcctgtgtccatgggatctcatttttcagctcccattataagtgagttgtggcgtttggttttcttttccctggataagtttgctgagggtaatgaccacacatcaccactgtttttgttttttagtataaagagtagtattttattgaataagatttgctcacagaaaaataagcttacatctacaatgaatgccagaccctacagcagaaagccattttctcacttttccacacacaatggttcctactaagtgaaaaaaaagccataaaatttcattcacaaatgtactactctgtctcaaaacatcgcacataatcatgcactgtactaaagccattagatcagttcttcagtcaggttaaagaagtatccctctaataactgacttttataatgctatcaatatccactcccaatcagtctgccattgttaatggtgtacagcattactgaatacaatggaattgatgacgcccatatccacggacaaaccgtgacttatgatggtttgatttacgatttttcaacgttatgatgggtttactggaatattagatgcgtttctgagttacactgggtttatgagtatgcgaccctatactccagaaacagctgtataaggaaaaacaggtttacctaatgaaaatatgcttagtgacttgggataaaccaatagatgttcacaactgatggagagccgtgaaagagagataacggtaaatagttacaataacacaattttcctgcacc

SEQ ID NO: 550263 - DNA, 2319 bp, Homo sapiens
tgttctgtcctgtcctctgaatccgcttccaagtcgcaagacgctgtgagctccaagtccacgcagagtccgccaaacgctccggccgctgatccgctccgcgaagatctgagtacaggccagccagggtgggtttaaatagcctcgggcgcagcctagcagcggaaagggcggagcttcactcctcctttccatcagtcacccccaactttcccaggctacacctcgtaggaaactgttctcctgctttgatttcatgcgccacctttgggacaatctaagaacttacaagttttcttggccagawatattaggaattgtatgcactgaaacactgaaaacccactagtggttctgtggttcccacgttgtggttttgacaccagcagcatccttgccacagtcaaacgccggagatccgcagatctgtgttgtaacaagacctccccctgaccctgatgcatggcagttgaagaagtctttccgtgtaagcgaaaagactttgaagaaaaggtggagatatgcgttgtatcaacatccttttgctctggaaccacgtagagacttgggagccagttgggtggagcattcgttggatgagggtgctcgggttaggaatatcaaggtgtggctccagataatccaatcatctaattaagattccagttatgctcatctgttttaaaattccgtttgggtaaattcttttagtcagactgagaatggcaaagcctcaaccccaatttccagggagggtggagagccccaggtggttttgatcaccaatagcctatggtttaacccatcatgcctatagaatgaggtctccatcataacccaaaaggactgggttcagagagcttctggataacacttcctggaaggtagtgcgcccctccccacatgccgggccccacatttatttctgaactttgtgcaatgtccgctaaaatacaatggcaaatgtaagtgtttccctgcgtgctgtgagctcttccagcaaatgaatgcaactaaatctgggagtggtggcaacctgatttatagccagtggctgagaagcacaggtaaagcaacgtagggcttcccattgttattagtgtgggaggcctgtctggcgggactcggccctttggaatctaatgctatgtcccggtagatagcgtcaccattgaattagaagacacacatatgttgagaataatcattctggtcatttgctgcatgtcttatcgacaatatgtaatcacatcctttatcctgaccttatggcacctgggttgagaaccatgatttgaaccagacgttggtctgtcactttctcagtttgaaactttattttgcctttagcgttttgctattgctttttcgttgtcttttgtttcgtttcgttcctaagttctggggtatatgtgcaggatgtgcagatttgttactaaggtaaacgtgtgccatggtggtttgctgcacctgtcaacccatcacctaggtattaggcccagcatgcagtagctgtttttcttaacgctctgtctcccggaaggccccagtgtgtgttgttccccttcctgtgtccatgggatctcatttttcagctcccattataagtgagttgtggcgtttggttttcttttccctggataagtttgctgagggtaatgaccacacatcaccactgtttttgttttttagtataaagagtagtattttattgaataagatttgctcacagaaaaataagcttacatctacaatgaatgccagaccctacagcagaaagccattttctcacttttccacacacaatggttcctactaagtgaaaaaaaagccataaaatttcattcacaaatgtactactctgtctcaaaacatcgcacataatcatgcactgtactaaagccattagatcagttcttcagtcaggttaaagaagtatccctctaataactgacttttataatgctatcaatatccactcccaatcagtctgccattgttaatggtgtacagcattactgaatacaatggaattgatgacgcccatatccacggacaaaccgtgacttatgatggtttgatttacgatttttcaacgttatgatgggtttactggaatattagatgcgtttctgagttacactgggtttatgagtatgcgaccctatactccagaaacagctgtataaggaaaaacaggtttacctaatgaaaatatgcttagtgacttgggataaaccaatagatgttcacaactgatggagagccgtgaaagagagataacggtaaatagttacaataacacaattttcctgcacc

SEQ ID NO: 550264 - DNA, 900 bp, Homo sapiens
tgagccactgctcccggctccagttagataatttgcactcatttttatgtatgacacaggaaactattwctgttaaaggaaggattattcttcctataaattaagtacccattttcgaatatcatatgacattacattcaacaaacatttaaaataataaataaatgcaaggttttttcttttgtagggttagggttagggctagggcattcattcatctttaacttatttttttcctgaaatttatgtcataaaaaatgtaacaaccatatggtatgtttagttttggaaaccaaatcttttatttgtgttgaaaaactatcaaaaagtaaaataaaataaatacaactatcttgatagaaagcaaacttttccagactgaaagacccagatttggaaatatggtaggaaaacatacagttagatcacgtgacttatcaaaactcactcaggtggttgcaaagatcctatgatagaaaactatctaacacagagccacatcctcacagttacatgtatttcattttattctgaactttttatatttcttacattcaggaagacttagatgtctacagcttgtggtcatataagagaaacttttattttagcttggtatttctcagtccccagtaactgactggtcaagattgaaaaattaatatagaacttgttgaaatcaatgttattgatttttaataattctgaatcaagacttactataaaagcaactattaaaacataacttaaagaggtaaaataaatattttatgaaagaataacatcataattaatattttttaaatttatatcaagaaataagtgatagatgtaactggacatctgcatgaagaaattttcttatttcttataaatacatgaagattttcttatttcagt

SEQ ID NO: 550265 - DNA, 900 bp, Homo sapiens
tgagccactgctcccggctccagttagataatttgcactcatttttatgtatgacacaggaaactattactgttaaaggaagsattattcttcctataaattaagtacccattttcgaatatcatatgacattacattcaacaaacatttaaaataataaataaatgcaaggttttttcttttgtagggttagggttagggctagggcattcattcatctttaacttatttttttcctgaaatttatgtcataaaaaatgtaacaaccatatggtatgtttagttttggaaaccaaatcttttatttgtgttgaaaaactatcaaaaagtaaaataaaataaatacaactatcttgatagaaagcaaacttttccagactgaaagacccagatttggaaatatggtaggaaaacatacagttagatcacgtgacttatcaaaactcactcaggtggttgcaaagatcctatgatagaaaactatctaacacagagccacatcctcacagttacatgtatttcattttattctgaactttttatatttcttacattcaggaagacttagatgtctacagcttgtggtcatataagagaaacttttattttagcttggtatttctcagtccccagtaactgactggtcaagattgaaaaattaatatagaacttgttgaaatcaatgttattgatttttaataattctgaatcaagacttactataaaagcaactattaaaacataacttaaagaggtaaaataaatattttatgaaagaataacatcataattaatattttttaaatttatatcaagaaataagtgatagatgtaactggacatctgcatgaagaaattttcttatttcttataaatacatgaagattttcttatttcagt

SEQ ID NO: 550266 - DNA, 900 bp, Homo sapiens
tgagccactgctcccggctccagttagataatttgcactcatttttatgtatgacacaggaaactattactgttaaaggaaggattattcttcctataaattaagtacccattttcgaatatcatatgacattacattcaacaaacatttaaaataataaataaatgcaaggttttttcttttgtagggttagggttagggctagggcattcattcatctttaacttatttttttcctgaaatttatgtcataaaaaatgtaacaaccatatggtatgtttagttttggaaaccaaatcttttatttgtgttgaaaaactatcaaaaagtaaaataaaataaatacaactatcttgatagaaagcaaacttttccagactgaaagacccagatttggaaatatggtaggaaaacatacagttagatcacgtgacttatcaaaactcactcaggtggttgcaaagatcctatgatagaaaactatctaacacagagccacatcctcacagttacatgtatttcattttattctgaactttttatatttcttacattcaggaagacttagatgtctacagcttgtggtcatataagagaaacttttattttagcttggtatttctcagtccccagtaactgactggtcaagattgaaaaattaatatagaacttgttgaaatcaatgttattgatttttaataattctgaatcaagacttactataaaagcaactattaaaacataacttaargaggtaaaataaatattttatgaaagaataacatcataattaatattttttaaatttatatcaagaaataagtgatagatgtaactggacatctgcatgaagaaattttcttatttcttataaatacatgaagattttcttatttcagt

SEQ ID NO: 550267 - DNA, 1521 bp, Homo sapiens
acaattttgtttgaggacagaaaagggagcgtttccttcttactttctagttttagatgtctttccctgtacattgtggagtcatggtgataaatataccatggttggtgataaatataccaaacaacagagaaacctaatatatatacagccccaagcttattaaatatcacctaagattgacaagaaaaaaactagtttcttaraaaaaaatggtatttatttacttattacttttttttttcttttaaagagacaagatcttgttctattgtctgggctggagtatagtgaaatgatcatagctcactgtagcctccaactccttggctcaaatgatcctctcacctcaccctcctgagttgctgggactacagctgtgtgccatcatatccagctatattttttattttttgtaaaggtggagtctcactatgttgcccaggctgggcttgaactcctgggctcaagcgatcctcccacctcagccttccaagtagctgggactacaagtgtttgccaccatgcccagctaaattttaaaatttgtttggaggtggggtcttgttatgttgccccagctggctcattatttaattataagacagttaaaggtcactttgtgatgcattatttgaaacaaaaataatcataacgatttctaatgattttccataaattttaatttaaactctgactcaaattcattcagatcaagtttcaataaaataaatagcatcaagagcaaatggtgtattatcaattgatagtgtccagtgctaataaacatgagtttgagtctgacatgagccatttggtttcaaggcctatgctttaggttacattccaaggttttagcctatgtttccacccctctgaaatatatccttagccactaagggaacgtagcaagaggttatgggtaaatgaatatgtgcaaatgctcctgtgagaaaacaactcagacttacaggcagttgagatgtagtggtgggtaaattatgtcattgctatgtcatggatgaatatgaagaggtagcatcatcctttctgtcattaaaaaaatgacattttaactttcttttgaaatcagctagcaagtaatgcatttatgttgtgtgtatcaaagtatacaataaatgttgctactattgtttattagatgtttaaaatcatttttctctttcatctatattacttacaaattgttgagactgaaaactgaacttctaactaattctattcattatctcatcttgaacattactcatccatatgcaggatttgtgtaaatgaatgttttttctttgtttatgggacctaacttaaataatggttccattgtgacactcttgtgcagtgaaatggaagtttctgtgggtctaagatttgctgagggcctcccataggccaggcactgatgtagaaatatttaggtcaggcacggtggctgacgcctgtaatcccagcactttgggaggccgaggcaggtggatcactgaggtcaggaattagagacca

SEQ ID NO: 550268 - DNA, 1521 bp, Homo sapiens
acaattttgtttgaggacagaaaagggagcgtttccttcttactttctagttttagatgtctttccctgtacattgtggagtcatggtgataaatataccatggttggtgataaatataccaaacaacagagaaacctaatatatatacagccccaagcttattaaatatcacctaagattgacaagaaaaaaactagtttcttagaaaaaaatggtatttatttacttattacttttttttttcttttaaagagacaagatcttgttctattgtctgggctggagtatagtgaaatgatcatagctcactgtagcctccaactccttggctcaaatgatcctctcacctcaccctcctgagttgctgggactacagctgtgtgccatcatatccagctatattttttattttttgtaaaggtggagtctcactatgttgcccaggctgggcttgaactcctgggctcaagcgatcctcccacctcagccttccaagtagctgggactacaagtgtttgccaccatgcccagctaaattttaaaatttgtttggaggtggggtcttgttatgttgccccagctggctcattatttaattataagacagttaaaggtcactttgtgatgcattatttgaaacaaaaataatcataacgatttctaatgattttccataaattttaatttaaactctgactcaaattcattcagatcaagtttcaataaaataaatagcatcaagagcaaatggtgtattatcaattgatagtgtccagtgctaataaacatgagtttgagtctgacatgagccatttggtttcaaggcctatgctttaggttacattccaaggttttagcctatgtttccacccctctgaaatatatccttagccactaagggaacgtagcaagaggttatgggtaaatgaatatgtgcaaatgctcctgtgagaaaacaactcagacttacaggcagttgagatgtagtggtgggtaaattatgtcattgctatgtcatggatgaatatgaagaggtagcatcatcctttctgtcattaaaaaaatgacattttaactttcttttgaaatcagctagcaagtaatgcatttatgttgtgtgtatcaaagtatacaataaatgttgctactattgtttattagatgtttaaaatcatttttctctytcatctatattacttacaaattgttgagactgaaaactgaacttctaactaattctattcattatctcatcttgaacattactcatccatatgcaggatttgtgtaaatgaatgttttttctttgtttatgggacctaacttaaataatggttccattgtgacactcttgtgcagtgaaatggaagtttctgtgggtctaagatttgctgagggcctcccataggccaggcactgatgtagaaatatttaggtcaggcacggtggctgacgcctgtaatcccagcactttgggaggccgaggcaggtggatcactgaggtcaggaattagagacca

SEQ ID NO: 550269 - DNA, 1521 bp, Homo sapiens
acaattttgtttgaggacagaaaagggagcgtttccttcttactttctagttttagatgtctttccctgtacattgtggagtcatggtgataaatataccatggttggtgataaatataccaaacaacagagaaacctaatatatatacagccccaagcttattaaatatcacctaagattgacaagaaaaaaactagtttcttagaaaaaaatggtatttatttacttattacttttttttttcttttaaagagacaagatcttgttctattgtctgggctggagtatagtgaaatgatcatagctcactgtagcctccaactccttggctcaaatgatcctctcacctcaccctcctgagttgctgggactacagctgtgtgccatcatatccagctatattttttattttttgtaaaggtggagtctcactatgttgcccaggctgggcttgaactcctgggctcaagcgatcctcccacctcagccttccaagtagctgggactacaagtgtttgccaccatgcccagctaaattttaaaatttgtttggaggtggggtcttgttatgttgccccagctggctcattatttaattataagacagttaaaggtcactttgtgatgcattatttgaaacaaaaataatcataacgatttctaatgattttccataaattttaatttaaactctgactcaaattcattcagatcaagtttcaataaaataaatagcatcaagagcaaatggtgtattatcaattgatagtgtccagtgctaataaacatgagtttgagtctgacatgagccatttggtttcaaggcctatgctttaggttacattccaaggttttagcctatgtttccacccctctgaaatatatccttagccactaagggaacgtagcaagaggttatgggtaaatgaatatgtgcaaatgctcctgtgagaaaacaactcagacttacaggcagttgagatgtagtggtgggtaaattatgtcattgctatgtcatggatgaatatgaagaggtagcatcatcctttctgtcattaaaaaaatgacattttaactttcttttgaaatcagctagcaagtaatgcatttatgttgtgtgtatcaaagtatacaataaatgttgctactattgtttattagatgtttaaaatcatttttctctttcatctatattacttacaaattgttgagactgaaaactgaacttctaactaattctattcattatctcatcttgaacattactcatccatakgcaggatttgtgtaaatgaatgttttttctttgtttatgggacctaacttaaataatggttccattgtgacactcttgtgcagtgaaatggaagtttctgtgggtctaagatttgctgagggcctcccataggccaggcactgatgtagaaatatttaggtcaggcacggtggctgacgcctgtaatcccagcactttgggaggccgaggcaggtggatcactgaggtcaggaattagagacca

SEQ ID NO: 550270 - DNA, 572 bp, Homo sapiens
ataggccaggctggtctcaaactcctgacctcaggtgatctgcccacctcggcctcccaaaatgctgggattacaggtgtgagccacctcgtctggccagtttatgataattctaatggggttgttgcatttggggaaaactttgaaaaacgttacccattttttaagttggatcccatcatgcctggaaatgtgttgtaaccagccatgcactggtaaatgtttcctgattctcctgaaaaaaattgtatattatatataaacataaataartatcagtttttgtgacgatacaataatttacaggtaataataaattatataatattctttattctataaagaataaatcccgtatagccaactgattcacgcagaatattattgctaattttttgctgaactcttgatctgtagtcagcctatggttgctattaaaccaggtcttgccaaaatcggactacaaatcactgcttgatcgctatctaattcagcaaggaagatgcttacatcattgactactaaggacaattccagcatgaatgttgattagtcccttcatgtgcattggt

SEQ ID NO: 550271 - DNA, 572 bp, Homo sapiens
ataggccaggctggtctcaaactcctgacctcaggtgatctgcccacctcggcctcccaaaatgctgggattacaggtgtgagccacctcgtctggccagtttatgataattctaatggggttgttgcatttggggaaaactttgaaaaacgttacccattttttaagttggatcccatcatgcctggaaatgtgttgtaaccagccatgcactggtaaatgtttcctgattctcctgaaaaaaattgtatattatatataaacataaataagtatcagtttttgtgacgatacaataatttacargtaataataaattatataatattctttattctataaagaataaatcccgtatagccaactgattcacgcagaatattattgctaattttttgctgaactcttgatctgtagtcagcctatggttgctattaaaccaggtcttgccaaaatcggactacaaatcactgcttgatcgctatctaattcagcaaggaagatgcttacatcattgactactaaggacaattccagcatgaatgttgattagtcccttcatgtgcattggt

SEQ ID NO: 550272 - DNA, 572 bp, Homo sapiens
ataggccaggctggtctcaaactcctgacctcaggtgatctgcccacctcggcctcccaaaatgctgggattacaggtgtgagccacctcgtctggccagtttatgataattctaatggggttgttgcatttggggaaaactttgaaaaacgttacccattttttaagttggatcccatcatgcctggaaatgtgttgtaaccagccatgcactggtaaatgtttcctgattctcctgaaaaaaattgtatattatatataaacataaataagtatcagtttttgtgacgatacaataatttacaggtaataataaattatataatattctttattctataaagaataaatcccgtatagccaactgattcrcgcagaatattattgctaattttttgctgaactcttgatctgtagtcagcctatggttgctattaaaccaggtcttgccaaaatcggactacaaatcactgcttgatcgctatctaattcagcaaggaagatgcttacatcattgactactaaggacaattccagcatgaatgttgattagtcccttcatgtgcattggt

SEQ ID NO: 550273 - DNA, 641 bp, Homo sapiens
tttacaccaaaacattccattgcccagggataagcagaagacagatgccttcctcttatctcaactgcaaagaggccttcctcttttactaatcctcctcagcacagaccctttgtgggtgtcgggctgggggacagtcaggtctttcccttcccacgaggccatatctcaggctatcacatggggagaaaccttggacaatacctggctttcctagacagaggtccctgcggccttccgcagtgtattgtgtccctgggtacttgagattagagagtggtgatgacctttaacaagyatgctgccttcaagcacttgtttaacaaagcacatcctgcacagccctaaatccattaaaccgtgagtcaacacagcacatgtctctgtgagcacagggttgggggtagggttacagattaacagcatctcaaggcagaagaatttttctcagcacagaccaaaatggagtctcttatgtctacttctttctacatagacacagtaacagtctgatctctttttcttttccccacaattataagagtatacaaggtggtgatgaagaaacctgggattacgtgctgtgaaatggggataacagcaattctaacttcatagttttctcatggtaattaaatgac

SEQ ID NO: 550274 - DNA, 1076 bp, Homo sapiens
tgcactgcatgttcatagctacttctggcttcagactgtaatgatatggatgagagtcaggggccacagtcttcccaaatttctccagaaatttcccctttatctccagagcctcttggtcttgtatcaaagattcagaagttcactgttaattggaagcctagagtcagactagaatttatgataaaataatgataattaaaataattgtttctatttttctgcaatctttataggccagaaaatacagagacagagatatggttttgggtcttgcaaacataatgaagtagaataagatgaatgaaaaaacagaaaagaggccaaatcttacttctccccatcatctctggatgagtccttttagtccatgatgagtttaaaacattgaaacaaaaaaatcccaataaatatcaccaaaattaaacaagtatttatacttattaaatgttattgactatcttccaaaaagacatatagattgggaacaggattatttcaggtagtttccacagaaatatataaatataattaatcccagaaatataatttttagttaagagttacacattattactaactgtaaaccactagaattcttcgttatcataaaaaataataaaatccaacattgayggttggttaaggagattaagaaagtttctctttgttagtaagaaggatagaaaaaatattggaaaattcaaggtagaaagatgagagtaagatattaatataagagttaaatgactagcttaggacattggcagtggggacttacacagagataactatgtgtcatctactgttttaatactttacatatagtagatcatataatccttacacagccctataagataagtattcttccgttttatagaatttaagagctattttaagtttggtttggataattcccagcacaatgtgtgacacatagtagatgctagggaatatgattaaataaatcaatgacttaaaatgtgagagacaatggatgggtaaaagaaaactccacatttttaatcttgggaaactgggagtgtagtggcactgatagaaagagtgaagtc

SEQ ID NO: 550275 - DNA, 2038 bp, Homo sapiens
caaaaaataatgataatagaaataataaagaaagtaaagcggggtctaaaatttgccaaaattttaggaaatacattaaaagagtttaaattatctggacctaattatcagtttactccataacttgattcttaaatactctttgtctttaacattttattcattcaatgacaaagaattctatgaagagacaggtattattatcaaagtctaatgaaaacagaggatactttaaatcagaactatctgataagaatattatataatatataacaatatatattatagattatatattatactatataaaaataatatataatctggctttgagtaacaacaatgaatgtcactgagaccagagcaacctaaataaaatgtgcataactgacacattgtaattgtacatatttatggggtacgatttgttgtatatacatatatttctgggttctctgttgtgttctattggtctgtctatttttatgccagtaccatgctgttttagtttatctatctgtatagtatattttgaagccaggtagtatgattcctccaactttgttctttttgctcaggattgctttgattatttgggattatttgtggctccatataaacttcagaaccttatttttctatttctgtgaagaagttggtattgtcattggcatattgatagggattgcataaaatctgtagatcactttgggcagcgtagccattttaacattattcattcttccaatgcatgaacacaggataccctaccatttatttatctttccttctatttcgtttatcagtgttttatagttttcagtgtagagatacttcacctccctggttaagtgcattaaataagctattttaaatacagagaaccctaaggttaagattgtttttattctctagtgaagaagctcagagagatctaggcactgtttgtacaaacattaatttagaatacttaatcttagttttcattgattcagtttttactctaggactcatattacaataggtaaagccatttgttgatcacattccagaaagtgtggttttagtatatgcaaaaccgcagactgacagaatgtcctctgtaaagcgatattctggggcttctgcaatgaggattgcctttgtctaggcaaattattttaatgatttttctgtttagctgaatcatgttaaaaagaaaactgcgctgcgtttttgagcttattagaaaaagtggccaaaccctcagccacaaagattgttaggaatgttgcagatctgtctctatcagrtacaactttatttgacactaaaattttaaagtaaattatccaatttggtgacttaatgctgtggtcttacatgcaatggccattttggtactaaaattaaagtggcatgctattcttttgcgacttgtaaatatgtatgcagtaataatcaagaagatgatttttcagaaatgtatctgtgtaaaatctattttgtgaagtatcattgtgactgttgcttcattgtgacttattgtgactcttgtgatttccagtaagttagggaaaagtttctaatcaaaataaaaattttcctcataataaattaattttccactttttacttaattagtttctaaagtcaaaacaggaaaaacaagcactttaaaaaaataaaaagagaagaatccttgttgattgcattgaataagtgacctacatgtataagccttcttaataaagccactttaagtataaacattgtcctgaaaaatggtttctgcaatactcattataaatcctcaacgtaattctgactcaacttcatgtgtgtcagttcagtctgaaaaggatgacttcctactgatcccagatcaacacttcaataagctttaactgttcctgatgacatacaaacttcttttaagtgtatcggcatctcgagtccttcaaaaagcatgttggtaggaggtctggcaatgcaaaatcatctctgaggataaagcatgtgtttgctttgaaggttctctgccactttctttactttt

SEQ ID NO: 550276 - DNA, 1494 bp, Homo sapiens
tggggggtagggctcacagttatataagtagtttttttgttgttgttgttgttttgttttttcaaagagacagggtcttgctctgccacccaggctggagtgcagtggtgtgatctcagctcacagcaacctctgcttcctgggttcaagtgattttcaggtcttagcctctggagtagctggaattacaggcacatgccaccacgtccagctaatttttgcatttttagcagagacagagtttctccatgttgcccaggctggtctcaactcctgacctcaagtgatctgcctgcctcggcttcccaaagtgttgggattacaggcgtgaaccactgtgcccggccgtatataggtaggtcttaagagaccctaaagaaccccactggcaaatgtctgactcagcttggagtttccctgggatgctcttgccccacctacattcccattcatccttcaagatccagttcaaggccactctggagggccctctcgtgtcgggaccttatcgatagcctctttttccacattccaaaggcaccaatgatttagatccctcatcctgtcaaaatttactgtaattcagctagacttttacataattatgtttgagtattcttatttgtaatgtagttatttaatttcaaatcactccactcattcttcaaaacttgagcatctcccatatgctgatcacactattataagcactgaggatgaagagataaataagacataattcctgccttgtacaagatgcaagcctagtagaggagaataatagcaacagcaacggtgatgctaataataaaaatatgtgcatcatgctttgtcacacacaagacctttttacattcatgttttcatgatttgtcccattttgcagtggaggatactaaggaactagcaaggtgggcatcattatcctcactgaaggaatgaattagtggtcaagttagggtgtaaacccaggtgtcctactccaaagccctccacaccatgtagcgtcttggccattgtatgtctgtcttggtctcagggaaagagtgacctcctgaaacrgaggcactgccttctctctggcagcagcacatgctagaacactcactgagtacatctttgtggcgagttcaatctttcagagcaaggttgaacaactacattctttctcctcttttcactcccaaaccttgcagtctagttatgcttaggtccacaaagccaaaattccctagtctggaaagaatgtgagataagagattactttctgttcttggctctagaatgactcccaggtggtaagtcaataagtggaataggtgatccattctgctgctgaggttagagatctcagaactcccttaacaaacatcaaatgggacttacctgtggtataactgaatatgtcacccaaaggactttgccctgccttgttataggcaaaaacactaataaaataagtgaagccacactcagataagaagttgcactgag

SEQ ID NO: 550277 - DNA, 694 bp, Homo sapiens
caattattgaagcaattgcatttaaggttacaacatgaatttcatgggaactccctgttcratataaatggaaacatgttccttggaataaaatatctttatgagtgaagtttaatatattttgaatcaggcccaaagagatcttttgctgtgagtgaagaataaagtaaaaattccattaataaaattttatggctgtataggtggagaaaaatcttttccacataaaaatattttcatgtttttctcaaattaaaaaaatggaaagttattgatagtcacttaaaactaagcctaattattagaatatagatagccaaatatttctggagacaatagggcaaaaatattttagagttttaaaatgtctgtaactttaaccaagaaattatgcttttagaagtctactcaggaaatacaacttgaaatgctggatacattttaaaaatcattttgatgacattggagaggtataagccagtcaaaaattgagagttcaagattgtcaagatgacaaaagaaccaggagaggagcctgaaaattggtgctacctttcctatccaggtcaacaaaattgagaaactgagggctgcttttggcagttccatgggaccgaggggacaaaaattagatattagaatttgtgaatgtgtcagggacctggtaaacaaccaggttttcagttgggatccc

SEQ ID NO: 550278 - DNA, 916 bp, Homo sapiens
tttgatatgaaatctgccatttttaaataacagcaactaattcaaatgtttttaaaaatacactctgggcaaaacagtttgcctgcagrccctatctgtcccgtaggcagtggccagtttacaacctctgacctccctgttggtgtaaaaaagtgagaagaaaaaaggaggatgcaaaagaagtgtaagaacttgtctctgcctcccctgaccttacaacttatttgggagaaaaaagagggacccacatgaaaaaattaaatcttgacccaaatcggtgttgagtaagtgccaagacaagtggtatttctcttttatttttatttttttgagatggagtctcactctatcgcccaggctggagtgcagtggcacaatcttggctcactgcaacctctgcctcccgggttcaagcgattctcctgcctcagcctcccgagtagctgggactacaggtgcatgccgccacgcctggctaattttttgtattttagttgagatggggtttcaccatgttgcccagactgatctcgaactcctgagctcaggcaatcgacccacctcggcctcccagagtgctgggattacaggtgtgagccactgggcccggccaaaaattccactttttaagtgactgtgcattctgatttacctacgtgtttgtcttgatgtcagggagtccaatgagcacaggcacagaaacagggaggagcatgatttgttggcattacaggagaggctggcctggacaaagctaagtggtggtgtctggggaaagtagtaggcagttttggaagtatgggctggctctaaatgacagctacccttgggtgctggtttgaggtgtttggattttatgttctaggccagtgttgttcaacggaacttcccgcaatgatggaaatgttctataatt

SEQ ID NO: 550279 - DNA, 504 bp, Homo sapiens
ctgaaatatgcatcctgaaatattcmtctcattgtgaaaaattgtagctagagcagaagacacactgtgtgcccgtggtcagagccagttaacacctttggctcaacatctttatctgtaaaataaatatcacatccaagtgtaatgggaattcaattagataatatatataaagtttctttgtgaactataaatcactaaataagtgttatatgtgataattatcaggcctctttttcacataggaaatgccccaccatatttttcaacaacttctttcttatttctttggctcgagctctgaagatataatagccctaatgtaatacctgagcttttttccatcagtagcttgaccagcagacttcattccaaataaactgggtcatcccttttggctcttggaacacaactctaatttagttatttggttataactaaccaaataacttatttctttctttccttcctttcttcctttactttttttttttttttcttgag

SEQ ID NO: 550280 - DNA, 504 bp, Homo sapiens
ctgaaatatgcatcctgaaatattcctctcattgtgaaaaattgtagctagagcagaagacacactgtgtgcccgtggtcagagccagttaacacctttggctcaacatctttatctgtaaaataaatatcacatccaagtgtaatgggaattcaattagataatatatataaagtttctttgtgaactataaatcactaaataartgttatatgtgataattatcaggcctctttttcacataggaaatgccccaccatatttttcaacaacttctttcttatttctttggctcgagctctgaagatataatagccctaatgtaatacctgagcttttttccatcagtagcttgaccagcagacttcattccaaataaactgggtcatcccttttggctcttggaacacaactctaatttagttatttggttataactaaccaaataacttatttctttctttccttcctttcttcctttactttttttttttttttcttgag

SEQ ID NO: 550281 - DNA, 504 bp, Homo sapiens
ctgaaatatgcatcctgaaatattcctctcattgtgaaaaattgtagctagagcagaagacacactgtgtgcccgtggtcagagccagttaacacctttggctcaacatctttatctgtaaaataaatatcacatccaagtgtaatgggaattcaattagataatatatataaagtttctttgtgaactataaatcactaaataagtgttatatgtgataattatcaggcctctttttcacataggaaatgccccaccatatttttcaacaacttctttcttatttctttggctcgagctctgaagatataatagccctaaygtaatacctgagcttttttccatcagtagcttgaccagcagacttcattccaaataaactgggtcatcccttttggctcttggaacacaactctaatttagttatttggttataactaaccaaataacttatttctttctttccttcctttcttcctttactttttttttttttttcttgag

SEQ ID NO: 550282 - DNA, 535 bp, Homo sapiens
gttaataacttcccaagtgtgctattatttgcatattaccaaactctggcctttatgctcattctaaacacccacagatttgtatatctgtatccatgcctacgcatttctrttatctttttaaaaccacttcagcacgcctgttatattggttgcaccatagttttacataactctggacacaaatttaaaaggaaatggcagaacacaagcagcaacaatttaggcaaggctatttataattctacagttcagtcacttactgtcttcactagaaggtcatggattattttgtatatttataaatgcaaagagcttttccaaggagaatgaaataacatgttgagctcttctgagcaaaggtgcaatgtaaatgcaaagtggaacataattatcactgggcagagaacagtcttaggaatcttccttattggctgaccttaagctacaatggtcttattccagactgggaatgtaaaacagagaaggaggtgaggagagacagagatactcagcattccaccaagaaaggact

SEQ ID NO: 550283 - DNA, 635 bp, Homo sapiens
gaattcagacaactgcttatcaaggagtataggaggcacctaaaaaaaaaaaaggcagaggtgatgaatatttattcttttgttcaagtctgtgaatttcatacaccatgctatagcaatatggaacagggtttatatgtccttggccggktttttttttttttgtaggagagatatggtcttttccctacaaaaagaccagacaaaattgaaaaaaaaaactttccaatatgatgcattattctttttttaatctgaattatgacatttcacagcatcttaaaataggtggttatggaaactctttacttgatgaatgtctttatttcttttaaataagcccaacttattttccagctgacactattttctttgctttctcagagatgttgaggtccaaaataatcaagaaatacactcaaaaacagctaatgatttgttttaaacccaagctctttctctgcagtagaagtcctttaattcctcaattaggttttgtcttttgtttgtttttactgtgttttagcttctgctttcctatcattcagcctagtgactaaatgtggcagcaaaaataagtgggctggcctcatgcttcctcttttcatctgtgcttttctggtatattttccaga

SEQ ID NO: 550284 - DNA, 635 bp, Homo sapiens
gaattcagacaactgcttatcaaggagtataggaggcacctaaaaaaaaaaaaggcagaggtgatgaatatttattcttttgttcaagtctgtgaatttcatacaccatgctatagcaatatggaacagggtttatatgtccttggccgggtttttttttttttgtaggagagatatggtcttttccctacaaaaagaccagacaaaattgaaaaaaaaaactttccaatatgatgcattattctttttttaatctgaattatgacatttyacagcatcttaaaataggtggttatggaaactctttacttgatgaatgtctttatttcttttaaataagcccaacttattttccagctgacactattttctttgctttctcagagatgttgaggtccaaaataatcaagaaatacactcaaaaacagctaatgatttgttttaaacccaagctctttctctgcagtagaagtcctttaattcctcaattaggttttgtcttttgtttgtttttactgtgttttagcttctgctttcctatcattcagcctagtgactaaatgtggcagcaaaaataagtgggctggcctcatgcttcctcttttcatctgtgcttttctggtatattttccaga

SEQ ID NO: 550285 - DNA, 635 bp, Homo sapiens
gaattcagacaactgcttatcaaggagtataggaggcacctaaaaaaaaaaaaggcagaggtgatgaatatttattcttttgttcaagtctgtgaatttcatacaccatgctatagcaatatggaacagggtttatatgtccttggccgggtttttttttttttgtaggagagatatggtcttttccctacaaaaagaccagacaaaattgaaaaaaaaaactttccaatatgatgcattattctttttttaatctgaattatgacatttcacagcatcttaaaataggtggttatggaaactctttacttgatgaatgtctttatttcttttaaataagcccaacttattttccagctgacactmttttctttgctttctcagagatgttgaggtccaaaataatcaagaaatacactcaaaaacagctaatgatttgttttaaacccaagctctttctctgcagtagaagtcctttaattcctcaattaggttttgtcttttgtttgtttttactgtgttttagcttctgctttcctatcattcagcctagtgactaaatgtggcagcaaaaataagtgggctggcctcatgcttcctcttttcatctgtgcttttctggtatattttccaga

SEQ ID NO: 550286 - DNA, 599 bp, Homo sapiens
tcctcagaacttctttgttatgaggtcaggaacagatgttaagttggttcattttaatggtggaggtaggggctaccagcctagaaatgcacggagacattgaaagmttaaaactcatggaagtggattcctgcctggtgtctccaaaaggaacatagccttgtggatccattttagattctgactgccggagctacttgagaataaatttgtgttgttttaagccaccatgtctgtagtagaatgttataacatcattaaggaacgaatacagcagatattcaattatatttcaaaatcatgaatttcactgcacaatttagccaatgatttctagtacaatcgtgtgtcacctaatgacagggaaatactctgagaaataagtcattaggttattttgttgttgtgtggacatcatagagtgtacttacagaaacctagatggtattgcctactccactcccaggctatatggtagagcctattgctcctgggctacaaacctgtaaagcatgtttctatactgaataccatacacaattgtatcacaatggtaaggatttgtatatctaaacatagaaaagatacagtaaaaataa

SEQ ID NO: 550287 - DNA, 748 bp, Homo sapiens
  misc_feature 263, 264, 265, 266, 267, 268, 269, 270, 271, 272, 273, 274,275, 276, 277, 278, 279, 280, 281, 282, 283, 284, 285, 286,287, 288, 289, 290, 291, 292, 293, 294, 295, 296, 297, 298,299, 300, 301, 302, 303, 304, 305, 306, 307, 308, 309: n = A,T,C or G
  misc_feature 310, 311, 312, 313, 314, 315, 316, 317, 318, 319, 320, 321,322, 323, 324, 325, 326, 327, 328, 329, 330, 331, 332, 333,334, 335, 336, 337, 338, 339, 340, 341, 342, 343, 344, 345,346, 347, 348, 349, 350, 351, 352, 353, 354, 355, 356: n = A,T,C or G
  misc_feature 357, 358, 359, 360, 361, 362: n = A,T,C or G
tataggagataatatgttaatctgcttcactatagtaaccactttactatctatatgtctcccataacatgtagccctcatatatatgaaataaaattaattttaaaaataaaatgatactaaagaagaaaaartagacatgtttgtatgtattttggtcttgggccccagctcctggcctgaactcctaaaacccttgtaacttcctaagtgataagagtgataggaatatcttttattatattatttgttttggttggggnnnnnnnnnnnnnnnnnnnnnnnnnnnnnnnnnnnnnnnnnnnnnnnnnnnnnnnnnnnnnnnnnnnnnnnnnnnnnnnnnnnnnnnnnnnnnnnnnnnngcctccaatttttgaaacagctctggggagataaaggtaaaaggatcagcctgtgttgttataacgagctcctttcaaccacatatgaggttctgttcatcagacaacatctggaaagcccctaagcatgagtcagtgaggagggggtggttgccaggggaatcaaccatgattaaagggttggaaatttcagtgacatcccctgaaccctggggggagggagaggtgttgaaggctgagctgatcaccaatggccaatgatttaatcaatcatgactatgtgatagatcctccataaatatgctaaccaaagaggttcagagagcttcaaggttgatgaactagaatgcatctatttgtgaagagggtgacacccccaaattcca

SEQ ID NO: 550288 - DNA, 748 bp, Homo sapiens
  misc_feature 263, 264, 265, 266, 267, 268, 269, 270, 271, 272, 273, 274,275, 276, 277, 278, 279, 280, 281, 282, 283, 284, 285, 286,287, 288, 289, 290, 291, 292, 293, 294, 295, 296, 297, 298,299, 300, 301, 302, 303, 304, 305, 306, 307, 308, 309: n = A,T,C or G
  misc_feature 310, 311, 312, 313, 314, 315, 316, 317, 318, 319, 320, 321,322, 323, 324, 325, 326, 327, 328, 329, 330, 331, 332, 333,334, 335, 336, 337, 338, 339, 340, 341, 342, 343, 344, 345,346, 347, 348, 349, 350, 351, 352, 353, 354, 355, 356: n = A,T,C or G
  misc_feature 357, 358, 359, 360, 361, 362: n = A,T,C or G
tataggagataatatgttaatctgcttcactatagtaaccactttactatctatatgtctcccataacatgtagccctcatatatatgaaataaaattaattttaaaaataaaatgatactaaagaagaaaaaatagacatgtttgtatgtattttggtcttggkccccagctcctggcctgaactcctaaaacccttgtaacttcctaagtgataagagtgataggaatatcttttattatattatttgttttggttggggnnnnnnnnnnnnnnnnnnnnnnnnnnnnnnnnnnnnnnnnnnnnnnnnnnnnnnnnnnnnnnnnnnnnnnnnnnnnnnnnnnnnnnnnnnnnnnnnnnnngcctccaatttttgaaacagctctggggagataaaggtaaaaggatcagcctgtgttgttataacgagctcctttcaaccacatatgaggttctgttcatcagacaacatctggaaagcccctaagcatgagtcagtgaggagggggtggttgccaggggaatcaaccatgattaaagggttggaaatttcagtgacatcccctgaaccctggggggagggagaggtgttgaaggctgagctgatcaccaatggccaatgatttaatcaatcatgactatgtgatagatcctccataaatatgctaaccaaagaggttcagagagcttcaaggttgatgaactagaatgcatctatttgtgaagagggtgacacccccaaattcca

SEQ ID NO: 550289 - DNA, 748 bp, Homo sapiens
  misc_feature 263, 264, 265, 266, 267, 268, 269, 270, 271, 272, 273, 274,275, 276, 277, 278, 279, 280, 281, 282, 283, 284, 285, 286,287, 288, 289, 290, 291, 292, 293, 294, 295, 296, 297, 298,299, 300, 301, 302, 303, 304, 305, 306, 307, 308, 309: n = A,T,C or G
  misc_feature 310, 311, 312, 313, 314, 315, 316, 317, 318, 319, 320, 321,322, 323, 324, 325, 326, 327, 328, 329, 330, 331, 332, 333,334, 335, 336, 337, 338, 339, 340, 341, 342, 343, 344, 345,346, 347, 348, 349, 350, 351, 352, 353, 354, 355, 356: n = A,T,C or G
  misc_feature 357, 358, 359, 360, 361, 362: n = A,T,C or G
tataggagataatatgttaatctgcttcactatagtaaccactttactatctatatgtctcccataacatgtagccctcatatatatgaaataaaattaattttaaaaataaaatgatactaaagaagaaaaaatagacatgtttgtatgtattttggtcttgggccccagctcctggcctgaactcctaaaacccttgtaacttcctaagtgataagagtgataggaatatcttttwttatattatttgttttggttggggnnnnnnnnnnnnnnnnnnnnnnnnnnnnnnnnnnnnnnnnnnnnnnnnnnnnnnnnnnnnnnnnnnnnnnnnnnnnnnnnnnnnnnnnnnnnnnnnnnnngcctccaatttttgaaacagctctggggagataaaggtaaaaggatcagcctgtgttgttataacgagctcctttcaaccacatatgaggttctgttcatcagacaacatctggaaagcccctaagcatgagtcagtgaggagggggtggttgccaggggaatcaaccatgattaaagggttggaaatttcagtgacatcccctgaaccctggggggagggagaggtgttgaaggctgagctgatcaccaatggccaatgatttaatcaatcatgactatgtgatagatcctccataaatatgctaaccaaagaggttcagagagcttcaaggttgatgaactagaatgcatctatttgtgaagagggtgacacccccaaattcca

SEQ ID NO: 550290 - DNA, 1748 bp, Homo sapiens
ccgtttattgaaaccacaggtgatcccaggtgggccaatcaggtataaacagtgaacctacagcatctgctacatttgttaaaacaagcacacaaagcaccgtcatttcattgcacraagatcactactattcacgtttcttttgggtttgtttgtttgtttgtctgtttgtttttggggactgagtttcacttttgtcgcccaggctggagcacaatggtgcgatctcggctcactgcaacctccacctcctggttcaagagattctcctgcctcagcctcctgagtagttgggattacaggcgcctgccatcacgcccggctaatttttgattttcagtagagatggggtttcgccatgttggccagcctggcctcgtactcctgacttcagttgatcctcctgcctcgcctcccaaagtgttgggattacaggcgtgagccaccacacctggcctattcacatttcttatatgcccttccaggagcattttaaaacataaaatgaggtggcaaatgcaatctttttaaacttgccctttccccgatagtaggacctgacagtaataagcatgtgttattctcagtagaataatattgtacaactgagtcaggacctgaaccttgacttataccagttagtgttcaagttgataaagcttcggcttctgtggtatttaaaatgaaagagatttaaaactggaaaataggcatttataaaagtattgggtgagtgcaaaagtgagtgctagaatgggcctcccggaataactttcagaaaatcaccactgaactggctcaccagtggagttgctacctctacctcaatcaggaaggtgggaaatttagaaaacactggaacttcaggaatgcacctcactagcagcaatctagggaccaggaagctgatatcactacagtgaagtcacaccatatctgtcagatatatttcttttaaaaaaaaaaaaaggaggttgccacccagtctctatccctataaagctgataactaaaatctacttcagaatacagcctattgccagggttgtgctgccaactaaaatggtagaagtattccaaaacctagtcttttacattatttctgctttccaaatctcccataaatgcatctaattggcagaaactaaagcctagctgcaaggaagcctggagatgtagcttttaggtttattattctgaagtagaggaaattgcactagaagggccctggaatgatgcagaggaagcaaatccacagtgtcctccacagatattttttcttcaaagtaaatgcatctgtactcattcaaccacactctcttgatccaccgatgatcaaaggtatagcttagacttaagatgcagcctgcataaagtcttagggcaatgtaaagttaattggcccacaaattgatcaaaattttaactttggaatcattaatgacactaaacatatttgcatactttaatattaacaacctagtttttaaatccatagatttaggcttgcagaattgaatgaagatcaattcacttaacaatattatctaggatatatttgaggaatcaggaaaatgactatcttcccagaagactagagagatggatcaatattatacctgttttcaaaaatgtgagaaggctggattccagaaatttgccactagaaagtttgatttctatccttgcaagaaataatggaatttaagtacagcttggttccatgagaagagggatgctgttaggcc

SEQ ID NO: 550291 - DNA, 1748 bp, Homo sapiens
ccgtttattgaaaccacaggtgatcccaggtgggccaatcaggtataaacagtgaacctacagcatctgctacatttgttaaaacaagcacacaaagcaccgtcatttcattgcacaaagatcactactattcacgtttcttttgggtttgtttgtttgtttgtctgtttgtttttggggactgagtttcacttttgtcgcccaggctggagcacaatggtgcratctcggctcactgcaacctccacctcctggttcaagagattctcctgcctcagcctcctgagtagttgggattacaggcgcctgccatcacgcccggctaatttttgattttcagtagagatggggtttcgccatgttggccagcctggcctcgtactcctgacttcagttgatcctcctgcctcgcctcccaaagtgttgggattacaggcgtgagccaccacacctggcctattcacatttcttatatgcccttccaggagcattttaaaacataaaatgaggtggcaaatgcaatctttttaaacttgccctttccccgatagtaggacctgacagtaataagcatgtgttattctcagtagaataatattgtacaactgagtcaggacctgaaccttgacttataccagttagtgttcaagttgataaagcttcggcttctgtggtatttaaaatgaaagagatttaaaactggaaaataggcatttataaaagtattgggtgagtgcaaaagtgagtgctagaatgggcctcccggaataactttcagaaaatcaccactgaactggctcaccagtggagttgctacctctacctcaatcaggaaggtgggaaatttagaaaacactggaacttcaggaatgcacctcactagcagcaatctagggaccaggaagctgatatcactacagtgaagtcacaccatatctgtcagatatatttcttttaaaaaaaaaaaaaggaggttgccacccagtctctatccctataaagctgataactaaaatctacttcagaatacagcctattgccagggttgtgctgccaactaaaatggtagaagtattccaaaacctagtcttttacattatttctgctttccaaatctcccataaatgcatctaattggcagaaactaaagcctagctgcaaggaagcctggagatgtagcttttaggtttattattctgaagtagaggaaattgcactagaagggccctggaatgatgcagaggaagcaaatccacagtgtcctccacagatattttttcttcaaagtaaatgcatctgtactcattcaaccacactctcttgatccaccgatgatcaaaggtatagcttagacttaagatgcagcctgcataaagtcttagggcaatgtaaagttaattggcccacaaattgatcaaaattttaactttggaatcattaatgacactaaacatatttgcatactttaatattaacaacctagtttttaaatccatagatttaggcttgcagaattgaatgaagatcaattcacttaacaatattatctaggatatatttgaggaatcaggaaaatgactatcttcccagaagactagagagatggatcaatattatacctgttttcaaaaatgtgagaaggctggattccagaaatttgccactagaaagtttgatttctatccttgcaagaaataatggaatttaagtacagcttggttccatgagaagagggatgctgttaggcc

SEQ ID NO: 550292 - DNA, 618 bp, Homo sapiens
aaatttagggctttgaatgataaggactttatgtgtcacaacactaaacaatttcacctacagagtgctacagtgaaattaccacttatttggggtccccgagatagcacatttcatttttaccttgttttattttacctatttcctgggagcaggcttagtcctacaagggaaatacaaaagctcccttcacactatgatatgagaactgtaaatagccctgcctgggaaaactgatcttatccagaaagtttactgggcagacatctgtactgttacattaactatgactacatagaaaagctccagtctaaaatgtgtaaataccatctgaccaagscctttgggccctcctctctcactaacaccctaggagacgttatcctccacagttaagatgctgatttcctgatgatgggatgggaatggaaagaaacatgaaggccaatccgaggaagcagcccgcagatgaagagaaatctatttccattaatatttgctagggccaggcttgcagggaagaaactgggttttagtagtttctctgctgatccgtactcattatcagctgtaacagacaaaagatgaagatgggaaaaagagaaaaagaaatttaaa

SEQ ID NO: 550293 - DNA, 618 bp, Homo sapiens
aaatttagggctttgaatgataaggactttatgtgtcacaacactaaacaatttcacctacagagtgctacagtgaaattaccacttatttggggtccccgagatagcacatttcatttttaccttgttttattttacctatttcctgggagcaggcttagtcctacaagggaaatacaaaagctcccttcacactatgatatgagaactgtaaatagccctgcctgggaaaactgatcttatccagaaagtttactgggcagacatctgtactgttacattaactatgactacatagaaaagctccagtctaaaatgtgtaaataccatctgaccaaggcctttgggccctcctctctcactaacaccctaggagacrttatcctccacagttaagatgctgatttcctgatgatgggatgggaatggaaagaaacatgaaggccaatccgaggaagcagcccgcagatgaagagaaatctatttccattaatatttgctagggccaggcttgcagggaagaaactgggttttagtagtttctctgctgatccgtactcattatcagctgtaacagacaaaagatgaagatgggaaaaagagaaaaagaaatttaaa

SEQ ID NO: 550294 - DNA, 618 bp, Homo sapiens
aaatttagggctttgaatgataaggactttatgtgtcacaacactaaacaatttcacctacagagtgctacagtgaaattaccacttatttggggtccccgagatagcacatttcatttttaccttgttttattttacctatttcctgggagcaggcttagtcctacaagggaaatacaaaagctcccttcacactatgatatgagaactgtaaatagccctgcctgggaaaactgatcttatccagaaagtttactgggcagacatctgtactgttacattaactatgactacatagaaaagctccagtctaaaatgtgtaaataccatctgaccaaggcctttgggccctcctctctcactaacaccctaggagacgttatcctccacagttaagatgctgatttcytgatgatgggatgggaatggaaagaaacatgaaggccaatccgaggaagcagcccgcagatgaagagaaatctatttccattaatatttgctagggccaggcttgcagggaagaaactgggttttagtagtttctctgctgatccgtactcattatcagctgtaacagacaaaagatgaagatgggaaaaagagaaaaagaaatttaaa

SEQ ID NO: 550295 - DNA, 618 bp, Homo sapiens
aaatttagggctttgaatgataaggactttatgtgtcacaacactaaacaatttcacctacagagtgctacagtgaaattaccacttatttggggtccccgagatagcacatttcatttttaccttgttttattttacctatttcctgggagcaggcttagtcctacaagggaaatacaaaagctcccttcacactatgatatgagaactgtaaatagccctgcctgggaaaactgatcttatccagaaagtttactgggcagacatctgtactgttacattaactatgactacatagaaaagctccagtctaaaatgtgtaaataccatctgaccaaggcctttgggccctcctctctcactaacaccctaggagacgttatcctccacagttaagatgctgatttcctgatgatgggatgggaatggaaagaaacatgaaggccaatccgaggaagcagcccgcagatgaagagaaatctatttccattaatatttgctagggccaggcttgcagggaagaaactgggttttagtagtttctctgctgatccgtactcattatcagctgtaacagacaaaagatgaagatgggaaaaagagaaaaaraaatttaaa

SEQ ID NO: 550296 - DNA, 660 bp, Homo sapiens
caacctccacctcccaggttcaagcgattctcctgcctcagcctcctgagtgctgggattacaggtgtacgccaccatgtccagctaatctttgtatttttagtagaggcagggtttcaccatgttggccaggctggtcttgaactcctgacctcaaatgatctgcccacctgggcctcccaaagtgctgggattacaggcatgagccacagggcccggcttgcaatgaattattatgtagttcttagaccaggccctgaagagtagacrctccatacgtgtggactgtcgttattacagctcttagtccaatggggacgctaagagccaaagacgggcgtgatctgataaggtcaacagtcagtcatcactttctctggccttgaactcatgcagcctgcctcctggaattctcgcaaaatgtccaaggcagtgggaacatgtcagtctggaattccacactgcactgtcaacgccttttcaggaggaattccgcagccagccctgtgtgagtgctgggtgtgtgttcccacatctgggcatgagcagaaggcagaccaaatgacagtcttaatagcaacacatctgcttttcaaaaacctcatttgagccagcctccataatatcccagccgatccaaggaagctgctgccgggaaca

SEQ ID NO: 550297 - DNA, 660 bp, Homo sapiens
caacctccacctcccaggttcaagcgattctcctgcctcagcctcctgagtgctgggattacaggtgtacgccaccatgtccagctaatctttgtatttttagtagaggcagggtttcaccatgttggccaggctggtcttgaactcctgacctcaaatgatctgcccacctgggcctcccaaagtgctgggattacaggcatgagccacagggcccggcttgcaatgaattattatgtagttcttagaccaggccctgaagagtagacactccatacgtgtggactgtcgttattacagctcttagtccaatggggacgctaagagccaaagacgggcgtgatctgataaggtcaacagtcagtcatcactttctctggccttgaactcatgcagcctgcctcctggaattctcgcaaaatgtccaaggcagtgggaacatgtcagtctggaattccacactgcactgtcaacgccttttcaggaggaattccgcagccagccctgtgtgagtgctgggtgtgtgttcccacatctgggcatgagcagaaggcagaccaaatgacagtcttaatagcaacacatctgcttttcaaaaacctcatttgagccagcctccataatatcccagccgatccaaggaagctgctgccgkgaaca

SEQ ID NO: 550298 - DNA, 671 bp, Homo sapiens
taaattcccattcttgacatttatcctaaggaactggagatgccttaagtcatccctgactcctttttctcaaaccccacactaagccaataaaaacccatttctcaccacctttactgttatccccactgtctaaaagccaacatcattgcccacctggattacagcaataacctcctgactttccctgtttctaccctctatagtttactttcacagaatagccaaaatgrtcagatagccctctgtgcaaaaccctccaatgctttcctatctctgggcatagaggccaaattccacttagcatcagaagttcctcttggatttcttcacctcctacagctttcctatgaactctgcttcagctattctggcctgcttgctgctgttccttaaatatgccagatccactccaaactcagggtctttacatgcttctctttgcctggaatgttttcctccaatatccatctggtttgctgcctcaccaccttcaggtatttgatcaaatgccattttatcattctttcctgaccatcctatttaaaactataatcccaaggcccctacatcatcacttcttattccccatccctgatttagttttctccagagcactcatcactatttgatgtaatttatagtttacatccttattgtctctctttcct

SEQ ID NO: 550299 - DNA, 554 bp, Homo sapiens
tgccatttttttgttcctttttatggctgagtagtattccaaggtayatgtataccacattttctttatccactcattgactgatgggcatttggactggttccatatttttgcagttgtgaattgtgctgctataaacgtgtgtgcaagagcatacttgacatattttctatttttctttttctttttttttttttttttacagtccagaggtcttttatttttttaacacctatgatgccatgaattcgtagggaagaggttccagcagctcaggctccttcccacgggctctcataaagtgtgcttctctgggtggagcagactggtgcttcagttgaacccaggcacctttctctttggcttctttctttttctgatcattttccttcacgcgtttcaggaagctagctcggctcttagagtgtttaatgtgctcaatacacacattaattctcttggcaagaatcttgcccttaacttgtttgtttacaacaatgccaacggcatgctggggaacactgcagactcttcccatttagccatggtaacac

SEQ ID NO: 550300 - DNA, 1344 bp, Homo sapiens
caccttggtctggcttcctttaggccaccacacccagcccctttcttttctcttaacccctgaagattttcgtctccctgcttggcctgtatgctgtgaagtgcttatagattaataaataccttaaggggaaatataggagaaatattgatctcacagcaatgcatttcccttttctctgggatactggcccctcaaagcctggttgctttggttgttctccagtgccttcttatagatgtatttctgatattttacctctataattactgcctgccaaagattaattttattactactctattacagcctgaagaagttcctaaaaattaaygttttcaatgtttcatcatatagaaatatactcccaatgtaatattaaattttaaaaaattgcattaaataatgtagtcacaattttgattcctaaacatatgaaacaaattgtatagacattatatatatatagtataaagttggaattatacacataccaacatatgaaagatatatactatagtggttgattctaggaaatgagattatactgttccttaatagtttttagtattttccaaattatcacaatgctttactttagcagtataaaaaagacctattattttaaaaataaatgctttagtaaagtctatttaatagcttaagagaaagttaagttgctagacatttttattttcagaagaaggcctagggccagagaaggtttagtttggattgggctaaagacaattggctgactcctaagggagaggtcagctttcagtatcttatgccgctggcacaggcgcagactgtatgtgttagcagtgtggaaagataacaaggatcatattggccttttcagcaagtttggtgtgagctttgggagtcagatgaaatggaacttcctttaattggactttattgagccatgctgttatcttggcttcccttgtctggggcacagaccctagcatagttttccctcctgtaaatatactaccccctcagggatgggttggcatatttgaggaaataactgtagtctaatctgtacattttttctcttttccagggaaaagaaggactattaccacaatatctgaaggatgagaactttttggaattgtccaacatctcaaaagtattcaattcacaaaaattattctcattctgaagtattcccctagtagaatagtgcctcgtggcttatgtattctggtgctctctgctcccattattctaaattaaattggtgctagtattatggaattactccatagcttctccactgctgactttaatttatcctcgttggcaaatgtagcgcagcatgaaatagtg

SEQ ID NO: 550301 - DNA, 1389 bp, Homo sapiens
aaatgggagccaaatattgttggatgaatgtactaaattgtaatactcattttcaatgaaattctctgattgaacctatatttctcttgaaattatcttagtaaatttccaacttcctgatgtcactcagttgttcaaacgaacaaatcacaaagtgttacattccaatattttaacaaatgaatttaaaactcactaaatggcctcatttggaatattgttttaacaagtcagaaaatttggatttcaagtttgtgtggaaatgagaggcattgtaatagacatgcattgttttggtaataaaattttaacaacggaaatgttttcaaatattgatttttcaaaatttttttttaaatcctagcacaagttttttctcttgaaaattagtttttccctctcatttctcaaaaatcatctttatcatgaaggaacaatttaactgcgtttttttgtataagtttttctcagacaacaatttcagaacactaaacttgtcattacaaaatggtcaaatatttaatattcttggattttggtggaagaaaaatatgtcaattcatatataaaatgttagcaaggcttaattttgggtaatttctggatgttacctaaatatataaaagttccatcatttcttcctgtgctctaatgaatcgtaagggttgtgcacagactattttacagccactcctctaatagttgagagaagtgcaactttccctacctgttgggaagccaggaaatttctacaaataagacggcatgcaatggccaggtttggatcctctcttcttcctctgatgaggaaagtatgtcacaaaagatgatgggtactcaaccttctctctccagcctgcgtttatctcactgaacacccaaactccastccacaatgaggtcatttccttcttaccgtctacaacacttactcccatcctatctcttccccttccctgcgccttgtcccccaacccccaattctacttaggttctcaagatctcaatgcgttggaaataccttcccaaactttcatttgctcttcacattcctttctaattgggagcataagtcacacaattttgtgagtctaagttttctcatctgtaaaaaggatcaaactatatttcaaaggcctcttctgtctttaagactgactaaaaagaagtataattaacaaggagaaaaacaacaacaaaaaagaatctgactaaattctctgactctccctgagctaagatgtaccagttcgtaattaacttgaatgcttgcgttagtttctctatattctcaatataaatatttaatgcactgtaagttaatgttataattatttgctgaaaatatttactgaagagcatgggaaacctatgatcttctttcactta

SEQ ID NO: 550302 - DNA, 531 bp, Homo sapiens
tttaatttctcattccttctagaattaccccgccccaaccttgtctacacacacacacacacacacacacacacacacacacacacacasagctttgtattattttaacagctttccttgttgcttctcacaaattctttaacagtagaatccaattatttttgcaaataataagctaccaaccttggtgattcaaaattggttctcaaattaacagtgattatcacctcagttttctgtctggccactcaacacattttatcagaatccagttttaggaagagcatagtcccaggcattacagggcagcagcgaagggggagagggagatgggttacctctgaggccacgaggccagcatccccacagggccttacaatagaaggttggagacagcacaaatggaaacacaaaagcaacctaaaatcaatagtgtgagtgcgtcaggatgttgttagctctggtgactgacactggcaagggctggcttgggaaggctttctgcagtgggtaagacttaagtaaaagtaa

SEQ ID NO: 550303 - DNA, 638 bp, Homo sapiens
ttttacagctaaggaaaatgagacaggtatagtaatttgcccagggttacacagttaataagtatcagccaagttttgaactgatactgtccaactccacagtgcatgtttgtgatccttacattatactagacaaatgtataggactttggagaagggaataatcactgtagagtgagatagttgtcagtggaacttggactggaactttactgatggagtttggtacaatcagacaagaagtatgaaggatgactagatgatagaaacatcctgagcagaaccaccaaggtcaaatgttgggggaaatctatggtaggatgtttatgaggtagtctgtttaagggaacagtraaacccaaatcatgtgttaatttggcttacagggacctgagtgatctggcccttgtgtaccatccttactgttttcctctacctgcaagccacgctggcttgctttctgttctttgaacatgcaaagtttgctggcatcctaggacctttacactctgatttccctgcctagagtgctcttcgcccagaacttttatgtctggctccttattgtcattcacaggggcccccagcccctggaccatggactcgtaccagtctgtggcctgttaggaaccaggctg

SEQ ID NO: 550304 - DNA, 638 bp, Homo sapiens
ttttacagctaaggaaaatgagacaggtatagtaatttgcccagggttacacagttaataagtatcagccaagttttgaactgatactgtccaactccacagtgcatgtttgtgatccttacattatactagacaaatgtataggactttggagaagggaataatcactgtagagtgagatagttgtcagtggaacttggactggaactttactgatggagtttggtacaatcagacaagaagtatgaaggatgactagatgatagaaacatcctgagcagaaccaccaaggtcaaatgttgggggaaatctatggtaggatgtttatgaggtagtctgtttaagggaacagtaaaacccaaatcatgtgttaatttggcttacagggacctgagtgatctggcccttgtgtaccatccttactgttttcctctacctgcaagccacgctggcttgctttctgttctttgaacatgcaaagtttgctggcatcctaggacctttacactctgatttccctgcctagagtgctcttygcccagaacttttatgtctggctccttattgtcattcacaggggcccccagcccctggaccatggactcgtaccagtctgtggcctgttaggaaccaggctg

SEQ ID NO: 550305 - DNA, 1013 bp, Homo sapiens
  misc_feature 476, 477, 478, 479, 480, 481, 482, 483, 484, 485, 486, 487,488, 489, 490, 491, 492, 493, 494, 495, 496, 497, 498, 499,500, 501, 502, 503, 504, 505, 506, 507, 508, 509, 510, 511,512, 513, 514, 515, 516, 517, 518, 519, 520, 521, 522: n = A,T,C or G
  misc_feature 523, 524, 525, 526, 527, 528, 529, 530, 531, 532, 533, 534,535, 536, 537, 538, 539, 540, 541, 542, 543, 544, 545, 546,547, 548, 549, 550, 551, 552, 553, 554, 555, 556, 557, 558,559, 560, 561, 562, 563, 564, 565, 566, 567, 568, 569: n = A,T,C or G
  misc_feature 570, 571, 572, 573, 574, 575: n = A,T,C or G
cttagtacctaacacctattagtgcccaaaataaatttactggttaacttaaatgacattaaactgtcaaaattgatatgatcaaggaacagaatagcagtgcaatttaataaattagtagtaccaaattgctacttctaggtttgtacttttctttctttttttttgagtctgttgcccaggctggagtgcagtggagcgaactcgggccactgcaacctctgcttcccagtytcaagtgagtctcctgccttagcctcccgagtagctgggaatacaggcacccaccaccatgcccagctaatttttgtatttttagtagagacggggttttaccatgttagccaggctggtctaaacttctgactaggtgatccacctgctcagcctccaactactggattcagcctgagccacgaaccagctggtttgtctttcaatattacaggaataattacttacacatgatctttctnnnnnnnnnnnnnnnnnnnnnnnnnnnnnnnnnnnnnnnnnnnnnnnnnnnnnnnnnnnnnnnnnnnnnnnnnnnnnnnnnnnnnnnnnnnnnnnnnnnnaggatccccgatccacctgcctcagcctaccaaactactgggattacaggcatgagcctacgacccagctggtttgtacttttcaaataattaacagtgaaataaatatacttaacaacatgatactttccttcaaaaagtacctcagaatctatggcatgcccttgagtcatcacaataaaaatcaaatcactagggaggagatgccttatagttctaattgctagatcctgtatcaatggggtacttacatttattgcttggccagtcttttgaataaataatacttttataatgaacttataacggtggtacccaaattctttgactgctaacagtatgcggtctgccaattcaagtgacaagtgagagaatactttatcatcatatttgacatctttaagactttcctttaagaaaatttaagaaaaatacttt

SEQ ID NO: 550306 - DNA, 1013 bp, Homo sapiens
  misc_feature 476, 477, 478, 479, 480, 481, 482, 483, 484, 485, 486, 487,488, 489, 490, 491, 492, 493, 494, 495, 496, 497, 498, 499,500, 501, 502, 503, 504, 505, 506, 507, 508, 509, 510, 511,512, 513, 514, 515, 516, 517, 518, 519, 520, 521, 522: n = A,T,C or G
  misc_feature 523, 524, 525, 526, 527, 528, 529, 530, 531, 532, 533, 534,535, 536, 537, 538, 539, 540, 541, 542, 543, 544, 545, 546,547, 548, 549, 550, 551, 552, 553, 554, 555, 556, 557, 558,559, 560, 561, 562, 563, 564, 565, 566, 567, 568, 569: n = A,T,C or G
  misc_feature 570, 571, 572, 573, 574, 575: n = A,T,C or G
cttagtacctaacacctattagtgcccaaaataaatttactggttaacttaaatgacattaaactgtcaaaattgatatgatcaaggaacagaatagcagtgcaatttaataaattagtagtaccaaattgctacttctaggtttgtacttttctttctttttttttgagtctgttgcccaggctggagtgcagtggagcgaactcgggccactgcaacctctgcttcccagtctcaagtgagtctcctgccttagcctcccgagtagctgggaatacaggcacccaccaccatgcccagctaatttttgtatttttagtagagacggggtttyaccatgttagccaggctggtctaaacttctgactaggtgatccacctgctcagcctccaactactggattcagcctgagccacgaaccagctggtttgtctttcaatattacaggaataattacttacacatgatctttctnnnnnnnnnnnnnnnnnnnnnnnnnnnnnnnnnnnnnnnnnnnnnnnnnnnnnnnnnnnnnnnnnnnnnnnnnnnnnnnnnnnnnnnnnnnnnnnnnnnnaggatccccgatccacctgcctcagcctaccaaactactgggattacaggcatgagcctacgacccagctggtttgtacttttcaaataattaacagtgaaataaatatacttaacaacatgatactttccttcaaaaagtacctcagaatctatggcatgcccttgagtcatcacaataaaaatcaaatcactagggaggagatgccttatagttctaattgctagatcctgtatcaatggggtacttacatttattgcttggccagtcttttgaataaataatacttttataatgaacttataacggtggtacccaaattctttgactgctaacagtatgcggtctgccaattcaagtgacaagtgagagaatactttatcatcatatttgacatctttaagactttcctttaagaaaatttaagaaaaatacttt

SEQ ID NO: 550307 - DNA, 1013 bp, Homo sapiens
  misc_feature 476, 477, 478, 479, 480, 481, 482, 483, 484, 485, 486, 487,488, 489, 490, 491, 492, 493, 494, 495, 496, 497, 498, 499,500, 501, 502, 503, 504, 505, 506, 507, 508, 509, 510, 511,512, 513, 514, 515, 516, 517, 518, 519, 520, 521, 522: n = A,T,C or G
  misc_feature 523, 524, 525, 526, 527, 528, 529, 530, 531, 532, 533, 534,535, 536, 537, 538, 539, 540, 541, 542, 543, 544, 545, 546,547, 548, 549, 550, 551, 552, 553, 554, 555, 556, 557, 558,559, 560, 561, 562, 563, 564, 565, 566, 567, 568, 569: n = A,T,C or G
  misc_feature 570, 571, 572, 573, 574, 575: n = A,T,C or G
cttagtacctaacacctattagtgcccaaaataaatttactggttaacttaaatgacattaaactgtcaaaattgatatgatcaaggaacagaatagcagtgcaatttaataaattagtagtaccaaattgctacttctaggtttgtacttttctttctttttttttgagtctgttgcccaggctggagtgcagtggagcgaactcgggccactgcaacctctgcttcccagtctcaagtgagtctcctgccttagcctcccgagtagctgggaatacaggcacccaccaccatgcccagctaatttttgtatttttagtagagacggggttttaccatgttagccaggctggtctaaacttctgactaggtgatccaccygctcagcctccaactactggattcagcctgagccacgaaccagctggtttgtctttcaatattacaggaataattacttacacatgatctttctnnnnnnnnnnnnnnnnnnnnnnnnnnnnnnnnnnnnnnnnnnnnnnnnnnnnnnnnnnnnnnnnnnnnnnnnnnnnnnnnnnnnnnnnnnnnnnnnnnnnaggatccccgatccacctgcctcagcctaccaaactactgggattacaggcatgagcctacgacccagctggtttgtacttttcaaataattaacagtgaaataaatatacttaacaacatgatactttccttcaaaaagtacctcagaatctatggcatgcccttgagtcatcacaataaaaatcaaatcactagggaggagatgccttatagttctaattgctagatcctgtatcaatggggtacttacatttattgcttggccagtcttttgaataaataatacttttataatgaacttataacggtggtacccaaattctttgactgctaacagtatgcggtctgccaattcaagtgacaagtgagagaatactttatcatcatatttgacatctttaagactttcctttaagaaaatttaagaaaaatacttt

SEQ ID NO: 550308 - DNA, 618 bp, Homo sapiens
atctcttcttgtgatcatctgtcaggcttctgtgtctcttaactgcaaaagcagcattattagctccctaaacctcttaaaaacaaaatcattttgttcttgtttattaagagaatgcttctctaaggcagtgattgggaccttcctttcctccacaatatactcaagggatgcaactacatagtatcattaacagcrgctttcaactgcaatgattcttaaggaaatggggcattcgtgtgtggcctgaaaataaccattaatgcttctaatatgctgaaaatttacatctgtaccatttctcctttgtgtataatattggctgacttgctatacttattaagagtattttattccttttattaagaatctttataatcttttttaaattgggaataggctttaaatatgatcaactttttggcatctaataatacctgagtttctactgatatagcatttccttatattgagcctacatatagccctaaaataaaatgagcttgggcaggagatattacttttatttctaaatgccacatgctagtgtttaagattttttttttcttttctgagacaagagtctcactctgttgcccaggctggagtgcagtggca

SEQ ID NO: 550309 - DNA, 1124 bp, Homo sapiens
cttttctcctaactttcttgcctggcttgtttggctagctgaatgcagaggatctagcaaagccctctgaggaagcacttacagatggtggtcccataaaagaaaagccaagatactgtaaccatggaacagaaggccatgcactaaatacctgaacagactgtgaaaggaacaagattgattgtgttaagccactgagattatttgctgttgttatggaagtcggcattatagtggggatggtaaggctgaaagggtaggttaaaagatctataaaatcctaccaaagcaagtcattcacaggaattatgataataaagtaatttaaatagtaataagctttgaattgatatatgccaacattgggaagaggggaaggcccattctttctgatgtggacttctatgaatcattttcttggggtggttttatgctgataacttaattaggggttctaagtaaaaatgttagaaagtggggagtttcttcrctacagaggattcttgagcatttcatagcttatggaaagcagaaacagacttggggtgctctgaggagataagtctaaagctggctggtttgggatgacttttattgctttatttgattgtaagagtaatacatattccctgtagaaaatttggaaaatataaaaatgtcaatggaataaaataaccatttgtttatgtttcagtgtgttttattccagttcttctctttgtctctttctctatatattacatgtaaatataggtaaaaatcatactatatttatttttcgttattaaatttctttataaacttaattttaaatagttgtataactttttcattatatgaatatgccataatttttactatttctcataaagctgaatacaattatttccagggattttttgttattttgacaagaatgaatatcattattcacaaatatttgcctggattcttgactatatttttaggctagattcctagaaatagagtttgtagtccaagagtttgaaaaattataaaagaccttggtgggcataggaaattagctttctagaaagattccagcagtttacttttccatcagcagaatatgagactacctgtcttataacctattcaatgca

SEQ ID NO: 550310 - DNA, 1124 bp, Homo sapiens
cttttctcctaactttcttgcctggcttgtttggctagctgaatgcagaggatctagcaaagccctctgaggaagcacttacagatggtggtcccataaaagaaaagccaagatactgtaaccatggaacagaaggccatgcactaaatacctgaacagactgtgaaaggaacaagattgattgtgttaagccactgagattatttgctgttgttatggaagtcggcattatagtggggatggtaaggctgaaagggtaggttaaaagatctataaaatcctaccaaagcaagtcattcacaggaattatgataataaagtaatttaaatagtaataagctttgaattgatatatgccaacattgggaagaggggaaggcccattctttctgatgtggacttctatgaatcattttcttggggtggttttatgctgataacttaattaggggttctaagtaaaaatgttagaaagtggggagtttcttcgctacagaggattcttgagcatttcatagcttatggaaagcagaaacagacttggggtgctctgaggagataagtctaaagctggctggtttgggatgacttttattgctttatttgattgtaagagtaatacatattccctgtagaaaatttggaaaatataaaaatgtcaatggaataaaataaccatttgtttatgtttcagtgtgttttattccagttcttctctttgtctctttctctatatattacatgtaaatataggtaaaaatcatactatatttatttttcgttattaaatttctttataaacttaattttaaatagttgtataactttttcattatatgaatatgccataatttttactatttctcataaagctgaatacaattatttccagggattttttgttattttgacaagaatgaatatcattattcacaaatatttgcctggattcttgactatatttttaggctagattcctagaaatagagtttgtagtcmaagagtttgaaaaattataaaagaccttggtgggcataggaaattagctttctagaaagattccagcagtttacttttccatcagcagaatatgagactacctgtcttataacctattcaatgca

SEQ ID NO: 550311 - DNA, 674 bp, Homo sapiens
tgatctctccctccgatggccaccactccagggaaataggatgaaaggtacatgggaaatctctgtactctctttgcaacttcctacaaatctataattatttcaaagtaaatttttttataagttcagtgagactcaccacagtttaatacttctttgtgaacttgcttcacttttgccaacattttagagtagagattgtcaatagagttgatgtctaagacataagccacacagtgaatcctgtccttcagagatggagaggtgataaaagtagaatgctcaggtgtaattggtttacrggaattaaactgttataaaaacataaggtaacattcagaaatcagagagcctctgtttaacccttaaagacacaattaatgcttctaatactgtaactactgatctccctctttctcctcagctactctttccccaaacagtagcacctcctctttacttcctttccactgtgagcataatgccattatatctctcttataggaaaaaaaacactttattgctttggtaaaaatgataattatccattgtaagtattgcaggaaagtttaaataatatttttgaaaagctaatttcaaatcctagtatccagaaataaacaccattaacgtttgttaaatacaatttaagactcctccctaagcattttgca

SEQ ID NO: 550312 - DNA, 754 bp, Homo sapiens
caattttataaggtgccagtattacttttgtttcaactttccatactgaaatttatgttacccaacaagtgaataattccctgtaaatttcttgagtgtgcttactaaattccaggaattatactaaatgttttatgccaactcttttgcttcaagtatgtaataattttatgaggtgggatttatttgtattttacaactagagaaactaaggctcagaaaggataagcaacatacccataaaacccataaatgagcatattaaaaaccaagatatgcccaattccaatcctaaaatctgcattcttccattatccaaaaacagcaatgtctatttctgccaattgcttgagaaatacttctttaaaaagctgcattacttctcacacaattatttgcatgatgtcataataktaatctttatcatttttttacactatcaattactcagtctttggtaaaaagtaatttggttagctattttagtttgtaaactgaataaaatgttttctggttaattccagtcttttttctcattttttaaaccagaagtcagcaacatggtcaaatctagccatctacgtttataaataaagttatatggaaacgcagcacagccattttttatagacatatatggctacttatatactacaatattagcattgagtagttactacagacaccatagggccaacaaagcctaaaatatttactattttgcccattatagaaaaagctggcccggtgtggt

SEQ ID NO: 550313 - DNA, 754 bp, Homo sapiens
caattttataaggtgccagtattacttttgtttcaactttccatactgaaatttatgttacccaacaagtgaataattccctgtaaatttcttgagtgtgcttactaaattccaggaattatactaaatgttttatgccaactcttttgcttcaagtatgtaataattttatgaggtgggatttatttgtattttacaactagagaaactaaggctcagaaaggataagcaacatacccataaaacccataaatgagcatattaaaaaccaagatatgcccaattccaatcctaaaatctgcattcttccattatccaaaaacagcaatgtctatttctgccaattgcttgagaaatacttctttaaaaagctgcattacttctcacacaattatttgcatgatgtcataatattaatctttatcwtttttttacactatcaattactcagtctttggtaaaaagtaatttggttagctattttagtttgtaaactgaataaaatgttttctggttaattccagtcttttttctcattttttaaaccagaagtcagcaacatggtcaaatctagccatctacgtttataaataaagttatatggaaacgcagcacagccattttttatagacatatatggctacttatatactacaatattagcattgagtagttactacagacaccatagggccaacaaagcctaaaatatttactattttgcccattatagaaaaagctggcccggtgtggt

SEQ ID NO: 550314 - DNA, 991 bp, Homo sapiens
atactatgtagaaactgggtataataatcagctgacaaccatcaagaaaactggggcttcagttccacaaccacaaagaaatgatttttttttcctacagtctccaataagaaacatattcttactgactccttgattttatcctggtgaaaccagtgacctgtatcatccttctgacctagagaactataagataataaatttatggtgtttcatgtcactgaagtggtaatttgttacagcaacaataggaaatttatatatctagtcactgattcatgaatacttttttcccatctcaaaccaaatacctcctgatcaggctctccaacgaactctgacaaacaaatcaaatcctaagtcaaatgttttaaaatagttctgttaacacttaagtaaagtgagctgaagggaagtttcaatacacaggctattttgataacagatttagttacttctgaagccctgcctacatacagtagtatatgttaggtggtaggtaaacattcttgattccttaatgacttgtttttgattcctcataatgactgattattgaactaataaaaattcttgaggcccattctaaggtgctcagagaacatagctggcagtccctatgaactaaagccttgagcagtcttgagctatagtctggaacacagggtagcggtgagatgagakgccattctgccctctatacaaagctggtagaaaattcagatttattcattgataagtactccctacaacactgccaacactgatcgattgctcttgatttataatgtgaatttcagcttctgactttcactatggttattcctctctacgctaagccccaaatataggacttttctgcctttactgcatttaagattattcccattttttctaaccatcaaagagtgcctgaaattttctcctaagatcaggaacaagggaagataccccctttacacttctattcaacactatactggaattccta

SEQ ID NO: 550315 - DNA, 991 bp, Homo sapiens
atactatgtagaaactgggtataataatcagctgacaaccatcaagaaaactggggcttcagttccacaaccacaaagaaatgatttttttttcctacagtctccaataagaaacatattcttactgactccttgattttatcctggtgaaaccagtgacctgtatcatccttctgacctagagaactataagataataaatttatggtgtttcatgtcactgaagtggtaatttgttacagcaacaataggaaatttatatatctagtcactgattcatgaatacttttttcccatctcaaaccaaatacctcctgatcaggctctccaacgaactctgacaaacaaatcaaatcctaagtcaaatgttttaaaatagttctgttaacacttaagtaaagtgagctgaagggaagtttcaatacacaggctattttgataacagatttagttacttctgaagccctgcctacatacagtagtatatgttaggtggtaggtaaacattcttgattccttaatgacttgtttttgattcctcataatgactgattattgaactaataaaaattcttgaggcccattctaaggtgctcagagaacatagctggcagtccctatgaactaaagccttgagcagtcttgagctatagtctggaacacagggtagcggtgagatgagatgccattctgccctctatacaaagctggtagaaaattcagatttattcattgataagtactccctacaacactgccaacactgatcgattgctcttgatttataatgtgaatttcagcttctgactttcactatggttattcctctctacgctaagccccaaatayaggacttttctgcctttactgcatttaagattattcccattttttctaaccatcaaagagtgcctgaaattttctcctaagatcaggaacaagggaagataccccctttacacttctattcaacactatactggaattccta

SEQ ID NO: 550316 - DNA, 1542 bp, Homo sapiens
tgggaagttataattgtattttgcawtgtgagaaggacaggagatttgggtgggagcaagggcggagggcaaaatgatgtggtttggatatttgtctctacccaaatctcatgttgaaaggtaatccctgttttggaggtagggcctggtggctaagtatttggatcatgggggcagatcacaggggccatcaccttggtgataagtgagctcttgctctgagttcacctgacatctgatcatttaaagtgtgtggcaactccccccgactcttgctcctgctttgccatgtgagctcctgttttgctcctgctctgacttccaccatgagaaacagcttcctgaggcatctccagaagcagatgctggcactatgcttgctatatagctggcaggactgtgagccaaataaacctctttaaaaacaaattacccagtctcaggcatttatttatagcaaggcaagagtggcctaatacagatgatgtgggtagagccataccatgcagtgctatcaggcattggaatgtctgtacaccaaaaacactttatgacataggaaagacagtgtgtcagttaaatgtacacaatatagacatctaaaaattataactgcatacatatagtgatcctatttttatatatttttaaaacaagtaactgattccaaaattcttagtgtatttttgcaattactcatgacatttattattgctatctttctacattttgtgcaatgtcaacaataaatttgtattacttttatcacacaaaacacatagaatgtggctggaatataggagatgctaaataaatagtgtttaaatataaatacaattagtcaaaatgttcacaatgggataatatgagtgcgtatggttaggtgttgccgttgtgtaatgggaaatagagaaaagacttgaaatgtcagcaatagagagttaagctactgtatatttatgtattagattatactatatggaattgctacttttacagctcaaaatggtcaaatattggagtttttatgtatttcaagctacttattgggaagatacttcaataggtaaattgtgggaataaatacccctatggaacgcatatgggaataaaatatcatttctgccccaaagcagtaacagttaaatcttcagtcttgtgaaagtaaaacaattttactagggcatattttcaatgttaatgattttaaaaaaatttagcttggactcagaattcatttttctatagtagcagctgtatatgaggttataatatctatagtgtagcccacaaaagcctatttaacccacagtgcagctgaaatacagtagtaatttatccacataaaatcatgttcataataatgttgctttagggagtcaaatgcagagtttatttctaatggaaacattagaaaacatggctctcttgggactagagcccatgttccttttgtttttcattttagtgtgggtaaaactgctttaagaacgtttgtggtgccacaaaagcatgttttgcttcaagcattcatggactggt

SEQ ID NO: 550317 - DNA, 1542 bp, Homo sapiens
tgggaagttataattgtattttgcattgtgagaaggacaggagatttgggtgggagcaagggcggagggcaaaatgatgtggtttggatatttgtctctacccaaatctcatgttgaaaggtaatccctgttttggaggtagggcctggtggytaagtatttggatcatgggggcagatcacaggggccatcaccttggtgataagtgagctcttgctctgagttcacctgacatctgatcatttaaagtgtgtggcaactccccccgactcttgctcctgctttgccatgtgagctcctgttttgctcctgctctgacttccaccatgagaaacagcttcctgaggcatctccagaagcagatgctggcactatgcttgctatatagctggcaggactgtgagccaaataaacctctttaaaaacaaattacccagtctcaggcatttatttatagcaaggcaagagtggcctaatacagatgatgtgggtagagccataccatgcagtgctatcaggcattggaatgtctgtacaccaaaaacactttatgacataggaaagacagtgtgtcagttaaatgtacacaatatagacatctaaaaattataactgcatacatatagtgatcctatttttatatatttttaaaacaagtaactgattccaaaattcttagtgtatttttgcaattactcatgacatttattattgctatctttctacattttgtgcaatgtcaacaataaatttgtattacttttatcacacaaaacacatagaatgtggctggaatataggagatgctaaataaatagtgtttaaatataaatacaattagtcaaaatgttcacaatgggataatatgagtgcgtatggttaggtgttgccgttgtgtaatgggaaatagagaaaagacttgaaatgtcagcaatagagagttaagctactgtatatttatgtattagattatactatatggaattgctacttttacagctcaaaatggtcaaatattggagtttttatgtatttcaagctacttattgggaagatacttcaataggtaaattgtgggaataaatacccctatggaacgcatatgggaataaaatatcatttctgccccaaagcagtaacagttaaatcttcagtcttgtgaaagtaaaacaattttactagggcatattttcaatgttaatgattttaaaaaaatttagcttggactcagaattcatttttctatagtagcagctgtatatgaggttataatatctatagtgtagcccacaaaagcctatttaacccacagtgcagctgaaatacagtagtaatttatccacataaaatcatgttcataataatgttgctttagggagtcaaatgcagagtttatttctaatggaaacattagaaaacatggctctcttgggactagagcccatgttccttttgtttttcattttagtgtgggtaaaactgctttaagaacgtttgtggtgccacaaaagcatgttttgcttcaagcattcatggactggt

SEQ ID NO: 550318 - DNA, 1542 bp, Homo sapiens
tgggaagttataattgtattttgcattgtgagaaggacaggagatttgggtgggagcaagggcggagggcaaaatgatgtggtttggatatttgtctctacccaaatctcatgttgaaaggtaatccctgttttggaggtagggcctggtggctaagtatttggatcatgggggcagatcacaggggccatcaccttggtgataagtgagctcttgctctgagttcacmtgacatctgatcatttaaagtgtgtggcaactccccccgactcttgctcctgctttgccatgtgagctcctgttttgctcctgctctgacttccaccatgagaaacagcttcctgaggcatctccagaagcagatgctggcactatgcttgctatatagctggcaggactgtgagccaaataaacctctttaaaaacaaattacccagtctcaggcatttatttatagcaaggcaagagtggcctaatacagatgatgtgggtagagccataccatgcagtgctatcaggcattggaatgtctgtacaccaaaaacactttatgacataggaaagacagtgtgtcagttaaatgtacacaatatagacatctaaaaattataactgcatacatatagtgatcctatttttatatatttttaaaacaagtaactgattccaaaattcttagtgtatttttgcaattactcatgacatttattattgctatctttctacattttgtgcaatgtcaacaataaatttgtattacttttatcacacaaaacacatagaatgtggctggaatataggagatgctaaataaatagtgtttaaatataaatacaattagtcaaaatgttcacaatgggataatatgagtgcgtatggttaggtgttgccgttgtgtaatgggaaatagagaaaagacttgaaatgtcagcaatagagagttaagctactgtatatttatgtattagattatactatatggaattgctacttttacagctcaaaatggtcaaatattggagtttttatgtatttcaagctacttattgggaagatacttcaataggtaaattgtgggaataaatacccctatggaacgcatatgggaataaaatatcatttctgccccaaagcagtaacagttaaatcttcagtcttgtgaaagtaaaacaattttactagggcatattttcaatgttaatgattttaaaaaaatttagcttggactcagaattcatttttctatagtagcagctgtatatgaggttataatatctatagtgtagcccacaaaagcctatttaacccacagtgcagctgaaatacagtagtaatttatccacataaaatcatgttcataataatgttgctttagggagtcaaatgcagagtttatttctaatggaaacattagaaaacatggctctcttgggactagagcccatgttccttttgtttttcattttagtgtgggtaaaactgctttaagaacgtttgtggtgccacaaaagcatgttttgcttcaagcattcatggactggt

SEQ ID NO: 550319 - DNA, 1542 bp, Homo sapiens
tgggaagttataattgtattttgcattgtgagaaggacaggagatttgggtgggagcaagggcggagggcaaaatgatgtggtttggatatttgtctctacccaaatctcatgttgaaaggtaatccctgttttggaggtagggcctggtggctaagtatttggatcatgggggcagatcacaggggccatcaccttggtgataagtgagctcttgctctgagttcacctgacatctgatcatttaaagtgtgtggcaactccccccgactcttgctcctgctttgccatgtgagctcctgttttgctcctgctctgacttccaccatgagaaacagcttcctgaggcatctccagaagcagatgctggcactatgcttgctatatagctggcaggactgtgagccaawtaaacctctttaaaaacaaattacccagtctcaggcatttatttatagcaaggcaagagtggcctaatacagatgatgtgggtagagccataccatgcagtgctatcaggcattggaatgtctgtacaccaaaaacactttatgacataggaaagacagtgtgtcagttaaatgtacacaatatagacatctaaaaattataactgcatacatatagtgatcctatttttatatatttttaaaacaagtaactgattccaaaattcttagtgtatttttgcaattactcatgacatttattattgctatctttctacattttgtgcaatgtcaacaataaatttgtattacttttatcacacaaaacacatagaatgtggctggaatataggagatgctaaataaatagtgtttaaatataaatacaattagtcaaaatgttcacaatgggataatatgagtgcgtatggttaggtgttgccgttgtgtaatgggaaatagagaaaagacttgaaatgtcagcaatagagagttaagctactgtatatttatgtattagattatactatatggaattgctacttttacagctcaaaatggtcaaatattggagtttttatgtatttcaagctacttattgggaagatacttcaataggtaaattgtgggaataaatacccctatggaacgcatatgggaataaaatatcatttctgccccaaagcagtaacagttaaatcttcagtcttgtgaaagtaaaacaattttactagggcatattttcaatgttaatgattttaaaaaaatttagcttggactcagaattcatttttctatagtagcagctgtatatgaggttataatatctatagtgtagcccacaaaagcctatttaacccacagtgcagctgaaatacagtagtaatttatccacataaaatcatgttcataataatgttgctttagggagtcaaatgcagagtttatttctaatggaaacattagaaaacatggctctcttgggactagagcccatgttccttttgtttttcattttagtgtgggtaaaactgctttaagaacgtttgtggtgccacaaaagcatgttttgcttcaagcattcatggactggt

SEQ ID NO: 550320 - DNA, 1542 bp, Homo sapiens
tgggaagttataattgtattttgcattgtgagaaggacaggagatttgggtgggagcaagggcggagggcaaaatgatgtggtttggatatttgtctctacccaaatctcatgttgaaaggtaatccctgttttggaggtagggcctggtggctaagtatttggatcatgggggcagatcacaggggccatcaccttggtgataagtgagctcttgctctgagttcacctgacatctgatcatttaaagtgtgtggcaactccccccgactcttgctcctgctttgccatgtgagctcctgttttgctcctgctctgacttccaccatgagaaacagcttcctgaggcatctccagaagcagatgctggcactatgcttgctatatagctggcaggactgtgagccaaataaacctctttaaaaacaaattacccagtctcaggcatttatttatagcaaggcaagagtggcctaatacagatgatgtgggtagagccataccatgsagtgctatcaggcattggaatgtctgtacaccaaaaacactttatgacataggaaagacagtgtgtcagttaaatgtacacaatatagacatctaaaaattataactgcatacatatagtgatcctatttttatatatttttaaaacaagtaactgattccaaaattcttagtgtatttttgcaattactcatgacatttattattgctatctttctacattttgtgcaatgtcaacaataaatttgtattacttttatcacacaaaacacatagaatgtggctggaatataggagatgctaaataaatagtgtttaaatataaatacaattagtcaaaatgttcacaatgggataatatgagtgcgtatggttaggtgttgccgttgtgtaatgggaaatagagaaaagacttgaaatgtcagcaatagagagttaagctactgtatatttatgtattagattatactatatggaattgctacttttacagctcaaaatggtcaaatattggagtttttatgtatttcaagctacttattgggaagatacttcaataggtaaattgtgggaataaatacccctatggaacgcatatgggaataaaatatcatttctgccccaaagcagtaacagttaaatcttcagtcttgtgaaagtaaaacaattttactagggcatattttcaatgttaatgattttaaaaaaatttagcttggactcagaattcatttttctatagtagcagctgtatatgaggttataatatctatagtgtagcccacaaaagcctatttaacccacagtgcagctgaaatacagtagtaatttatccacataaaatcatgttcataataatgttgctttagggagtcaaatgcagagtttatttctaatggaaacattagaaaacatggctctcttgggactagagcccatgttccttttgtttttcattttagtgtgggtaaaactgctttaagaacgtttgtggtgccacaaaagcatgttttgcttcaagcattcatggactggt

SEQ ID NO: 550321 - DNA, 1542 bp, Homo sapiens
tgggaagttataattgtattttgcattgtgagaaggacaggagatttgggtgggagcaagggcggagggcaaaatgatgtggtttggatatttgtctctacccaaatctcatgttgaaaggtaatccctgttttggaggtagggcctggtggctaagtatttggatcatgggggcagatcacaggggccatcaccttggtgataagtgagctcttgctctgagttcacctgacatctgatcatttaaagtgtgtggcaactccccccgactcttgctcctgctttgccatgtgagctcctgttttgctcctgctctgacttccaccatgagaaacagcttcctgaggcatctccagaagcagatgctggcactatgcttgctatatagctggcaggactgtgagccaaataaacctctttaaaaacaaattacccagtctcaggcatttatttatagcaaggcaagagtggcctaatacagatgatgtgggtagagccataccatgcagtgctatcaggcattggaatgtctgtacaccaaaaacactttatgacataggaaagacagtgtgtcagttaaatgtacacaatatagacatctaaaaattataactgcatacatatagtgatcctatttttatatatttttaaaacaagtaactgattccaaaattcttagtgtatttttgcaattactcatgacatttattattgctatctttctacattttgtgcaatgtcaacaataaatttgtattacttttatcacacaaaacacatagaatgtggctggaatataggagatgctaaataaatagtgtttaaatataaatacaattagtcaaaatgttcacaatgggataatatgagtgcgtatggttaggtgttgccgttgtgtaatgggaaatagagaaaagacttgaaatgtcagcaatagagagttaagctactgtatatttatgtattagattatactatatggaattgctacttttacagctcaaaatggtcaaatattggagtttttatgtatttcaagctacttattgggaagatacttcaataggtaaattgtgggaataaatacccctatggaacgcatatgggaataaaatatcatttctgccccaaagcagtaacagttaaatcttcagtcttgtgaaagtaaaacaattttactagggcatattttcaatgttaatgattttaaaaaaatttagcttggactcagaattcatttttctatagtagcrgctgtatatgaggttataatatctatagtgtagcccacaaaagcctatttaacccacagtgcagctgaaatacagtagtaatttatccacataaaatcatgttcataataatgttgctttagggagtcaaatgcagagtttatttctaatggaaacattagaaaacatggctctcttgggactagagcccatgttccttttgtttttcattttagtgtgggtaaaactgctttaagaacgtttgtggtgccacaaaagcatgttttgcttcaagcattcatggactggt

SEQ ID NO: 550322 - DNA, 1542 bp, Homo sapiens
tgggaagttataattgtattttgcattgtgagaaggacaggagatttgggtgggagcaagggcggagggcaaaatgatgtggtttggatatttgtctctacccaaatctcatgttgaaaggtaatccctgttttggaggtagggcctggtggctaagtatttggatcatgggggcagatcacaggggccatcaccttggtgataagtgagctcttgctctgagttcacctgacatctgatcatttaaagtgtgtggcaactccccccgactcttgctcctgctttgccatgtgagctcctgttttgctcctgctctgacttccaccatgagaaacagcttcctgaggcatctccagaagcagatgctggcactatgcttgctatatagctggcaggactgtgagccaaataaacctctttaaaaacaaattacccagtctcaggcatttatttatagcaaggcaagagtggcctaatacagatgatgtgggtagagccataccatgcagtgctatcaggcattggaatgtctgtacaccaaaaacactttatgacataggaaagacagtgtgtcagttaaatgtacacaatatagacatctaaaaattataactgcatacatatagtgatcctatttttatatatttttaaaacaagtaactgattccaaaattcttagtgtatttttgcaattactcatgacatttattattgctatctttctacattttgtgcaatgtcaacaataaatttgtattacttttatcacacaaaacacatagaatgtggctggaatataggagatgctaaataaatagtgtttaaatataaatacaattagtcaaaatgttcacaatgggataatatgagtgcgtatggttaggtgttgccgttgtgtaatgggaaatagagaaaagacttgaaatgtcagcaatagagagttaagctactgtatatttatgtattagattatactatatggaattgctacttttacagctcaaaatggtcaaatattggagtttttatgtatttcaagctacttattgggaagatacttcaataggtaaattgtgggaataaatacccctatggaacgcatatgggaataaaatatcatttctgccccaaagcagtaacagttaaatcttcagtcttgtgaaagtaaaacaattttactagggcatattttcaatgttaatgattttaaaaaaatttagcttggactcagaattcatttttctatagtagcagctgtatatgaggttatartatctatagtgtagcccacaaaagcctatttaacccacagtgcagctgaaatacagtagtaatttatccacataaaatcatgttcataataatgttgctttagggagtcaaatgcagagtttatttctaatggaaacattagaaaacatggctctcttgggactagagcccatgttccttttgtttttcattttagtgtgggtaaaactgctttaagaacgtttgtggtgccacaaaagcatgttttgcttcaagcattcatggactggt

SEQ ID NO: 550323 - DNA, 1542 bp, Homo sapiens
tgggaagttataattgtattttgcattgtgagaaggacaggagatttgggtgggagcaagggcggagggcaaaatgatgtggtttggatatttgtctctacccaaatctcatgttgaaaggtaatccctgttttggaggtagggcctggtggctaagtatttggatcatgggggcagatcacaggggccatcaccttggtgataagtgagctcttgctctgagttcacctgacatctgatcatttaaagtgtgtggcaactccccccgactcttgctcctgctttgccatgtgagctcctgttttgctcctgctctgacttccaccatgagaaacagcttcctgaggcatctccagaagcagatgctggcactatgcttgctatatagctggcaggactgtgagccaaataaacctctttaaaaacaaattacccagtctcaggcatttatttatagcaaggcaagagtggcctaatacagatgatgtgggtagagccataccatgcagtgctatcaggcattggaatgtctgtacaccaaaaacactttatgacataggaaagacagtgtgtcagttaaatgtacacaatatagacatctaaaaattataactgcatacatatagtgatcctatttttatatatttttaaaacaagtaactgattccaaaattcttagtgtatttttgcaattactcatgacatttattattgctatctttctacattttgtgcaatgtcaacaataaatttgtattacttttatcacacaaaacacatagaatgtggctggaatataggagatgctaaataaatagtgtttaaatataaatacaattagtcaaaatgttcacaatgggataatatgagtgcgtatggttaggtgttgccgttgtgtaatgggaaatagagaaaagacttgaaatgtcagcaatagagagttaagctactgtatatttatgtattagattatactatatggaattgctacttttacagctcaaaatggtcaaatattggagtttttatgtatttcaagctacttattgggaagatacttcaataggtaaattgtgggaataaatacccctatggaacgcatatgggaataaaatatcatttctgccccaaagcagtaacagttaaatcttcagtcttgtgaaagtaaaacaattttactagggcatattttcaatgttaatgattttaaaaaaatttagcttggactcagaattcatttttctatagtagcagctgtatatgaggttataatatctatagtgtagcccacaaaagcctatttaacccacagtgcagctgaaatacagtagtaatttatccacataaaatcatgttcataataatgttgctttagggagtcaaatgcagagtttatttctaatggaaacattagaaaacatggctctcttgggactagarcccatgttccttttgtttttcattttagtgtgggtaaaactgctttaagaacgtttgtggtgccacaaaagcatgttttgcttcaagcattcatggactggt

SEQ ID NO: 550324 - DNA, 523 bp, Homo sapiens
gggcccccaatctaaaaatctggcacatccaaggccgggcgcggcagctcacgcctgtaaccccagcactttgggaggccgaggtcaggagatcgagaccatcctggctaacacagtraaaccccgtctctactaaaaatacaaaaaaattagcagggcatggtggcgggcgcctgtagtcccagctactcgggaggctgaggcaggagaatggcatgaatccgggaggcggagcttgcagacagccgagatcgcaccactgtactccagcctgggtgacagagcgagactccgtctcaaaacaaaaacaaaaacaaaaaacaaaaaaatggcacatctgcaatgttccccttcatgtgtttctgaaataagtcatttagaattgaagagaaacctctgtaagactagtttggatagggggagggagtggggttggggggaaatgctgacaggaagaacaggtaatcaaccatatgacagtggtattcccaacagaattaaagacacgtgcccatgggggaaa

SEQ ID NO: 550325 - DNA, 523 bp, Homo sapiens
gggcccccaatctaaaaatctggcacatccaaggccgggcgcggcagctcacgcctgtaaccccagcactttgggaggccgaggtcaggagatcgagaccatcctggctaacacagtgaaaccccgtctctactaaaaatacaaaaaaattagcagggcatggtggcgggcgcctgtagtcccagctactcgggaggctgaggcaggagaatggcatgaatccgggaggcggagcttgcagacagccgagatcgcaccactgtactccagcctgggtgacagagcgagactccgtctcaaaamaaaaacaaaaacaaaaaacaaaaaaatggcacatctgcaatgttccccttcatgtgtttctgaaataagtcatttagaattgaagagaaacctctgtaagactagtttggatagggggagggagtggggttggggggaaatgctgacaggaagaacaggtaatcaaccatatgacagtggtattcccaacagaattaaagacacgtgcccatgggggaaa

SEQ ID NO: 550326 - DNA, 555 bp, Homo sapiens
acctgtgtgctggtgccatagttcactccaactccccagtgggagccagtgtccctkccttagggtgcgggcaagggtggagctggcaaagcaccaatatgccttcagggagaaagggctagggaaagaggagttgagacactgccttcaagcctttcctcatcatccctgtgtcaccacgaaataaatcatgcatcatgagcactaatggacttgtgttgtcactacctcttatcctcaaagtaagattgaagccaggggtggtagcacacacctatagtcccagctactcaggaagctgaggtgggagcattgcttgagcccaggagttcgaggctgcagtgagctatgattgcgccactgcactccagcctgggtaatagagcgagactctgtctctaaagtaatagtaataataataataataataaataaacaaagtaagattgaacaaccagaaagcagcccccatgtgtggctcctgcaaagaatgcgtggctgtggcccgagccagctttgtctcataaaatgtgttttgtatgctaagtaggctgc

SEQ ID NO: 550327 - DNA, 1504 bp, Homo sapiens
aggcgagtccaccccgtgctggacaggctgtcgtgactaaacgaacatgaacatggccatctgcctggagagggcaatgttatcatcaccaggaaaacccaagtaagctggtgaggccacagcaaatgcagagaaaagcccacagccattcgccgggcatgaagctatggattcgatgctacgcctgtcaccagcagccgttcctcatcctgtcgtgggggtgctcgtttcagggtgggtttaatcctagcatctattttgctctcattgtccactgaaattattccagcccaaccagacttgtgataggaacgagagttttatcagattttttatttcacgtttaggtttttcttcaaatagtattttgatgggggaagcaacacagaattaaataacaggttttttaggtttatttattttgaaaaaacaaaaaaagtattttttcattatagaaagtgatctgcctgtgacttataattagagcgagaaacaaaacatgggaaagaaatgtatttttgacatatatatgtatttcattatcaatatatatgcatatatatcaatatatcatatacatagagatatacacatgtatgtttacatatatcaatatatgataaatatcaatatatgcatagtgtgttcacatatacaaaatatacctattttgatatatattatacaactttacaaacaaggttggttgtaccgaaaccaaagaaaggaaggctggccgggcatggtggctcatgcctgtaatcccagcactttggaaggctgaggtgggcggatcacttgaggccaggagtttgagaccagcctggccaacgtggagaaatgctgtttctacaaaaatacaaaaatttgtcggctgtggtggcaggtgcctttaatcccagctaatcgggaggctgaggcaggagaatcccttgaacccaggaggtgaaggttgcagtgaaccaagattgtaccactgcactccagccagggtgacagagtgagactctctctcagttggaaaaaaaaaaaaaaaggaaggaagatggaccacagtactccactgtcagcctggtaatcaccatggcaatggacctgggattcctcatgtctggatgctgcttcactgagcacaggtggcttctaccacaytgctacattttaatcatcacccactggtgaggacactgaaggtcagtgcccttgtgacttacttgagattacctggctgggcttgaacccaggtctcctcactccaaatgtcacagtcttttcgttagctctgttgcctcccggtggcacacaattaccattttacaaacctcaaacttgtccccaagaggcaactgctttaactgtttgatgtcttttatcccccttgcaatggactctaatccacttttaaaagtgaatacctcaaatctgcagctttagggagatatattccaggtgctggctcggctgtctgctgattgataaatgccaagactgctcctgatttgag

SEQ ID NO: 550328 - DNA, 913 bp, Homo sapiens
ttgaactacacttccttccaagtgactaattctctatgttcaggtggttgaaaaactgaatggaaaagcttatggctctgtgatgatattagtgaccagcggagatgataagcttcttggcaattgcttacccactgtgctcagcagtggttcaacaattcactccattgccctgggttcatctgcagccccaaatctggaggaattatcacgtcttacaggtaataaacttttaaaaacttatcttttggagcatgtccctttaacttgactatccaagacacaactatgaaactcattatatggcttaattgaaaatacagaaaytgtttttaaaaaacgcacacacatattgctagaatctgtcaaaattttgctgattttttttttacattttccctaaaggttccaactatatacatccaaaaaataatattttataattctgtgttaagccagtgtgagcatgcataatcatggagctaaaacatatgtttaagattaaatgctttgtgggcgggcgcggtggctcacacctgtaatcccagcacattgggaggctgaggtgggcggatcgcttgaggtcaggagtttgagaccagcctggccaacatggtaaaaccccacttctactaaaaatacaaaaattagcagagcatggtggcgggtccctatactcccagctactcgggaggctgaggcaggagaatcactagaactcaggaggcagaggttgcagtcacctgagatcacgctactgcactccagcctgggtgacagagcgagaccccatctcaaaaaagaaaaagattaaatgcactaacttctataatagggacacacacagtgttttaagatacatatctttttatactaaataaggcacagaataattttatcttatattccttat

SEQ ID NO: 550329 - DNA, 913 bp, Homo sapiens
ttgaactacacttccttccaagtgactaattctctatgttcaggtggttgaaaaactgaatggaaaagcttatggctctgtgatgatattagtgaccagcggagatgataagcttcttggcaattgcttacccactgtgctcagcagtggttcaacaattcactccattgccctgggttcatctgcagccccaaatctggaggaattatcacgtcttacaggtaataaacttttaaaaacttatcttttggagcatgtccctttaacttgactatccaagacacaactatgaaactcattatatggcttaattgaaaatacagaaactgtttttaaaaaacgcacacacatattgctagaatctgtcaaaattttgctgattttttttttacattttccctaaaggttccaactatatacatccaaaaaataatattttataattctgtgttaagccagtgtgagcatgcataatcatggagctaaaacatatgtttaagattaaatgctttgtgggcgggcgcggtggctcacacctgtaatcccagcacattgggaggctgaggtgggcrgatcgcttgaggtcaggagtttgagaccagcctggccaacatggtaaaaccccacttctactaaaaatacaaaaattagcagagcatggtggcgggtccctatactcccagctactcgggaggctgaggcaggagaatcactagaactcaggaggcagaggttgcagtcacctgagatcacgctactgcactccagcctgggtgacagagcgagaccccatctcaaaaaagaaaaagattaaatgcactaacttctataatagggacacacacagtgttttaagatacatatctttttatactaaataaggcacagaataattttatcttatattccttat

SEQ ID NO: 550330 - DNA, 1785 bp, Homo sapiens
tcaaatcaactttttgtgtttcatggaaataggaattaaaaatgcttagatttttgcatgccctttactaaataataatttgaaaataaagtttaaattagtagtgttttatattgtgtttgccatttagtaagccacttgagaaactttgttttctcttgttgtatctccaggagcaaacagcttcattgataagtatatattttaaatgtgaatggtagaaatggaaagtaataaaaaagagatcacacatagatagctttagtctctttttattaaattatttaagaaatatgatattactcagaggactaaatgtataaacacgaatggcttaccacatcagctagaaggcagttagactcattatggccagaactatgctaaacgactttcacacattacacatatgatacttaaaacaaagaaggttatattgtaattaccatgttagaaatgagatgatctcatgctgtgaaatttcactaaatttaaatcactcaacttccccaatttaaaaatggcagcatttaaatgcaaatatacatttgtctaatcccaaagcccatgcatttaattactatgcaatatcartaatcatgtttggtaggaaagaatattaaaggaaaactattaactttgtcagattttattagtatagaattaagggaaaacaaaatgagttttaaatggtgtgaattaatgaaccagtgaagggtagtcaacattacaggagtatgaaaagcgcattatagttgtgatcaataaactagcagagcattatgtttacaggagcagttacattagaaaaagaataattcgaaagttgttttatgaaatttcagcctctcttccagaacagatgtgattgctaaaggaaataatataatctaattatattattaagtaatgaatatagaagagtaatcaataatcactctgaatttacccagtttatctatgaaatagatatgattaagatactcatgacaaatacaaattaatgtttatactcttataagtatcttaaagaaggcaaaaacaaaattcaagttattgaatatgcaattttcacactgaactaactataactgtttagtccaagaatgttctgttggcccaagagagagacttcagcctaaaccactgaattgaggaaaattatcgaactgaatgttctcagcaaatattttcttcaggtttcaacatgctggatctcatttaatacctaaattgtcattgttttctttctattagatgttaaatcatgcagaaattttatttcatctttttgacacattttcctgctcctgcaagcatagaagattgttttctttgccaaaacttgcctaacacatgaaaaaatttttcaaagtagctagaggcattaaggcttattttgttgttgtggattttttttagtaatctgataaggaatgtagatatgattaaataaaaattagtgtattttgagcatacgaaattatatctcatttttaaaaataacagggagacttagctaggactcactgagcagatggaagcattgatgatcaaaaaatgtaatttatgtacataaaactgcataatatcccagaataatatcaaatatacataaagttatttgatgcttttattgaaatgtattaaaaacaaatggagtaggaaataagaaattgggtatttgggacatcttcattgtgttttgtcatgtatttgccagtgttaatttcctgttaatcgatagtagaaattacaaccttctattgctagaggtctaattga

SEQ ID NO: 550331 - DNA, 1565 bp, Homo sapiens
ttgaatatatctttacagagtgtcaggggatttatttccactctctggcttggaatgtgtctttatagagtgtccaggatatctaatggacatctgagtaacaacagattttttttcactagaactatttgaaatgccatcaaattagaggacctatatgttgctatgtggaatgtcatgacaatcaaagttgctgtatgtcatagaaggatagttaaaataatcttgamgctagagagtgataagccactgcccctttaattccttttcttttgatgaaagacaaactgcttttgattctccctgctgagtatctaaaagaacaccttcataaaatcaatagctgcctatcatatgcattgatttgctccagtgaagtcaccccatccagcagagtagaatagtcagggaaaatcactgtgtttacggtaacccccgtcatctgccttgactcatctggatcttacgtagaacagacaggtaaagacacaggaatacactggtgagagaataaccagtattattaaggagctcagtggtggctatcttttgtaagcaaaagctgatgagaagaaatgctgctttagaactggctaccttaacagtaatagacaagataagattcaaagaattaatagtgaccaggtggtggtggttaatcaaatgaaaacaggtgaatctaattatcataatgagtagagctctaaaactggcagttagaaaggcttgacccatggagaactatggagatattaaatggaacatggagttcccaggggtaagagacacggtcactcaaaagagatattgttttatgtagcagccacagtaaatccaggatgaatgattaggaagcagtagcagccttcccaatgaaccccctcacctggaggtttcagatttgaaccagttctcagcccagaagcccatagaccaaagagaagtctggccctgaggagagatactggaacacaatgcaaatatacacaataataattctgctattctttctacaaagtgatctataaacttttactcaggtaaacatataccaggaaaattgcagtactaaaacatacaaaaatgtacaaaaacctgttgtacactgtgtccacctggacaatgataactgaagacacaaagcaatatcatggctcccatgtcagagtgaaaatggagagtgctctcttaatctgttttctattgcttataacagaatacctgaaagtgggtaatttataagaaataaaacctatttttgacatttctggagtctgggaagtccaaggtaaagggggcatatctgttgagagccttcttgctggtggggactcttcagaatcccaagatcagggcatcccatcgtgagggggctgagtgtgctagttcagtcctctcttcctcttttataaagtcatcagtcccacccccgtgataacccattaatccattaacccattgacccctgtgatataacgtggatgtttgtctcctccaaatctcatgttgaaatgtgattctcaatgttggaggtggggcctagtgggaggtaatggatctcacta

SEQ ID NO: 550332 - DNA, 632 bp, Homo sapiens
tgagtcctttataaaatataatgatcacaaatatcttctttgatttgatcttgtcttttttgagtcacttaatgcttttttttttwaatttaattttattttttttaagacagagtttcactcttgttgcccaggctagagggcaatgacacgatctcagctcaccacaacctccacctcccagattcaagtgattctcctgcctccgcctcctgactagctgggattacaggcatgagccatcacacctggctaatttcgtatttttagtagaggtgggacttctccatgttggtgaggctggtctcaaactcctgacctcagataatccactcgcctgggactcccaaagtgctgggattataggcatgagccactgcacctggcctaatgtttctttaatagacagagttcttaattttaatgtactctaattacaaaaaaagacaagcctttcttctttgtttagtagtgtcatccttttcttaagcaagtgaatatacatgtggctgttttttgactgatttgtctgtatatttgagacaaaaccacactgtatcaattcttcagtttaataataaaaatttgttctaacactgtattggatagcatagatcatttgcatttctata

SEQ ID NO: 550333 - DNA, 632 bp, Homo sapiens
tgagtcctttataaaatataatgatcacaaatatcttctttgatttgatcttgtcttttttgagtcacttaatgctttttttttttaatttaattttattttttttaagacagagtttcactcttgttgcccaggctagagggcaatgrcacgatctcagctcaccacaacctccacctcccagattcaagtgattctcctgcctccgcctcctgactagctgggattacaggcatgagccatcacacctggctaatttcgtatttttagtagaggtgggacttctccatgttggtgaggctggtctcaaactcctgacctcagataatccactcgcctgggactcccaaagtgctgggattataggcatgagccactgcacctggcctaatgtttctttaatagacagagttcttaattttaatgtactctaattacaaaaaaagacaagcctttcttctttgtttagtagtgtcatccttttcttaagcaagtgaatatacatgtggctgttttttgactgatttgtctgtatatttgagacaaaaccacactgtatcaattcttcagtttaataataaaaatttgttctaacactgtattggatagcatagatcatttgcatttctata

SEQ ID NO: 550334 - DNA, 2058 bp, Homo sapiens
aaaaagaaactgcattatgaatacaaaggtgttcttggttctcttccaaggtcagctatcatctttgctttgtgtactgggtaaatcacttaatgtttttttatatagaaatgaatataaagttaaatggtagacatcaaactacctactaaattaagtgactgtcaaaactgtgactgttatttttctcttaaacagaaattctagtcaagggacaaaataattattaaatataataatgattatggtgataactatcatttatgaattgcttattaattgtcaagcttgctaagtaccatatatgcagtttatgatttatccttattgacttaaaatcaagaatgaaatccaaatccactccatccagattcctcacttttatcagttctcctgtatcatcagctgtatatgtctatagctgtatctatatttattcatctatgtatctagatacctatacatgtgaatacacaaacctatataataaaataggaaaaattttatacagtttaatttgtgattaagataattatatacattgtatatgtgcctataaatgtgatttttactgcaaaaaacattctagattatttattaaatcaaatacttgaactattttaaaagttaattatagttccatatgtgaatacattttaagaactaaaagaaatgaaagcattttaacttaaatgatgtgtcactaaacctatttattaagctattatcatgtagtagctttatagctgacaatctctttagaaawgcatgtgataaccagtgatgtggtcaagatttcaataaaaagcatattcctttcattaatatgtttatagaatgtctaatattgatgaggatcttctatgtagaattatatgtaaaaggacttatgtcttattttaccaaaataaaatagtgtttcaaaggtactgttatagtttggctgtgtctccacccaaatctcatcttgaatttttaggtctcagaattcccacgtgttgtgagaaggacctggtgggagataattgaatcatggggacgatttccccccatactgttctcatgggagggaataaatatcatgagaattgatggttttataaggggttccactttcactcctctctcattctctctttgctggctgccatgtaaaagacatgcctttcaccttccaccatgattgtgaggcctccccaggaacctggaactgtgagtccattaaacctctttttctttataagttacatagtctcgggtatgtctttatcagcagcatgaaaacggactaatacaggtactattcaaaatcaataattatttcaattgcttacttaattgactaactttgtttaatttatgtgatatttaaacagcttgatagtttttatttgagctagtttatctgctagtatttttatgtttttatgtatttcatggtaattatatatttctcctttcttctttttcttcctgtctcccttccttcttttcctattttactccctcccttccttcatgtggacagaatatggtgatcaaatttaatttgaattttaagtgataattgttaaaattagttaagattcaattaaatattacagtaatttaacccagtgtttaccaatatttggctatgtagcagataactatgttagcaaataaatctgtgaccttaattcactctttcaataaataaagttttaggaaaatcatttcttaaaagagtaattaaaattaggaaaaaaatgtaatatccccctcccttgcttttctgctgtatttgaactttcattgcattctgccctcatttataactagataaaatgaatataattcattattgctagctttattattagagagttaagtagaagaactaatgggaaaaaaaaataacagcacaccgttccactatttactgtttcattcttgggattttgtgtaactcattatttctaagtttaaaacttcccaagccatttttctaacaaccttggccagcgtgcttgaggtaggtaacctgctttaaattgctttgattaactcatgaagaaa

SEQ ID NO: 550335 - DNA, 495 bp, Homo sapiens
gactagttggagatttgtgcccaagttagtaaacaagttaggcaaggwacacagatgcactggaacatgctctatttcaaaaaaaaaaaaaattacatcttttgccattgcctcatcatcttcatataatccaagaactttactggggtccaggctttcttagctactgctgttgatgtattcaggaaaaaccatgttaaatgctgcaaagaatcttagccagaagactgagtatttttctggtcattcttgctgggaaacctttagtgacaggaagttgtttatattcattcagtagcaggacactcctcaataactgtgttccaattcatttcaggtatagaaactcgagatttatttatttatttatttatttatttatttctgagatgcagtcttgctctatcaccaggctggagtgcagtggcgtgatctcagctcactgcaacctccgacatgcttgttcaaatgattctcttgcctcagcctccggag

SEQ ID NO: 550336 - DNA, 557 bp, Homo sapiens
ttaattcctttttgatggcaaacaatcactcaatctggattagactctgacttactactctgtcccttcctctaggcttggctcttacaagaatttcaagatctgattgcgcagtgctggttgcattttcctgactatacaatgctcctggactttgtggatgctgttcctctgtttggaataaccttactctttccttctccctactccacgcttcatcgtcctttatgaaaagtgctgggcatgagcaaactccatctcactatgaactcatcaggcagcatcaaatgtctctcttctgtgctcacatcaagtatttattccctaaatgtctccctagcaactagagtgagtccccacttcataaactgacaaaaaattgcctctgtatatagtttttaaacttatgtagaaygaaagttttaatttgattttttttcacacatacttttcctttgccttatatttgcaattttctaaattcaaagtattatctctttcaagctgtatggacactaaattcttctttattaaagtctgtgtaaaaaaatagagtg

SEQ ID NO: 550337 - DNA, 654 bp, Homo sapiens
ttttcagtgatctttcatccttgcatgtgggccatatgttcttgtttctttgtatgtctcacaattttttgttaaaagctggacgtttgaaaaatatatttcaactgtagaaakaagaacctcccctttctctgaaagggaaaatcatggtaatttaaatctctgtgtgtatgcttacttggatattagcatgattcttttggaaagctgcaaaagaaagtagagaagtgaagtcttctattgatcatatatggccttcacaaacccctttttagtttgtattgcattcttgaaaacttgttggcatgttagacaactttacaggcagacagaaaagcaagaataaatcaaatgcaaatttagtagaaggaaagaaacaatgagtattagagcagaaatgaatgaaattgagactaaaataatacagaagatcaacaaaatgaaaagttgactttttgaaaagataaacaaaattgacaatctttcagttagactaagaaaatgagaaaaaactcaaatatataaaatcagaaacaaaaaaggagacacaacaataaagaccacagaaatacaaagaatcattagagactatgatgaacaactatatgtgaacaaattggaaaacctagaagaagtggataaattcctggatac

SEQ ID NO: 550338 - DNA, 1171 bp, Homo sapiens
tgggaggttgaggcagggggatcactggagcctaagagtttgaggccgcagtgagctatgatcacaccactgcactccaacctgggtaacagagtgagactctgcctctaaataaaataaaaaataataaaaaggaaaaaaaagcagtataggtattaaaaaaagaattaagtaatgccaggagcagggagggataactattatagtaactgctagttaatagaagagtgaacacagggacatttccatgaactgacaacccagagagcatcactctttaggtatctggagtctgccaagggtgagatccagatgcacttaaggcaagtcctacaaaacacaggcagaacgaggtcttcattgtgctggagagctgagagatgggatgtcagataggatttgaaggaaagcaggggcctcccttggacgagaattggtgacttcggagaagccagtcaggcagtgagagcactaggttggaagagatgagcttaggggaatagaataatgcctggcatcaagtactcatctagttttatttcctaaattgctgagttttttgtttgtttgtttgtttttctttttagagagacagtctcactccgtcatccaggctggagtgcagtggtgcaatctcggctcactgcaacccccgcctcccaggttcaagcaattctcctgcctcagcttcccaagtagctgtgattacagacgcgcaccaccacgctgggtgcgttgttcatgcctgtaatcccagtactttgggaggcagatcacgaggtcaggagtttgagactagcctggccaacatgatgtgttcctatactaccctctcatgtatccccctaaccagcctgtctgcagctccaagttactcccattgaagttggtgttcacaacaccatttgtgatgcagttgacatctcactgcggagatgtggtgcatgagaaytgaggggcaaaaatgcatctcaaagcccaagtattaagagagtcttctgccttgccacctggcaccagcagaaatgacaagtggttaaaaaaaaaaaaaaaaaaaaagcctttttcccaggcactggtttctttttttgcagcaataactatttggctaagctaaaacgtgtctctgggtacattaatgtttcagcttacattctatggctactgcttt

SEQ ID NO: 550339 - DNA, 510 bp, Homo sapiens
attgtgccactgcactccagcctgggcgacagagcgagactctgtctcaaaaacaaacaagcaaacaaacaaaaacaaaacaaaacagaacaaaaaaaaagctaccatgtgggaataaaagatgtttccaggaaagagagtccacaacaataatgacagctctgatggattaagcctttcatatgcttggcactccctgtacctaatctccattaatccactcagatgatgaataacgtggggattcttatcttcattttactggagaaaagactgaagcttgaagaggcaaaggaacatgccaagagcatgccatgaacaaatcgtcaagaatcctgaagtggctttctgggaaaaatcaaggctkttttgggactaaatgatccagagatttgcttccattttctaaaagggattgtgtatagaggcaatgtctgaatgtgtatctatcacctttatcagtcatattattgaaatttctgcatactcaggcttaaaattgcacattgg

SEQ ID NO: 550340 - DNA, 980 bp, Homo sapiens
ttttagtagagatggggtttctcgatgttggtcaggctggtctcgaactcccaacctcaggtgatccgcccgcctcggcctccaaagtgctgggattacaggcgagagccaccactcccggccgctgtgtggtatattatggtgtggacctatcacattgcgttcatctgttcaccagttgatggacattaagttgggctcaatgtttgctgttatgaatatgctgctgtgtacaagtctttttctgcacgtatttgcatttctcctggttgggtacctaagagtggaattgccgggtcatatgagaagggtatgtctccattagtaagaaattacaaaactgtcttccaggtggctgtatgctttcactgctcgccagcagtgtatgtgagttccagttactcatatcttcctcagagctcggtatcgtcagtcttttaaatttgtcattctagtgcaggaccctgatgacatgatcccgaacatctatttaatgtgcttatttggcatctgtatgtatctycaaatcttttgcccatctttacattttaaaaaaattgacttgatattgacttgttaagagttggcacctcttttttgggtcaggattaaatgagataatatacgtcaaacgccttgcagtcagagattgacccattggccctcctggtgtacccctctctgcgctcagggtctctggctctctcaggtggctgttcaaaccccacctcaccccagtgagtccccgacccctgccccctggcagacacatgagtcacacactctcgaccaacacagtgactgactagcataattccatactgacacatctctgtgtgttcacaacacagtcttcctgtttgcctcaggccagaggcagtgcagcccagccagggagccttgggtctggagaaaggagccctgagtcccaattctgtccttgtggccacttgctgtgtgaatgggggcatatcactctc

SEQ ID NO: 550341 - DNA, 629 bp, Homo sapiens
aaaaaaaaaaatttgttttccatttcatccaaattatctaatttgttgatatgcagtttttcattgtattctcttataatcctttttatttctgtaaagtcagtccttatttcccttctttcatttttgattttagtaatttgagtgcgttctcttttttcttagtccatttaggtaaatgttcatcaattttgttgatttttttttcaaagaaccaacttttggtttcgctgattttctctatgtttttctgttccccacttcattaatttttgctctaatctttgttaatccttcctttgatggctttgggtttaattttcttttctttttttttttttttaggggtctacagctatrtgtttccttcaaagcactgctttagtttctattttatttttatttacttaaatttttttttttaaagacagggtctcactatgctgcccaggctggtctcagactcctgggctcaagcaatcctcctgcctcagcctcccaaattgctgagattacagatgtgaggcaccgcacccagcctagtttcatcccataaactagggtatattagtatattggcatattttggtatattgtgtcataatttgcattcatctcaaagcgttttc

SEQ ID NO: 550342 - DNA, 629 bp, Homo sapiens
aaaaaaaaaaatttgttttccatttcatccaaattatctaatttgttgatatgcagtttttcattgtattctcttataatcctttttatttctgtaaagtcagtccttatttcccttctttcatttttgattttagtaatttgagtgcgttctcttttttcttagtccatttaggtaaatgttcatcaattttgttgatttttttttcaaagaaccaacttttggtttcgctgattttctctatgtttttctgttccccacttcattaatttttgctctaatctttgttaatccttcctttgatggctttgggtttaattttcttttctttttttttttttttaggggtctacagctatatgtttccttcaaagcactgctttagtttctattttatttttatttacttaaatttttttttttaaagacaggktctcactatgctgcccaggctggtctcagactcctgggctcaagcaatcctcctgcctcagcctcccaaattgctgagattacagatgtgaggcaccgcacccagcctagtttcatcccataaactagggtatattagtatattggcatattttggtatattgtgtcataatttgcattcatctcaaagcgttttc

SEQ ID NO: 550343 - DNA, 579 bp, Homo sapiens
cttgaactcctggcttcaagtgatcctcccaaaatgctgggattataggtatgaggcacaatgcccagcctacttgtctactttctacggttattggaaaaatcaaatgagattgatatgaaatgtttcataatctatagaatgccatgcaaatataaatcgttattgctcatgtttgctgatttacatattagctaagcctgtgactctgtaacactatattagacttccataactgggttagcactttgctgatccatgaayatttgtcatggtgcatttgctttttagccagatgttggttcaactctaggtttgtcatgaaaaacaataaagacgctaaatgcaagagcatctatttatcgctcctgatgcaagggatagagtcaactttttatctaaagggccagatagtaaatattttagcctttgcctaaaatacagtctctaacttctatttagctctgcccttctagggaaagcagccatagataatatgtaaatgaatggacacagctctcccaggttggagtgcagtgactcaatctcagctcactgcaacctctgccttccaggttc

SEQ ID NO: 550344 - DNA, 640 bp, Homo sapiens
ttaaaaattaagtaaactaaatctttaagtagctacaaaatgaataaaataagaattaaaattatattaataaaagtggtaacacattaatttaacattaatttaaaaatacttaacaaawcctagatttttagttgttgtatttatcccttgaacaatgagtagaaaacttttagccagtgtgactaaaaacaaagagaaaccccaaaaagaaataaataacattaattacatgaaagatgagctggtgaaaatgtggattaaatgaaagattcataggagaatttaactttatacagcagtatgcttataaacctatactaagtgaatgctttttcaaagaaaatataaacttacaatattgttttgaggaaagggggaaaattggaaagcacaaattgtcagagaatatagtaaaaattttgactcctacagtcaccaagcctgagctctagtatcatgtgtactataaaaattttaagaaatatgtaaattcatgttgtataaactgtctcagaacatagaaaaaaggtgcttttcacatctacctacaaacctagagtaacctgatattaaaataattcaggtaagcacatgtacccactaaataaattatacacatatctttgaaaatcatgaa

SEQ ID NO: 550345 - DNA, 1658 bp, Homo sapiens
gtattactgtcatcgacatacacaaaataacgcataaataacttcactctgcaaaacacacagctcttctttcaatgccttcaaattgctactattacaaatcatcaagttatcttccaaatggataaaaacaacatggtgagccaaggttcacatgtagccattaggacttttttacgaaataaaattaggtatagtttataagtaaatatattaatacgaagctgggaaaagttctactcacgtggtttaactttgttctgttgaagaatcttcaactccaagactttgactatgttccccaaattactgaaaatatgtttatgtcagcctagtgcaaacttttaactaagaaacaggtacaaagaggtgttcgatttttgttttctttgaatataaacagaatggagttccagcactttaggtgggattcacatgttcttggcccatgtctgcttcagaaacaggacagggaaacaggacagggctccagctcccaggacaggtgaggacctggaaatgagggagaaaggacatttggggggaactccccaaaagtgtgctaagggaatgagcaaagcacagggatgagaatggcaggtgcactggtccatggggtattggggtcacctggaggatctgcctcacatctacttgaaagactgaggtggagactgctctggatttggatccaggaaagtctaaaatctgcaagaatcctggccagttctgccactaacaatctctccccataggtgacttcattcaaccccatggttgaatgtgtcagtgagttgctggaacctctgaaatatttgggtttggctgtctgtaaaaagaacggataaaaaagcaacctataaagacataagtttattttatgtcatctaaaagaattccagagacagcaygcaggatgggatgtgatcatcaaggtatgtgtattggtctgttctcatgctgccaataaagacataccagagattgagtaatttataaaggaaagaggtttaatggactcacagttccacatggctggggaggcctcaaaatcatggtggaaggcgaggtggagcaagtcacatcttaccaggatggcagcaggcaagggggcatgtgcagggaaactgcccttcaaaaaaccatcagatcttgtgagacttattcacgatcacaaaaacagcccagaaaaacctgcccccatgattcaattacctctcaccaggtccctcccatgacatgtggggattatgagagctacaattcaagatgatatttgggtggggacacacccaaaccatatcaggatgcaagatccaaggaacaaggcaattgtcaaggacacaggatttctccatcgaactctggtatccacccacacatcccctgggcagaccaagctgcatagtaagtgctcaataaattgaatgtttgttgaattaactaaatattttaaatgcagaatcagacatagggttaaagagctgaaccccagcattgcccctaactaatcaggtaacatgatgcatgctacttgatctctgtgagtcaatttattgttctaggattttctggtgatgatttgaggaagacaggcatgtagagtggccagcaatgctgctggtctcctgacctctgagttgggtttcacttcactc

SEQ ID NO: 550346 - DNA, 1658 bp, Homo sapiens
gtattactgtcatcgacatacacaaaataacgcataaataacttcactctgcaaaacacacagctcttctttcaatgccttcaaattgctactattacaaatcatcaagttatcttccaaatggataaaaacaacatggtgagccaaggttcacatgtagccattaggacttttttacgaaataaaattaggtatagtttataagtaaatatattaatacgaagctgggaaaagttctactcacgtggtttaactttgttctgttgaagaatcttcaactccaagactttgactatgttccccaaattactgaaaatatgtttatgtcagcctagtgcaaacttttaactaagaaacaggtacaaagaggtgttcgatttttgttttctttgaatataaacagaatggagttccagcactttaggtgggattcacatgttcttggcccatgtctgcttcagaaacaggacagggaaacaggacagggctccagctcccaggacaggtgaggacctggaaatgagggagaaaggacatttggggggaactccccaaaagtgtgctaagggaatgagcaaagcacagggatgagaatggcaggtgcactggtccatggggtattggggtcacctggaggatctgcctcacatctacttgaaagactgaggtggagactgctctggatttggatccaggaaagtctaaaatctgcaagaatcctggccagttctgccactaacaatctctccccataggtgacttcattcaaccccatggttgaatgtgtcagtgagttgctggaacctctgaaatatttgggtttggctgtctgtaaaaagaacggataaaaaagcaacctataaagacataagtttattttatgtcatctaaaagaattccagagacagcatgcaggatgggatgtgatcatcaaggtatgtgtattggtctgttctcatgctgccaataaagacataccagagattgagtaatttataaaggaaagaggtttaatggactcacagttccacatggctggggaggcctcaaaatcatggtggaaggcgaggtggagcaagtcacatcttaccaggatggcagcaggcaagggggcatgtgcagggaaactgcccttcaaaaaaccatcagatcttgtgagacttattcacgatcrcaaaaacagcccagaaaaacctgcccccatgattcaattacctctcaccaggtccctcccatgacatgtggggattatgagagctacaattcaagatgatatttgggtggggacacacccaaaccatatcaggatgcaagatccaaggaacaaggcaattgtcaaggacacaggatttctccatcgaactctggtatccacccacacatcccctgggcagaccaagctgcatagtaagtgctcaataaattgaatgtttgttgaattaactaaatattttaaatgcagaatcagacatagggttaaagagctgaaccccagcattgcccctaactaatcaggtaacatgatgcatgctacttgatctctgtgagtcaatttattgttctaggattttctggtgatgatttgaggaagacaggcatgtagagtggccagcaatgctgctggtctcctgacctctgagttgggtttcacttcactc

SEQ ID NO: 550347 - DNA, 1173 bp, Homo sapiens
cctttaatgtgaagaaagaaggaaaaaaaaaaaatctgccctgtcaaagccacacaagggaattctcttaaaataaacagctaaacttaacggcaggcttttctttccatggaaatattttaaatgtatataatgttagatggctgctaaaaaaatgacaagtgtctgttttcattaaactccccaagagtatggatctaattgacagcctttctgaggccctgaggagcttccagcttcagggtttccatggcaacgtgtccccactgctagagctctactgctcacagtcatcatttacagggacccacattttagacactcctttaagctatccaggaacttcactatcccaaagggtaacaaattcaattttccaagcaggtaaaatttcccactttggggctaagcttccacttccaatttctaagaattctttgttcaatttatgattgaacaaagatcaatttgatatattaatttatgcatttctttctttcagtctggctctgtagcatacttcttgtacctttaaggctgtaggtcttaaacttcatggttgtctttcatcttcttccaaaggagtaacattgcaccagaatctgtccccctgggaagtaacgcttgccatgactagtcatctaagtcacaacaaactccaggctcaccagtccccaggtaaggtagggagaggttagaggtaggacttccacctgagtgcctggtccctgggctgataggagctggctgcattccagcccactttccactcacatgccagtctgaggggctgtgtcagccaagaacggtgcccttttctaatgcaaaggggaagtgtgcagacctgacagtatgtaacacactcagtgaactttatttcatttagtcctcagagcctgatgacagagttcttattaatcctaaattatattgagcaaaaccaaggttaaatactacactcagggccatgcagcttrtaaatggcaaagtcaagatttcaaatgaagtaggccaactcccatactcgagttctccccaacacactgggcaatagagaaaaatatgcagactgtgaaagccctgaccttctcaaagcggaaggcctgccagacacagaaaaagtgggttctgctattaaagccatccaattagaggattttttctcacagattg

SEQ ID NO: 550348 - DNA, 610 bp, Homo sapiens
ccaggtgtatgactactttggccactgggacaccaaccgatgtgaagtaagcagaggctcaactgataatgtggcctagaatgtgatgaggccaaggcagccatgcagagagatcacatggaggagaactgagatgccccacagcccagccacaagtgctagacacgggaatgaggcatcagatacaaaccagcccccagctgactttctgtgaccacaaatrcatagagctttcttctctaaaatttgagaagtaccagggtttccctcacatgcttccccagggacctggctgttggacatgctttctcaccttctcatctcctaaagatgtggataaatttaatctgcaatggctttcgtggggcctctctgccatgacttgtctgtctgcacacagcaaagggtaggttgactctatgcagtaatttgttctgtggaccaggcaatgtgctacacttccaatgtgctatctggacagcagtcccatacaacctctgattttgctgaacttcaggctcacttgcatgcaggagtcacacctgcccagccattcctacttccatacacagagtcagttgtgtttatttgcatacacttttacatagac

SEQ ID NO: 550349 - DNA, 1234 bp, Homo sapiens
aagaggaattggaagaaagggccaaggcaagaggatgaaagtgctcggcgctggtcccaggtaaagttatgactctgggcaggtggtctgaggatygcccatttgcagctccatacccatttccctctgacatctctccctgcccactcaggctcctgctgtctccctagcaaaaccctgcttttgggtgaaaacctctatatcatgctcaccacagtacaaagactaatccagctccatgggacccctgggtgtggctggggctaagcaggggagaaggggaagaagatgatgtgcctcttagcgaaggtcacacaaggttggggcaggatgcctcccctctcttcctagatctgagtgggtctgtgcctggcaatggccaatctctgaaaaaaaatgtactgttgagaacaaacgccaattttctggctacgctaacaagagctaagtgacgcagtggacaaagcaatgatgctgttcctggctcaatctctctcttcgacaatgataatttgccacatcaacttaccttcccagacacgaagcatcagaggattagctattaaaagaaagacattttctcgctcattacagcctgcaatgtaaaatgtccagagatacaaggagtcctgttttcaccattaaagtagaaattatttccggcagctttgggagaaaatgcaattattttccttcctgtcacagtgtttccaaactcacctagagatgagagcaccctattaaaatggactcattgttcgaatgatgccagtgaatgctcttctctgacctgggggtgggagactggcccctgagtcctcaccccttgggattcaggatcaccaagggcacaggtaattagacagtactgagtcactgccacttacattctagtagcaggaagaggaaacttttcttttttagagtgctctttttattatccttgtgagaaagtacatatagtgatctgaagtgcaagagtgacttgtgcagaatctcctataagcagcgagaaaaccagtgtgaagtcctacctcttgacaccaagtctagcgttaacattaccctctgacctgcattaatacgatatgttatagagagaccagattcccgcttcctatgtaattcgtagagtcatcccagtctgcttagcaaaggaagtcatagcacaggggtgccgttgccccggaagcattgcaatcaatcatcagtttgggattgttttctttcactt

SEQ ID NO: 550350 - DNA, 1234 bp, Homo sapiens
aagaggaattggaagaaagggccaaggcaagaggatgaaagtgctcggcgctggtcccaggtaaagttatgactctgggcaggtggtctgaggattgcccatttgcagctccatacccatttccctctgacatctctccctgcccactcaggctcctgctgtctccctagcaaaaccctgcttttgggtgaaaacctctatatcatgctcaccacagtacaaagactaatccagctccatgggacccctgggtgtggctggggctaagcaggggagaaggggaagaagatgatgtgcctcttagcgaaggtcacacaaggttggggcaggatgcctcccctctcttcctagatctgagtkggtctgtgcctggcaatggccaatctctgaaaaaaaatgtactgttgagaacaaacgccaattttctggctacgctaacaagagctaagtgacgcagtggacaaagcaatgatgctgttcctggctcaatctctctcttcgacaatgataatttgccacatcaacttaccttcccagacacgaagcatcagaggattagctattaaaagaaagacattttctcgctcattacagcctgcaatgtaaaatgtccagagatacaaggagtcctgttttcaccattaaagtagaaattatttccggcagctttgggagaaaatgcaattattttccttcctgtcacagtgtttccaaactcacctagagatgagagcaccctattaaaatggactcattgttcgaatgatgccagtgaatgctcttctctgacctgggggtgggagactggcccctgagtcctcaccccttgggattcaggatcaccaagggcacaggtaattagacagtactgagtcactgccacttacattctagtagcaggaagaggaaacttttcttttttagagtgctctttttattatccttgtgagaaagtacatatagtgatctgaagtgcaagagtgacttgtgcagaatctcctataagcagcgagaaaaccagtgtgaagtcctacctcttgacaccaagtctagcgttaacattaccctctgacctgcattaatacgatatgttatagagagaccagattcccgcttcctatgtaattcgtagagtcatcccagtctgcttagcaaaggaagtcatagcacaggggtgccgttgccccggaagcattgcaatcaatcatcagtttgggattgttttctttcactt

SEQ ID NO: 550351 - DNA, 649 bp, Homo sapiens
tgctaacaaattattatgatagtttacactacgtcacgttacataatactagtactttaaaaagttaatttgattttcctccgaatcaaatcctgttctgcaggaaaagtaatgatatgaagcatgcttcttttattatgatagaaaaagcttataatttgtgttcccttgattcctctctccaggattctacccaattacagaggctctgtataaaattcaaattaacatcaaygaaacaggagctttatttcattatgaagatatctatctagtggacaatatttctttaatcaatttttggtttctttgcttgcattaagtccttgaaagcacattattattcatttcctggaatctctgtcctgaagagctttgcttgacagtgttataggcaaatgagcaaagagctaggaaatttgttgttagggatttgttgcaaaagaatgttttctggcatataaaatgtctgcgaggtgactgccagaagtttaatatttgaaatgaaaaaagagggagatcctaaaatgaggcaagtgcatcatgtgaaaaatgttcagcagatttaataatttactaggagtggttttatctagaacatgtaaaagttcagaaagcaggaaatatggtagatcacaacttaccatgc

SEQ ID NO: 550352 - DNA, 545 bp, Homo sapiens
gagcccaggtgttggagaccagcctggccaacatggcaaaacatcatctctattaaaaatacaaaaaaataaaaaataaaaaaataaaaaattagccaggtatgrtggtggaagcctgtagtcccagatatttgggagtttgaggcatgagaatcacttgaacccgggacgcagagattgcagtgagctgagaaggtgcccctgcactccagcctaagcaacagagcaagactcagtctcataataataataataataataataataataataataataacaactaaaaaacattgattttacactaaattttacaaaaaatagagaatattacaattacaaataatacaatagaggtattttatgcctttagataaaaaaaatccttaaccaaatattcacaaacttaatccaataatgcatcaatactaattaatgtattataggaactcaaggttgctttaacatgtgaaaatcaatgtaatttactatattaagaataaaagagaaacctatttcatcacttcaatacacgtacatatacc

SEQ ID NO: 550353 - DNA, 545 bp, Homo sapiens
gagcccaggtgttggagaccagcctggccaacatggcaaaacatcatctctattaaaaatacaaaaaaataaaaaataaaaaaataaaaaattagccaggtatggtggtggaagcctgtagtcccagatatttgggagtttgaggcatgagaatcacttgaacccgggacgcagagattgcagtgagctgagaaggtgcccctgcactccagcctaagcaacagagcaagactcagtctcataataataataataataataataataataataataataacaactaaaaaacattgattttacactaaattttacaaaaaatagagaatattacaattacaaataatacaatagaggtattttatgcctttagataaaaaaaatccttaaccaaatattcacaaacttaatccaataatgcatcaatactaattaatgtattataggaactcaagkttgctttaacatgtgaaaatcaatgtaatttactatattaagaataaaagagaaacctatttcatcacttcaatacacgtacatatacc

SEQ ID NO: 550354 - DNA, 543 bp, Homo sapiens
gaaagagagagcaatggaaaatactagctgtggcatggctgtgggtaatagtgcttaatccatgaccactacaagcatggagatatgcttggaagggaagtgagatttaagcaggggaaggagaatcactgacttggaaaactgtctcaaaaaaaagaaaaagtcttgctcttttgcccaggctgaagtgcagtggggtgatctcggctcactgcaacctctgcctcccgggttctagcaactctcctgtctcagcctcccaagtagctgggacttcaggcacatgccaccatgcccggctaatttttgtatttttagtagagacggggtttcaccgtgttggccaggctggtctcaaactcctgacctcatgatccacccacctcagcctcccaaagtgctgggattacaggctataggcacaagccacagcgcccggccrgaaaactcttaaatggatacaaaccagtcagcataccattggtgactctatggttatttaactctatggttaattaaaaggagaaagtaggagagggaaat

SEQ ID NO: 550355 - DNA, 548 bp, Homo sapiens
ggaagactaatgcagacatagatgctatttaccctcactccctctcttttcttcttggagctcacctctgctgtagtaatctctggatccctggtttcagtaccatcaaacttatcatggacagtgagtgataggctactattgaataatacagattgatccagaccttttaaacttatctgactatagcccatctagataattgttccttgcaagccccaaaccaatatacacatattatacacatattttcttttcttttcttttytttgtttgtttatttttttgagacggactcttattctgtcacccaggctggagtacagtggtgcgatctcggctcgctgccacctctgcctcccaggttcaagcgattctcctccctcagcctcccaggaagctgggattacaggcatgcatcaccacatccagctaattttttggatattagtagagaagtgtttcaccatgttggctaggctggtctcgaactcctggcctcaagtgatctacctgcctcagcctctcaaaatgctgggattacaggc

SEQ ID NO: 550356 - DNA, 568 bp, Homo sapiens
ttcatatcctgaattccatcaggaaaggctgatgccaatgagtttgaagaccccacgaggaaccaaatcagcatgagaatgcagtttcttcatctccctgtcctatgacttcaccctgcactcttccaccaatcaacaatccccacatctcagccctttccaaagcccttaatatccgtagctccaaattccttaggttggtggatttgaggtttcttcccacctcctcatttagctctcctatgattattagactttttctctgcagcaatcccccttgtcttgttatattgacttgccaggcattgggcaaacgatcctgttacatatccactgagccatatgtggaagcctcggccagtgccagtcaatatcaargaatttggtccatttctagataagaatttggggttgttgattagttgggataaggggaaggaaatcatcaggatgtggaaactgcattctttggtgactcagctcctgtgaggtccttaagaccagctggcatcagtagtttcattggtatgcagaaactgaaagagtatctcaaatggaaaagttaatg

SEQ ID NO: 550357 - DNA, 568 bp, Homo sapiens
ttcatatcctgaattccatcaggaaaggctgatgccaatgagtttgaagaccccacgaggaaccaaatcagcatgagaatgcagtttcttcatctccctgtcctatgacttcaccctgcactcttccaccaatcaacaatccccacatctcagccctttccaaagcccttaatatccgtagctccaaattccttaggttggtggatttgaggtttcttcccacctcctcatttagctctcctatgattattagactttttctctgcagcaatcccccttgtcttgttatattgacttgccaggcattgggcaaacgatcctgttacatatccactgagccatatgtggaagcctcggccagtgccagtcaatatcaaggaatttggtccatttctagataagaatttggggttgttgattagttgggataaggggaaggaaatcatcaggatgtggaaactgcattctttggtgactcagctcctgtgaggtccttaagaccagctggcatcagtagtttcattggtatgcagaaactgaaagagtatctcaaatggaaaakttaatg

SEQ ID NO: 550358 - DNA, 553 bp, Homo sapiens
gagacttccgaagtcccacacaatactgctaacatcttgcccagaacttggtcacgtggccacacattcctgcaaaggaggctgggaaatgcagttgtttactcccattgttagaactctctatgaatcttaattttcatcagtttacttcatttgttaggagctactgatagactcaagtaaaattgtaattctccaaagaacttaaaataaagacattgatgttaattaaatataaaacaaatacctaatagagacaatcagccaagctaaaacaactctcttaagaatayaataaaaattggcaagtctttggtaacattagtcaagaaaaataggagaaggcataaataaccaaaatagcccatgcgaagagggacagaattccagaggctgcgggaggattctggtctggctggagatgctggtaacttctctgtcttgccaatatgaacttcttagcattgctcaaagctgtcctctgtgctcacagcccacccctctgctggcggctttcacatgttctgttgccctggtccctccttggcccctc

SEQ ID NO: 550359 - DNA, 1491 bp, Homo sapiens
taaattagaggcactcaaaatgaatatgcagaatatatacagaatctatacagcaagagaagacccaatttacaatcccatacaaatgataaagtaccttgaaataaatttaatgaaaaatgtgctaaaaacaacaaggttatatttatgggctttcttttttttttctttgagacagagtctcgctgtgttgcctaggctagagtgcagtggtgcgrtcttggctcactgcaagctccgcctcccaggttcatgccattctcctgcctcagcctccgaagtagctgggactacaggtgcccaccaccacgcctggctaattttttgtatttttagtagagacggggtttcactgtgttagccagaatggtcttgatctcctgacctcatgatccatccacctcagcctcccaaagtgctgggattacaggtgtgagccaccgttcctggcttatttctggactttcttattctgttccattgatctctttaacaattcttgtaccacttttaatcattatagctttataatatgttttaatatttagtaaatctagttctgtgtaaatgtctctgaataggaagcttgttttattaatgttatgtacaagtctgcatccattacaaatattggattttcagatactcatctaaaattatttcttctgtgttgttcagtgaaaacaagcaaggtgcaggacactttgagcagttgtgcaaaagcaggtataaaatgtatatacatttttagaatgaatagactatctttgagatggtttgtaaaaaaaaaaaatcataacatttatttcctctggagaggagaactggcaactgggagataaggacaggacagagagtgtcattgtaaaaagttttgttctcattgatttatgaaacatgtaaatatattattgtttactcaaaaataagtaaatataaattttaaaatatgatcatagtctctacattttaatcctcagagatgccttttaagtttttctgttagaaacttttaattctattacgcatatataggcattactttgctctttaatattttttcagggaaaatgacataaaaatttaaaaaacccaggcaataactttctacattatcaggttttattacgctaaattaaatttactaaatgctattaattaaattttagtaaatgcttttagagtatgtgttcttttaactgataagatggtactattctcatgatgcattatgtggagtctataaaggaaagttaatatcacaatgcctagaaaagttaaagtttctgcctcatggggaaatatggctggtctttattccagactattttcaaatagcctgctcagccctccaaagctatgttgtcttctctgacctgtttcttaatttatatgtaacttttaaatctgcaaaaggatatttcaatttatttttattttattattattttttgagacagagcctcactgtgttgcccaggctggtctggg

SEQ ID NO: 550360 - DNA, 1491 bp, Homo sapiens
taaattagaggcactcaaaatgaatatgcagaatatatacagaatctatacagcaagagaagacccaatttacaatcccatacaaatgataaagtaccttgaaataaatttaatgaaaaatgtgctaaaaacaacaaggttatatttatgggctttcttttttttttctttgagacagagtctcgctgtgttgcctaggctagagtgcagtggtgcgatcttggctcactgcaagctccgcctcccaggttcatgccattctcctgcctcagcctccgaagtagctgggactacaggtgcccaccaccacgcctggctaattttttgtatttttagtagagacggggtttcactgtgttagccagaatggtcttgatctcctgacctcatgatccayccacctcagcctcccaaagtgctgggattacaggtgtgagccaccgttcctggcttatttctggactttcttattctgttccattgatctctttaacaattcttgtaccacttttaatcattatagctttataatatgttttaatatttagtaaatctagttctgtgtaaatgtctctgaataggaagcttgttttattaatgttatgtacaagtctgcatccattacaaatattggattttcagatactcatctaaaattatttcttctgtgttgttcagtgaaaacaagcaaggtgcaggacactttgagcagttgtgcaaaagcaggtataaaatgtatatacatttttagaatgaatagactatctttgagatggtttgtaaaaaaaaaaaatcataacatttatttcctctggagaggagaactggcaactgggagataaggacaggacagagagtgtcattgtaaaaagttttgttctcattgatttatgaaacatgtaaatatattattgtttactcaaaaataagtaaatataaattttaaaatatgatcatagtctctacattttaatcctcagagatgccttttaagtttttctgttagaaacttttaattctattacgcatatataggcattactttgctctttaatattttttcagggaaaatgacataaaaatttaaaaaacccaggcaataactttctacattatcaggttttattacgctaaattaaatttactaaatgctattaattaaattttagtaaatgcttttagagtatgtgttcttttaactgataagatggtactattctcatgatgcattatgtggagtctataaaggaaagttaatatcacaatgcctagaaaagttaaagtttctgcctcatggggaaatatggctggtctttattccagactattttcaaatagcctgctcagccctccaaagctatgttgtcttctctgacctgtttcttaatttatatgtaacttttaaatctgcaaaaggatatttcaatttatttttattttattattattttttgagacagagcctcactgtgttgcccaggctggtctggg

SEQ ID NO: 550361 - DNA, 1491 bp, Homo sapiens
taaattagaggcactcaaaatgaatatgcagaatatatacagaatctatacagcaagagaagacccaatttacaatcccatacaaatgataaagtaccttgaaataaatttaatgaaaaatgtgctaaaaacaacaaggttatatttatgggctttcttttttttttctttgagacagagtctcgctgtgttgcctaggctagagtgcagtggtgcgatcttggctcactgcaagctccgcctcccaggttcatgccattctcctgcctcagcctccgaagtagctgggactacaggtgcccaccaccacgcctggctaattttttgtatttttagtagagacggggtttcactgtgttagccagaatggtcttgatctcctgacctcatgatccatccrcctcagcctcccaaagtgctgggattacaggtgtgagccaccgttcctggcttatttctggactttcttattctgttccattgatctctttaacaattcttgtaccacttttaatcattatagctttataatatgttttaatatttagtaaatctagttctgtgtaaatgtctctgaataggaagcttgttttattaatgttatgtacaagtctgcatccattacaaatattggattttcagatactcatctaaaattatttcttctgtgttgttcagtgaaaacaagcaaggtgcaggacactttgagcagttgtgcaaaagcaggtataaaatgtatatacatttttagaatgaatagactatctttgagatggtttgtaaaaaaaaaaaatcataacatttatttcctctggagaggagaactggcaactgggagataaggacaggacagagagtgtcattgtaaaaagttttgttctcattgatttatgaaacatgtaaatatattattgtttactcaaaaataagtaaatataaattttaaaatatgatcatagtctctacattttaatcctcagagatgccttttaagtttttctgttagaaacttttaattctattacgcatatataggcattactttgctctttaatattttttcagggaaaatgacataaaaatttaaaaaacccaggcaataactttctacattatcaggttttattacgctaaattaaatttactaaatgctattaattaaattttagtaaatgcttttagagtatgtgttcttttaactgataagatggtactattctcatgatgcattatgtggagtctataaaggaaagttaatatcacaatgcctagaaaagttaaagtttctgcctcatggggaaatatggctggtctttattccagactattttcaaatagcctgctcagccctccaaagctatgttgtcttctctgacctgtttcttaatttatatgtaacttttaaatctgcaaaaggatatttcaatttatttttattttattattattttttgagacagagcctcactgtgttgcccaggctggtctggg

SEQ ID NO: 550362 - DNA, 1491 bp, Homo sapiens
taaattagaggcactcaaaatgaatatgcagaatatatacagaatctatacagcaagagaagacccaatttacaatcccatacaaatgataaagtaccttgaaataaatttaatgaaaaatgtgctaaaaacaacaaggttatatttatgggctttcttttttttttctttgagacagagtctcgctgtgttgcctaggctagagtgcagtggtgcgatcttggctcactgcaagctccgcctcccaggttcatgccattctcctgcctcagcctccgaagtagctgggactacaggtgcccaccaccacgcctggctaattttttgtatttttagtagagacggggtttcactgtgttagccagaatggtcttgatctcctgacctcatgatccatccacctcagcctcccaaagtgctgggattacaggygtgagccaccgttcctggcttatttctggactttcttattctgttccattgatctctttaacaattcttgtaccacttttaatcattatagctttataatatgttttaatatttagtaaatctagttctgtgtaaatgtctctgaataggaagcttgttttattaatgttatgtacaagtctgcatccattacaaatattggattttcagatactcatctaaaattatttcttctgtgttgttcagtgaaaacaagcaaggtgcaggacactttgagcagttgtgcaaaagcaggtataaaatgtatatacatttttagaatgaatagactatctttgagatggtttgtaaaaaaaaaaaatcataacatttatttcctctggagaggagaactggcaactgggagataaggacaggacagagagtgtcattgtaaaaagttttgttctcattgatttatgaaacatgtaaatatattattgtttactcaaaaataagtaaatataaattttaaaatatgatcatagtctctacattttaatcctcagagatgccttttaagtttttctgttagaaacttttaattctattacgcatatataggcattactttgctctttaatattttttcagggaaaatgacataaaaatttaaaaaacccaggcaataactttctacattatcaggttttattacgctaaattaaatttactaaatgctattaattaaattttagtaaatgcttttagagtatgtgttcttttaactgataagatggtactattctcatgatgcattatgtggagtctataaaggaaagttaatatcacaatgcctagaaaagttaaagtttctgcctcatggggaaatatggctggtctttattccagactattttcaaatagcctgctcagccctccaaagctatgttgtcttctctgacctgtttcttaatttatatgtaacttttaaatctgcaaaaggatatttcaatttatttttattttattattattttttgagacagagcctcactgtgttgcccaggctggtctggg

SEQ ID NO: 550363 - DNA, 1491 bp, Homo sapiens
taaattagaggcactcaaaatgaatatgcagaatatatacagaatctatacagcaagagaagacccaatttacaatcccatacaaatgataaagtaccttgaaataaatttaatgaaaaatgtgctaaaaacaacaaggttatatttatgggctttcttttttttttctttgagacagagtctcgctgtgttgcctaggctagagtgcagtggtgcgatcttggctcactgcaagctccgcctcccaggttcatgccattctcctgcctcagcctccgaagtagctgggactacaggtgcccaccaccacgcctggctaattttttgtatttttagtagagacggggtttcactgtgttagccagaatggtcttgatctcctgacctcatgatccatccacctcagcctcccaaagtgctgggattacaggtgtgagccaccgttcctggcttatttctggactttcttattctgttccattgatctctttaacaattcttgtaccacttttaatcattatagctttataatatgttttaatatttagtaaatctagttctgtgtaaatgtctctgaataggaagcttrttttattaatgttatgtacaagtctgcatccattacaaatattggattttcagatactcatctaaaattatttcttctgtgttgttcagtgaaaacaagcaaggtgcaggacactttgagcagttgtgcaaaagcaggtataaaatgtatatacatttttagaatgaatagactatctttgagatggtttgtaaaaaaaaaaaatcataacatttatttcctctggagaggagaactggcaactgggagataaggacaggacagagagtgtcattgtaaaaagttttgttctcattgatttatgaaacatgtaaatatattattgtttactcaaaaataagtaaatataaattttaaaatatgatcatagtctctacattttaatcctcagagatgccttttaagtttttctgttagaaacttttaattctattacgcatatataggcattactttgctctttaatattttttcagggaaaatgacataaaaatttaaaaaacccaggcaataactttctacattatcaggttttattacgctaaattaaatttactaaatgctattaattaaattttagtaaatgcttttagagtatgtgttcttttaactgataagatggtactattctcatgatgcattatgtggagtctataaaggaaagttaatatcacaatgcctagaaaagttaaagtttctgcctcatggggaaatatggctggtctttattccagactattttcaaatagcctgctcagccctccaaagctatgttgtcttctctgacctgtttcttaatttatatgtaacttttaaatctgcaaaaggatatttcaatttatttttattttattattattttttgagacagagcctcactgtgttgcccaggctggtctggg

SEQ ID NO: 550364 - DNA, 621 bp, Homo sapiens
acactgtgtcccagatctgaccagggctgaaaacagtgccgtgacatcttccttgatgcagcattcacagcctattagcacagttagagactgttactacagttagagactgttttcattgtttttaagttcatgggtaactaaaaatagaagccaatgatttgctatcctcctcgttcaacacacasacagagagagagagaggcagagaaagagagaagagagagagaggctggcagagaaagagaaagagagagacagagagagagaactgctgggcaacatgaccctcacattccatgaataaatgagatttgaaagctcaattcaagactttaatcctgcttattatctcattccagcattctactctttggtatatacttgattctatccctatggaatagctactatggtaatagctgcttcccctcagcttatataaactacataagtaaagatattccttatatatattcacagggatcacagatgaacatggatatgactagaaatggagccaccataaaggacactccaattaacatgttctggggatacggtttcaacagatgcagctctgtaaggaggctctgtcaaatacctgttcctaagatttca

SEQ ID NO: 550365 - DNA, 621 bp, Homo sapiens
acactgtgtcccagatctgaccagggctgaaaacagtgccgtgacatcttccttgatgcagcattcacagcctattagcacagttagagactgttactacagttagagactgttttcattgtttttaagttcatgggtaactaaaaatagaagccaatgatttgctatcctcctcgttcaacacacacasagagagagagagaggcagagaaagagagaagagagagagaggctggcagagaaagagaaagagagagacagagagagagaactgctgggcaacatgaccctcacattccatgaataaatgagatttgaaagctcaattcaagactttaatcctgcttattatctcattccagcattctactctttggtatatacttgattctatccctatggaatagctactatggtaatagctgcttcccctcagcttatataaactacataagtaaagatattccttatatatattcacagggatcacagatgaacatggatatgactagaaatggagccaccataaaggacactccaattaacatgttctggggatacggtttcaacagatgcagctctgtaaggaggctctgtcaaatacctgttcctaagatttca

SEQ ID NO: 550366 - DNA, 1639 bp, Homo sapiens
aggaaagagagttgcttgaactcgggaggtggaggttgcggtgagctgagattgtgccatggcattccaggttgggcaacagagtgagtctccgtccccccacaaaaaaaattgggagtggaccgaggaaccataggaaggagtgtagggggtctgccaggctggggctgagaggatggtgcctgtctttttctgagaatcctttgtgaaagtctgattccaagagaaagcctggccctgggcaggtggctaaagttcacaaaggctaacatggagagtgaacctggcactggggcagggagggaggcggtcagcggcggcttctgacagccctgactaactgccaaaaacagggtttcagctgcgaaccaatgacaccccagagccccaaagacttctaggaactttaccctccccactcccagcttgccccagccctggtccacacctgttcattagaaaatgacttttaaaaaatttacttatttactttatacagatggggtctcactatattgcccaggctggtcagaaactcctgggctcaagtgatcctcccgccccggcctcccaaagttctgggattgcagttgtgagtcactgtacccagctgagaaaatgactttttattttctttataagagatggggtcttgatatgttgcccaggctgcttttgaattcctgggttcaagcaatcctcccacctcggcctctcaaagtgctaggatgacaggtgtgagccaccatgcctggctgagaaagtgagttttcatttgtcacttgtcatgctgcctgcctgcctgcttcagagggtgggagggacgggggatccatgggaaaactgaagctcttgtgaagattacagaggaggcctgattggggaaaggaaggtgccctcccaggaatgcctgggagaccccgagagtaggtgctgtgttctcacgttctcattgtcctgagagaccaagcctctggctgaatgcagaggaaggtgatgcatccagctgggtgccccctcccccagcccccatgcaaggtgttggggctcacggtacttcagggtgttcagtttgtagtcaacaagggatagggggacctgagggttgattttgttcagcaagatacacagtttaaactttcagctaacggaaggtatttttggtttaggggaacagggatgaattctgggccacctgcacatgtgtaagtacagccatgagcctgcacccatgagggcaygtctgctgtgcgtgtctggatgcctgtgtgtctgctctccatctctgggtagattcacatatgaatacatatgtgaatacggtttgtgtgtctgtttggatgggcaggaaagaacttaatcaaatgagtcaggaaatgaggattccctggggtctgctcccagctgggcctctcatgcagtggggcctttgatctgtcccttctgctctccgggcctcccctgccacacagcctgttgcccaagctatactggctgatgctagtgcccctgaacgggctgggttcttggtgcctcagcctggcatggggagaagatctgggactcagggagcctccgagggttggcagcagggtcctgggatgcaccccatgactggctaattggtcccttagcaccg

SEQ ID NO: 550367 - DNA, 1460 bp, Homo sapiens
atgctgataagtgcactaagcattttctagagggatatataagaaaccattagtagcacaaacctttaggaagagaaacggaagtggggagggagcagtgagagaattttgcttctcattttgtgtctttctagaacatgaattattttccatatgcatttaaaaagtgaaaacaaggggttatctggacagtaggattatgggccattttaattttcttcttgactcttttctgaactaaaaaagaaaaatatgattttaaaaaaaccttacgaagctaatgaaagctatggacctaatcccaataaaattttacagatatattaattcatataattaacaaccctttataggaaagattggagggaatgattayacttaaaagccaggctaaaacaagattttcatgactagaaggatacattcctctgatatctatattgaagctactgtcattaataattaaaaatggaaaacaaaaacctaggctaatgcggtttctggaaccaagcatttaattttactttgagccccgtgccttatacagagcttgaacagaggagatgctcaaaaaatccattggttagtggacattttgtgctcactggatcccgaagcaggtacccagtcaacacttgttaacagaaaccagtagtcaaatactattggtcccaaccactgtccctggaccccagctgggacccttatccaggtgagagtcggaggagtgtggtcagccttgggctgagttgtgagatcctctcccctgcaatggggtgagggtaaggagagcactgaccactgtcactaccgagtgtctgggagtggtggacacaagcagggtcttcctttcctgactgcccttttaatacagtatgcagaggatgtgtggactcagcctcattaaatatttactgcctgtccccagcctacctaccctcctccaaacacgtgcaggtgtacaggtgagcagaggccagggctgaaactctcgttctcacatctctctaggagccagaatccaaccccctaggattcctttcctcagacccaggatatgaaatcacacccagaacactgtgggcacaccatggcctcaaaggcaacacacgtccatgtgttggcaccatcttcctccaaaccagatgacttttccagcttccctctctgacatagccccacattcgccccatcactcaagctcaaggcctccatttcctccatctgtaccccactacccccagtcccgtctccagacaccagatgttaggagcacttccttcggcagcaacctccagccttccatcccctctattctccccagcagccctgctaccagccaatcagtgttcatgtctgggctattgcagtagactcctaacttgttttcctgatcccaggccgtccacctccaatccagcctgcaccagatgaattagagcagagcactcttttcctcc

SEQ ID NO: 550368 - DNA, 1460 bp, Homo sapiens
atgctgataagtgcactaagcattttctagagggatatataagaaaccattagtagcacaaacctttaggaagagaaacggaagtggggagggagcagtgagagaattttgcttctcattttgtgtctttctagaacatgaattattttccatatgcatttaaaaagtgaaaacaaggggttatctggacagtaggattatgggccattttaattttcttcttgactcttttctgaactaaaaaagaaaaatatgattttaaaaaaaccttacgaagctaatgaaagctatggacctaatcccaataaaattttacagatatattaattcatataattaacaaccctttataggaaagattggagggaatgattatacttaaaagccaggctaaaacaagattttcatgactagaaggatacaktcctctgatatctatattgaagctactgtcattaataattaaaaatggaaaacaaaaacctaggctaatgcggtttctggaaccaagcatttaattttactttgagccccgtgccttatacagagcttgaacagaggagatgctcaaaaaatccattggttagtggacattttgtgctcactggatcccgaagcaggtacccagtcaacacttgttaacagaaaccagtagtcaaatactattggtcccaaccactgtccctggaccccagctgggacccttatccaggtgagagtcggaggagtgtggtcagccttgggctgagttgtgagatcctctcccctgcaatggggtgagggtaaggagagcactgaccactgtcactaccgagtgtctgggagtggtggacacaagcagggtcttcctttcctgactgcccttttaatacagtatgcagaggatgtgtggactcagcctcattaaatatttactgcctgtccccagcctacctaccctcctccaaacacgtgcaggtgtacaggtgagcagaggccagggctgaaactctcgttctcacatctctctaggagccagaatccaaccccctaggattcctttcctcagacccaggatatgaaatcacacccagaacactgtgggcacaccatggcctcaaaggcaacacacgtccatgtgttggcaccatcttcctccaaaccagatgacttttccagcttccctctctgacatagccccacattcgccccatcactcaagctcaaggcctccatttcctccatctgtaccccactacccccagtcccgtctccagacaccagatgttaggagcacttccttcggcagcaacctccagccttccatcccctctattctccccagcagccctgctaccagccaatcagtgttcatgtctgggctattgcagtagactcctaacttgttttcctgatcccaggccgtccacctccaatccagcctgcaccagatgaattagagcagagcactcttttcctcc

SEQ ID NO: 550369 - DNA, 1460 bp, Homo sapiens
atgctgataagtgcactaagcattttctagagggatatataagaaaccattagtagcacaaacctttaggaagagaaacggaagtggggagggagcagtgagagaattttgcttctcattttgtgtctttctagaacatgaattattttccatatgcatttaaaaagtgaaaacaaggggttatctggacagtaggattatgggccattttaattttcttcttgactcttttctgaactaaaaaagaaaaatatgattttaaaaaaaccttacgaagctaatgaaagctatggacctaatcccaataaaattttacagatatattaattcatataattaacaaccctttataggaaagattggagggaatgattatacttaaaagccaggctaaaacaagattttcatgactagaaggatacattyctctgatatctatattgaagctactgtcattaataattaaaaatggaaaacaaaaacctaggctaatgcggtttctggaaccaagcatttaattttactttgagccccgtgccttatacagagcttgaacagaggagatgctcaaaaaatccattggttagtggacattttgtgctcactggatcccgaagcaggtacccagtcaacacttgttaacagaaaccagtagtcaaatactattggtcccaaccactgtccctggaccccagctgggacccttatccaggtgagagtcggaggagtgtggtcagccttgggctgagttgtgagatcctctcccctgcaatggggtgagggtaaggagagcactgaccactgtcactaccgagtgtctgggagtggtggacacaagcagggtcttcctttcctgactgcccttttaatacagtatgcagaggatgtgtggactcagcctcattaaatatttactgcctgtccccagcctacctaccctcctccaaacacgtgcaggtgtacaggtgagcagaggccagggctgaaactctcgttctcacatctctctaggagccagaatccaaccccctaggattcctttcctcagacccaggatatgaaatcacacccagaacactgtgggcacaccatggcctcaaaggcaacacacgtccatgtgttggcaccatcttcctccaaaccagatgacttttccagcttccctctctgacatagccccacattcgccccatcactcaagctcaaggcctccatttcctccatctgtaccccactacccccagtcccgtctccagacaccagatgttaggagcacttccttcggcagcaacctccagccttccatcccctctattctccccagcagccctgctaccagccaatcagtgttcatgtctgggctattgcagtagactcctaacttgttttcctgatcccaggccgtccacctccaatccagcctgcaccagatgaattagagcagagcactcttttcctcc

SEQ ID NO: 550370 - DNA, 546 bp, Homo sapiens
tggtcttttcagccccactccataggactagttcctttcagggggatagacaaggaccactgcttaagctcttctcatgtgtatcacagtcacgtggccctgacttgtgaaagtgcctatgattccttcatctagtagtttgtttgtttaatgggtaattattttggagactacaaggtaatatttattttttaatttgatgtttctttttaacactattttttagtgttttggagccctcaccacctctgataaattaatttatttcaattcaacaaatatttctcaaatgctcattatgagccaggcattmtacttagggcaggggatacacagatttataacatagtccctgccactgagaagctgaccacaaataaagatgaaataaaatgagaagaatgacacaggaagagtatgtctgagtgttaccagatcactaaagagggaatatgaaactctatcttgaatgacactgagatgttccatgaaagagaggacatttgacttgagtcttgagggatgggtaactgagtagaatcgtga

SEQ ID NO: 550371 - DNA, 2917 bp, Homo sapiens
ggggatgcatcctgagcaatgtgtggttgggtgatttcgtcatctcgcaaacatcatagtggacttacgcaaacccagctggtgtagcctattgctcccaggcaacacaccttcrtgtactgaatacgacaggctattgtatcacatggtatttgtgtatctaaccatacccaagcctacataaggtaatatgttgcactacgacattatgatagctatgacatcactacgtaataagaattcttcagctccatcataatcttatcggcaccaccatggtacaggcagttcattgttgaccaaaacatcattatgtggcacatgactgtattatcattaatttctacaagtcctatctttctagttctttagtatcttaatgaatctccaataaatgtcctaattaagattaatccctaagacaaagaaccaaggcacagacttgccaatgcttttgcttggccttggggcagggacaaggctaggagagtgccctgggttggcaccaagttgtctcgctgtccagcctcatgaaatgcgtccccttgtcaacagcctccctggaaagctccgctgcacagagtcagatccaccgggcacttatttagtggccagaaactccctctactgctttggggaagatggggctgcaggaagcagagcacccccagccccctcctcaccagggcctccccaacccaatccatacacagctggtggatgaagagttgtgaagacttaaggtgaggcagcatgtgagtatgcatgctcagcacaaagggctcaagggctggcacacagcaggtgcaccatccttgtgaacagggaggatacaaacttggtggcttactgcctcatggtgatcctgcccttcccaccccttccccttcattcccatatcagatctgttctccaggccatggcgagtgcatgtgaccgtggctgggaaggtacctcattcccctgcccaccgtgattggtccagaggttgtcctaatcatccatggtaggccagtcagagcccttccctaagattctttttgggggaagctgggagagagctttgatgtggttcgatacaccaataccattgtgtatttcaactctgagggcacagagctgaaaggatgtaagcctgggtcctgggtgggtaaagcctgcctggagctggggaagatgagaagaggaaggcctgcggagggcccagtgaacgagacctgagctcagcctctgtgccctggagtcctcctgcctttccttctctgggctgtagttcactttctaataaaggtcctttgggtttggcggctttgttctgggcctccttcacctgcatcgtgaggagcaccagcaaaggccgcctgacactgccctcaccaagaaatgagcacccccagcttcacaactttcccctacccctgccaggaatgaaggtgctgtcctattcctgtccagcgggctcctggacaaagaagggagagtctctgatctccaggcgctgctgatcagacagatggagggatcattctgaggacctcagtgtctgtcattccccactcctagattgagtggggttatctcaggcaaagagacaatgggacagacggccaccggcaccagccccagctccaattctgccgctcaggtggtgatcactctcccacatctgcctcctgttaccttaaagcagtggttcaatgtgctaggctggtttgaagcagttaccctgggaggaaatgcagccacttttcctttctaaatttgtattttggtgactgagacagaacccttagtgtggctgtttttcttgtcttaatttcattcgtggtttcccagtcagaagcaaatgacagcaaatcacaatctcagcatcgaaatccccacgtctcttgctttaatttccaagtcacaaaagcatgggcacttctggttcatcccagtggggcaggggaggggggggacccacttccttctagtgacccaggtgcacactccccagctcttcacaccatttaaaggattctgcccaaactgccaaccatgtgttacaaataaagcccttcccgaaaatggatcaaaaacactttgtaatgagtgaaggagctggtttaaaaagggccaacatcaaacaaaatcccagtcctgagtcacagacactcaaatagccccttccagggtgggaatgtcctccaaagcacttccatttgtgtgagtagttcttcaagccaacgtatccaaatacatacatctgatgagcggactttgcttgtttacatacattatgtacattcctttgatagtcaattgtctaaagttggaacagttcggagggaagagctatataaggtttgcaatgatctttgtccaccagttactggacaactggatccaaattccacaaatagctgtggttctttacctgcatggttctcctcccctgagacatccagtgccatgcattttctcttgcaggtctttccttgcatcacccctccaaccccagcagatatcctggctgagcctgttttctctgtgaggggctacactgcacactggggctcttgaaaagggcttgctgggctgggcacggtggctcacgcctgtaatcctgacactttggtaggccgaggtgggtggatcacctgaggtcaggtgttcaagatcagcctggccaatatggtgaaaccccgtctctactaaaaatacagaaaaattagctgggcatggtggtgtgcacctgtaatcccagctactcaggaggctgaggcaggagaatcacttgaacccgggaggcagaggttccagtgagccaagatggcaccattgtacttcagcctaggcgacagagagagactccaattcaaaaaaagaaaaagagaaaaaaaaaaaaaagaaaaaaaagaaagggcttcctgca

SEQ ID NO: 550372 - DNA, 2917 bp, Homo sapiens
ggggatgcatcctgagcaatgtgtggttgggtgatttcgtcatctcgcaaacatcatagtggacttacgcaaacccagctggtgtagcctattgctcccaggcaacacaccttcatgtactgaatacgacaggctattgtatcacatggtatttgtgtatctaaccatacccaagcctacataaggtaatatgttgcactacgacattatgatagctatgacatcactacgtaataagaattcttcagctccatcataatcttatcggcaccaccatggtacaggcagttcattgttgaccaaaacatcattatgtggcacatgactgtattatcattaatttctacaagtcctatctttctagttctttagtatcttaatgaatctccaataaatgtcctaattaagattaatccctaagacaaagaaccaaggcacagacttgccaatgcttttgcttggccttggggcagggacaaggctaggagagtgccctgggttggcaccaagttgtctcgctgtccagcctcatgaaatgcgtccccttgtcaacagcctccctggaaagctccgctgcacagagtcagatccaccgggcacttatttagtggccagaaactccctctactgctttggggaagatggggctgcaggaagcagagcacccccagccccctcctcaccagggcctccccaacccaatccatacacagctggtggatgaagagttgtgaagacttaaggtgaggcagcatgtgagtatgcatgctcagcacaaagggctcaagggctggcacacagcaggtgcaccatccttgtgaacagggaggatacaaacttggtggcttactgcctcatggtgatcctgcccttcccaccccttccccttcattcccatatcagatctgttctccaggccatggcgagtgcatgtgaccgtggctgggaaggtacctcattcccctgcccaccgtgattggtccagaggttgtcctaatcatccatggtaggccagtcagagcccttccctaagattctttttgggggaagctgggagagagctttgatgtggttcgatacaccaataccattgtgtatttcaactctgagggcacagagctgaaaggatgtaagcctgggtcctgggtgggtaaagcctgcctggagctggggaagatgagaagaggaaggcctgcggagggcccagtgaacgagacctgagctcagcctctgtgccctggagtcctcctgcctttccttctctgggctgtagttcactttctaataaaggtcctttgggtttggcggctttgttctgggcctccttcacctgcatcgtgaggagcaccagcaaaggccgcctgacactgccctcaccaagaaatgagcacccccagcttcacaactttcccctacccctgccaggaatgaaggtgctgtcctattcctgtccagcgggctcctggacaaagaagggagagtctctsatctccaggcgctgctgatcagacagatggagggatcattctgaggacctcagtgtctgtcattccccactcctagattgagtggggttatctcaggcaaagagacaatgggacagacggccaccggcaccagccccagctccaattctgccgctcaggtggtgatcactctcccacatctgcctcctgttaccttaaagcagtggttcaatgtgctaggctggtttgaagcagttaccctgggaggaaatgcagccacttttcctttctaaatttgtattttggtgactgagacagaacccttagtgtggctgtttttcttgtcttaatttcattcgtggtttcccagtcagaagcaaatgacagcaaatcacaatctcagcatcgaaatccccacgtctcttgctttaatttccaagtcacaaaagcatgggcacttctggttcatcccagtggggcaggggaggggggggacccacttccttctagtgacccaggtgcacactccccagctcttcacaccatttaaaggattctgcccaaactgccaaccatgtgttacaaataaagcccttcccgaaaatggatcaaaaacactttgtaatgagtgaaggagctggtttaaaaagggccaacatcaaacaaaatcccagtcctgagtcacagacactcaaatagccccttccagggtgggaatgtcctccaaagcacttccatttgtgtgagtagttcttcaagccaacgtatccaaatacatacatctgatgagcggactttgcttgtttacatacattatgtacattcctttgatagtcaattgtctaaagttggaacagttcggagggaagagctatataaggtttgcaatgatctttgtccaccagttactggacaactggatccaaattccacaaatagctgtggttctttacctgcatggttctcctcccctgagacatccagtgccatgcattttctcttgcaggtctttccttgcatcacccctccaaccccagcagatatcctggctgagcctgttttctctgtgaggggctacactgcacactggggctcttgaaaagggcttgctgggctgggcacggtggctcacgcctgtaatcctgacactttggtaggccgaggtgggtggatcacctgaggtcaggtgttcaagatcagcctggccaatatggtgaaaccccgtctctactaaaaatacagaaaaattagctgggcatggtggtgtgcacctgtaatcccagctactcaggaggctgaggcaggagaatcacttgaacccgggaggcagaggttccagtgagccaagatggcaccattgtacttcagcctaggcgacagagagagactccaattcaaaaaaagaaaaagagaaaaaaaaaaaaaagaaaaaaaagaaagggcttcctgca

SEQ ID NO: 550373 - DNA, 1458 bp, Homo sapiens
ggaaggagaataatatgttcatttttggaaatgctgagtaaaagtgcctatgggacatcgaattcggatctaggtttgtaacagttaatataatctgtaacaagctgaaaaccaaaatcaaaaatgagattagaaagttcaatattttcaaatcccccaaatttaactttttatcattaaaaatattatctataaacarccccatcaaaaagtgggcaaaggatacgaacagacacttttccaaagaaaacatttatgtggccaacaaacacatgaaacaacgctcatcatcactggtcattagataaatgcaaatcaaaaccacaatgagataccatctcatgccagttagaatgacaatcattagaaagtcaggaaacaacagatcctggagaggatgtggagaaacagggatgcttttacactgttggttggagtgtaaattagttcagccattgtggaagacagtgtggcgattcctcaaggatctagaaccagaaataacatttgacccagcaatcccattactgggtatatactcaaaggattataaaacattctactataaagacacatgcacacatatgtttactgcagcactgttcacaacagcagagacttgcaaccaacccaaatgctcatcaatgatagactggataaagaaaatgtggcacatatacgccacggaatactatgcagccataaaaaggatgagttcatgtcctttgcagggagatggatgaagctggaaaccatcattctcagcaaactaacacaggaacagaaaaccaaacactgcatgttctcacatataagtgagagttgaacagtgagaacacatggacacagagaggggagtatcatacaccagggcctgtcaggggttggggggtagcagagggatagcattaggagaaatacataatgtagatgatgagttgatgggtgcagcaaaccaccatggcacgtgtatacctatgtaacaaacctgcacgttcttcacatgtatcccaaaacttaaagtataacaaaaaatattatatataaacatatattttaacaaattataaaacattccttttgaaatctcagtgacaaatttcataacagactaacagtgaagaaattgagaaaatcaagccactaagctgaagaatttatgaattatgataatagtgatatactgatagctatcatttttatgtaccaataacaataatagctacacatgcctcccaacacatacgcactgataaccatgctagacatattacctatatttagggtccaaaatatactttattatctctattttaaagaaaaacagactgagttgtaatgggattaactaatttgcccatggttatcaaaataatttttaaacaagaacccataagaagttcctttactggaagaactgcctaaggcataattccaaaatatgtatcacaaaaaaaa

SEQ ID NO: 550374 - DNA, 1458 bp, Homo sapiens
ggaaggagaataatatgttcatttttggaaatgctgagtaaaagtgcctatgggacatcgaattcggatctaggtttgtaacagttaatataatctgtaacaagctgaaaaccaaaatcaaaaatgagattagaaagttcaatattttcaaatcccccaaatttaactttttatcattaaaaatattatctataaacaaccccatcaaaaagtgggcaaaggatacgaacagacacttttccaaagaaaacatttatgtggccaacaaacacatgaaacaacgctcatcatcactggtcattagataaatgcaaatcaaaaccacaatgagataccatctcatgccagttagaatgacaatcattagaaagtcaggaaacaacagatcctggagaggatgtggagaaacagggatgcttttacactgttggttggagtgtaaattagttcagccattgtggaagacagtgtggcgattcctcaaggatctagaaccagaaataacatttgacccagcaatcccattactgggtatatactcaaaggattataaaacattctactataaagacacatgcacacatatgtttactgcagcactgttcacaacagcagagacttgcaaccaacccaaatgctcatcaatgatagactggataaagaaaatgtggcacatatacgccacggaatactatgcagccataaaaaggatgagttcatgtcctttgcagggagatggatgaagctggaaaccatcattctcagcaaactaacacaggaacagaaaaccaaacactgcatgttctcacatataagtgagagttgaacagtgagaacacatggacacagagaggggagtatcatacaccagggcctgtcaggggttggggggtagcagagggatagcattaggagaaatacataatgtagatgatgagttgatgggtgcagcaaaccaccatggcacgtgtatacctatgtaacaaacctgcaygttcttcacatgtatcccaaaacttaaagtataacaaaaaatattatatataaacatatattttaacaaattataaaacattccttttgaaatctcagtgacaaatttcataacagactaacagtgaagaaattgagaaaatcaagccactaagctgaagaatttatgaattatgataatagtgatatactgatagctatcatttttatgtaccaataacaataatagctacacatgcctcccaacacatacgcactgataaccatgctagacatattacctatatttagggtccaaaatatactttattatctctattttaaagaaaaacagactgagttgtaatgggattaactaatttgcccatggttatcaaaataatttttaaacaagaacccataagaagttcctttactggaagaactgcctaaggcataattccaaaatatgtatcacaaaaaaaa

SEQ ID NO: 550375 - DNA, 2790 bp, Homo sapiens
  misc_feature 996, 997, 998, 999, 1000, 1001, 1002, 1003, 1004, 1005, 1006,1007, 1008, 1009, 1010, 1011, 1012, 1013, 1014, 1015, 1016,1017, 1018, 1019, 1020, 1021, 1022, 1023, 1024, 1025, 1026,1027, 1028, 1029, 1030, 1031, 1032, 1033, 1034, 1035: n = A,T,C or G
  misc_feature 1036, 1037, 1038, 1039, 1040, 1041, 1042, 1043, 1044, 1045,1046, 1047, 1048, 1049, 1050, 1051, 1052, 1053, 1054, 1055,1056, 1057, 1058, 1059, 1060, 1061, 1062, 1063, 1064, 1065,1066, 1067, 1068, 1069, 1070, 1071, 1072, 1073, 1074: n = A,T,C or G
  misc_feature 1075, 1076, 1077, 1078, 1079, 1080, 1081, 1082, 1083, 1084,1085, 1086, 1087, 1088, 1089, 1090, 1091, 1092, 1093, 1094,1095: n = A,T,C or G
taaggccaaactcctccctccaacctccctatcagcaacccctgtgacttcttgataatatggatgatctagaattctctccttttcgatttatgatttggctggcattcatataaaatgtcaaactgctagttcagatgtgagaaagttgcatttttttttccaaactgtctttcatatacaggttaattcctgcagtgaccagaaactaagagtgggggttgaaagcaaaggagagaaatgaaatataccaagaaatcacagaataagcatttaattatgacccacttattattttcaacagcatgacccctctggacaacattcttaacaactttcaagtttaattttacctgtcaccactctctcggtgacttcaaatcatcccagtaacttttactttttctttgcctctctttggtttttgtttgtttgtttgtttctggaataaacagtgaaaggccctttgggcaagtccaggtactgacctgcacaaagtgaagcttgtaataggcaaataaactccagataaatgagattcatttcttttaactgttcatgacttcaacttggcttgcatttctacttcaacaatatttgatatacatcaggtgtgaacattgtttcttcttttgttcttgcagcaggtgaataaggtgggatttgaaatcagcatggcagtgtccagtggaagaagggagctgaagtttcttgagggtgagtcatgtgctacactccttatcttcattagtccattggatctcatgttggctccataatataaagaaagtttatgagcaaagaaatctgtgagtgcattttttcttgtactaactggtttgttactcgcttagctgtagagtttgaatctaaatagagttaaagttatggttaggattcagtttaaggccagggactcagggtcagaatgaactctattttcttttttaatatcaactatttaatcttttttttggctttttttattatactttnnnnnnnnnnnnnnnnnnnnnnnnnnnnnnnnnnnnnnnnnnnnnnnnnnnnnnnnnnnnnnnnnnnnnnnnnnnnnnnnnnnnnnnnnnnnnnnnnnnnctgtggtttttttctcttgggtctagactctcatatccaagcttgtatgccctccattgtactcagcagatttctagaagctattaagaaggtggggaggaggtcaggcacagtggcttatgcctgtaactccagcacttagggaggccaagaggagtggattgcttgagccaaggagtttgagaccagtctgggcaacatggcaaaaccccatgtctacacctaatacaaaaattaaccgggtgtgctggtgcatgcctgtagtcccaactacttgggaggctgaggagggagaatcccttgagctggggaggtcaaggctgcagtgagccgtgattgcacaactgcactccagtctgggtgacagagagacaccctgtctcaaaaataaggtggggaggaaaaaggatccctaggggtgttaaatctgaccttgactaaccactgacatctctgcgaacaaagctcttggcccaaaggtttatgatgcattttttgtactttattaataaaaatggctacaatatcaggggaactaggacaaaatggctaaatacccaacctaactcataaaagaaattcttttaagaattattttatgcacaaatcatggttgaactacaaggaattaaaatgaaacattcttgggaattgaggtgtgtgtgtgcgcatgcgtgcgtgcacrtgctaagatactgaaatatgtcaagccatacaagaattcgcttctgtggacataattcacttatgccaagatacaaggagaaattactaacatttagaagaggaaaagccaggtaatggagtggcagtgaggagacggcaatgtcttctccagaaaaaaaaaatatgtagggaaagattagcagagtcttgaatgtgtcagaaagagtcatcctctagataaaggttacagggattatgtcagagaaagggaaggagggcagaggccccgggacaacacagcagtgggaagagttggaaatcaagggagcagacagggtctccggaggattctcaagcactttgatgcaagaattatttccttttcagtgatacccaaacaagcattgctaattcctagctctaaatagtaaacccaaaactcactgagttctttataatttttatttctgtaacctactttcaatatttaggtcatggagttttgttttttccaaatgaatattatttcttttttgtactttgaaaattaccatcctcccagcaagtctgatacagctatctgcataaaatggggggtctggataaggactgtgcagctgggatctaaagagaaaaagctaatgctgaatttctgtcataccaaataagattatgcaacaccaaaaataagttgcggctgggagcagtggctcacacctgtaatcccagcactttgggaggccgagatgggcagattacttgaggccagaagtttgagaccagcctggccaatatggcaaaacctcgtctctactaaaaatacaaaaatttgccaggtgtggtggtgtgcgcctgtaataccagctccttgggaggctgaggcatgagacttgcttgaacccaggaggcagacattgcagtgagccaagattgtaccactgcacgccagcctgggtgatagaatgagattctatctaaaaaaagtctatatcttttatataaaagataaaagttgcatgcatggcttta

SEQ ID NO: 550376 - DNA, 2790 bp, Homo sapiens
  misc_feature 996, 997, 998, 999, 1000, 1001, 1002, 1003, 1004, 1005, 1006,1007, 1008, 1009, 1010, 1011, 1012, 1013, 1014, 1015, 1016,1017, 1018, 1019, 1020, 1021, 1022, 1023, 1024, 1025, 1026,1027, 1028, 1029, 1030, 1031, 1032, 1033, 1034, 1035: n = A,T,C or G
  misc_feature 1036, 1037, 1038, 1039, 1040, 1041, 1042, 1043, 1044, 1045,1046, 1047, 1048, 1049, 1050, 1051, 1052, 1053, 1054, 1055,1056, 1057, 1058, 1059, 1060, 1061, 1062, 1063, 1064, 1065,1066, 1067, 1068, 1069, 1070, 1071, 1072, 1073, 1074: n = A,T,C or G
  misc_feature 1075, 1076, 1077, 1078, 1079, 1080, 1081, 1082, 1083, 1084,1085, 1086, 1087, 1088, 1089, 1090, 1091, 1092, 1093, 1094,1095: n = A,T,C or G
taaggccaaactcctccctccaacctccctatcagcaacccctgtgacttcttgataatatggatgatctagaattctctccttttcgatttatgatttggctggcattcatataaaatgtcaaactgctagttcagatgtgagaaagttgcatttttttttccaaactgtctttcatatacaggttaattcctgcagtgaccagaaactaagagtgggggttgaaagcaaaggagagaaatgaaatataccaagaaatcacagaataagcatttaattatgacccacttattattttcaacagcatgacccctctggacaacattcttaacaactttcaagtttaattttacctgtcaccactctctcggtgacttcaaatcatcccagtaacttttactttttctttgcctctctttggtttttgtttgtttgtttgtttctggaataaacagtgaaaggccctttgggcaagtccaggtactgacctgcacaaagtgaagcttgtaataggcaaataaactccagataaatgagattcatttcttttaactgttcatgacttcaacttggcttgcatttctacttcaacaatatttgatatacatcaggtgtgaacattgtttcttcttttgttcttgcagcaggtgaataaggtgggatttgaaatcagcatggcagtgtccagtggaagaagggagctgaagtttcttgagggtgagtcatgtgctacactccttatcttcattagtccattggatctcatgttggctccataatataaagaaagtttatgagcaaagaaatctgtgagtgcattttttcttgtactaactggtttgttactcgcttagctgtagagtttgaatctaaatagagttaaagttatggttaggattcagtttaaggccagggactcagggtcagaatgaactctattttcttttttaatatcaactatttaatcttttttttggctttttttattatactttnnnnnnnnnnnnnnnnnnnnnnnnnnnnnnnnnnnnnnnnnnnnnnnnnnnnnnnnnnnnnnnnnnnnnnnnnnnnnnnnnnnnnnnnnnnnnnnnnnnnctgtggtttttttctcttgggtctagactctcatatccaagcttgtatgccctccattgtactcagcagatttctagaagctattaagaaggtggggaggaggtcaggcacagtggcttatgcctgtaactccagcacttagggaggccaagaggagtggattgcttgagccaaggagtttgagaccagtctgggcaacatggcaaaaccccatgtctacacctaatacaaaaattaaccgggtgtgctggtgcatgcctgtagtcccaactacttgggaggctgaggagggagaatcccttgagctggggaggtcaaggctgcagtgagccgtgattgcacaactgcactccagtctgggtgacagagagacaccctgtctcaaaaataaggtggggaggaaaaaggatccctaggggtgttaaatctgaccttgactaaccactgacatctctgcgaacaaagctcttggcccaaaggtttatgatgcattttttgtactttattaataaaaatggctacaatatcaggggaactaggacaaaatggctaaatacccaacctaactcataaaagaaattcttttaagaattattttatgcacaaatcatggttgaactacaaggaattaaaatgaaacattcttgggaattgaggtgtgtgtgtgcgcatgcgtgcgtgcacatgctaagatactgaaatatgtcaagccatacaagaattcgcttctgtggacataattcacttatgccaagatacaaggagaaattactaacatttagaagaggaaaagccaggtaatggagtggcagtgaggagacggcaatgtcttctccagaaaaaaaaaatatgtagggaaagattagcagagtcttgaatgtgtcagaaagagtcatcctctagataaaggttacagggattatgtcagagaaagggaaggagggcagaggccccgggacaacacagcagtgggaagagttggaaatcaagggagcagacagggtctccggaggattctcaagcactttgatgcaagaattatttccttttcagtgatacccaaacaagcattgctaattcctagctctaaatagtaaacccaaaactcactgagttctttataatttttatttctgtaacctactttcaatatttaggtcatggagttttgttttttccaaatgaatattatttcttttttgtactttgaaaattaccatcctcccagcaagtctgatacagctatctgcataaaatggggggtctggataaggactgtgcagctgggatctaaagagaaaaagctaatgctgaatttctgtcataccaaataagattatgcaacaccaaaaataagttgcggctgggagcagtggctcacacctgtaatcccagcactttgggaggccgagatgggcagattacttgaggccagaagtttgagascagcctggccaatatggcaaaacctcgtctctactaaaaatacaaaaatttgccaggtgtggtggtgtgcgcctgtaataccagctccttgggaggctgaggcatgagacttgcttgaacccaggaggcagacattgcagtgagccaagattgtaccactgcacgccagcctgggtgatagaatgagattctatctaaaaaaagtctatatcttttatataaaagataaaagttgcatgcatggcttta

SEQ ID NO: 550377 - DNA, 2790 bp, Homo sapiens
  misc_feature 996, 997, 998, 999, 1000, 1001, 1002, 1003, 1004, 1005, 1006,1007, 1008, 1009, 1010, 1011, 1012, 1013, 1014, 1015, 1016,1017, 1018, 1019, 1020, 1021, 1022, 1023, 1024, 1025, 1026,1027, 1028, 1029, 1030, 1031, 1032, 1033, 1034, 1035: n = A,T,C or G
  misc_feature 1036, 1037, 1038, 1039, 1040, 1041, 1042, 1043, 1044, 1045,1046, 1047, 1048, 1049, 1050, 1051, 1052, 1053, 1054, 1055,1056, 1057, 1058, 1059, 1060, 1061, 1062, 1063, 1064, 1065,1066, 1067, 1068, 1069, 1070, 1071, 1072, 1073, 1074: n = A,T,C or G
  misc_feature 1075, 1076, 1077, 1078, 1079, 1080, 1081, 1082, 1083, 1084,1085, 1086, 1087, 1088, 1089, 1090, 1091, 1092, 1093, 1094,1095: n = A,T,C or G
taaggccaaactcctccctccaacctccctatcagcaacccctgtgacttcttgataatatggatgatctagaattctctccttttcgatttatgatttggctggcattcatataaaatgtcaaactgctagttcagatgtgagaaagttgcatttttttttccaaactgtctttcatatacaggttaattcctgcagtgaccagaaactaagagtgggggttgaaagcaaaggagagaaatgaaatataccaagaaatcacagaataagcatttaattatgacccacttattattttcaacagcatgacccctctggacaacattcttaacaactttcaagtttaattttacctgtcaccactctctcggtgacttcaaatcatcccagtaacttttactttttctttgcctctctttggtttttgtttgtttgtttgtttctggaataaacagtgaaaggccctttgggcaagtccaggtactgacctgcacaaagtgaagcttgtaataggcaaataaactccagataaatgagattcatttcttttaactgttcatgacttcaacttggcttgcatttctacttcaacaatatttgatatacatcaggtgtgaacattgtttcttcttttgttcttgcagcaggtgaataaggtgggatttgaaatcagcatggcagtgtccagtggaagaagggagctgaagtttcttgagggtgagtcatgtgctacactccttatcttcattagtccattggatctcatgttggctccataatataaagaaagtttatgagcaaagaaatctgtgagtgcattttttcttgtactaactggtttgttactcgcttagctgtagagtttgaatctaaatagagttaaagttatggttaggattcagtttaaggccagggactcagggtcagaatgaactctattttcttttttaatatcaactatttaatcttttttttggctttttttattatactttnnnnnnnnnnnnnnnnnnnnnnnnnnnnnnnnnnnnnnnnnnnnnnnnnnnnnnnnnnnnnnnnnnnnnnnnnnnnnnnnnnnnnnnnnnnnnnnnnnnnctgtggtttttttctcttgggtctagactctcatatccaagcttgtatgccctccattgtactcagcagatttctagaagctattaagaaggtggggaggaggtcaggcacagtggcttatgcctgtaactccagcacttagggaggccaagaggagtggattgcttgagccaaggagtttgagaccagtctgggcaacatggcaaaaccccatgtctacacctaatacaaaaattaaccgggtgtgctggtgcatgcctgtagtcccaactacttgggaggctgaggagggagaatcccttgagctggggaggtcaaggctgcagtgagccgtgattgcacaactgcactccagtctgggtgacagagagacaccctgtctcaaaaataaggtggggaggaaaaaggatccctaggggtgttaaatctgaccttgactaaccactgacatctctgcgaacaaagctcttggcccaaaggtttatgatgcattttttgtactttattaataaaaatggctacaatatcaggggaactaggacaaaatggctaaatacccaacctaactcataaaagaaattcttttaagaattattttatgcacaaatcatggttgaactacaaggaattaaaatgaaacattcttgggaattgaggtgtgtgtgtgcgcatgcgtgcgtgcacatgctaagatactgaaatatgtcaagccatacaagaattcgcttctgtggacataattcacttatgccaagatacaaggagaaattactaacatttagaagaggaaaagccaggtaatggagtggcagtgaggagacggcaatgtcttctccagaaaaaaaaaatatgtagggaaagattagcagagtcttgaatgtgtcagaaagagtcatcctctagataaaggttacagggattatgtcagagaaagggaaggagggcagaggccccgggacaacacagcagtgggaagagttggaaatcaagggagcagacagggtctccggaggattctcaagcactttgatgcaagaattatttccttttcagtgatacccaaacaagcattgctaattcctagctctaaatagtaaacccaaaactcactgagttctttataatttttatttctgtaacctactttcaatatttaggtcatggagttttgttttttccaaatgaatattatttcttttttgtactttgaaaattaccatcctcccagcaagtctgatacagctatctgcataaaatggggggtctggataaggactgtgcagctgggatctaaagagaaaaagctaatgctgaatttctgtcataccaaataagattatgcaacaccaaaaataagttgcggctgggagcagtggctcacacctgtaatcccagcactttgggaggccgagatgggcagattacttgaggccagaagtttgagaccagcctggccaatatggcaaaacctcgtctctactaaaaatacaaaaatttgccaggtgtggtggtgtgcgcctgtaataccagctccttgggaggctgaggcatgagacttgcttgaacccaggaggcagacattgcagtgagccaagattgtaccactgcackccagcctgggtgatagaatgagattctatctaaaaaaagtctatatcttttatataaaagataaaagttgcatgcatggcttta

SEQ ID NO: 550378 - DNA, 659 bp, Homo sapiens
gatcatccaagtggaagaagcattcaacaattagacagataggatgagccaaccagtggatatcagccagtgtccttccttgaccacctgagcctgagtgttgtgcaaggggcctatgaacagaccaaccatgamagcagagatggaggatatgcatagtcttactagcatgggctccttctcactaaggctaatctaactactgccactgatgaatgccaaaactaacagcagtagaggctgaaaatgagccttcgaaatggtaccatgagatcaactaaccacttcgtggcagattaactacaccaggcttatcttattgaacatagggcagaaattgtctgtataagaatagatacccactctagctatgggtttatcctctttctgctttgcctgtagccagcactaccaattatggacttaaagaatacgtaacttgctaaaatgctatctacatgtcaccttggactaagagactcatgaaagtgctgtaacaatgagtacatgacttcaggacatttgaacatgtaaataatctactaaaggcttaattaaaggagccaactccaaaacaatgacctgcaagactaggacactgtcctacaggatgaggtatatgaagctgggtcactgatagctagaatgtacaggtccaa

SEQ ID NO: 550379 - DNA, 659 bp, Homo sapiens
gatcatccaagtggaagaagcattcaacaattagacagataggatgagccaaccagtggatatcagccagtgtccttccttgaccacctgagcctgagtgttgtgcaaggggcctatgaacagaccaaccatgacagcagagatggaggatatgcatagtcttactagcatgggctccttctcactaaggctaatctaactactgccactgatgaatgccaaaactaacagcagtagaggctgaaaatgagccttcgaaatggtaccrtgagatcaactaaccacttcgtggcagattaactacaccaggcttatcttattgaacatagggcagaaattgtctgtataagaatagatacccactctagctatgggtttatcctctttctgctttgcctgtagccagcactaccaattatggacttaaagaatacgtaacttgctaaaatgctatctacatgtcaccttggactaagagactcatgaaagtgctgtaacaatgagtacatgacttcaggacatttgaacatgtaaataatctactaaaggcttaattaaaggagccaactccaaaacaatgacctgcaagactaggacactgtcctacaggatgaggtatatgaagctgggtcactgatagctagaatgtacaggtccaa

SEQ ID NO: 550380 - DNA, 1195 bp, Homo sapiens
tatagacttgaggatattcagtttcattataattactgtactgatgaataacttttgtatgaaaatagtatatcacataacttgcaaagcactttactttttattatataatttcacagataattcattattgttttattctccaaacatgtcccaatacgtggaagagatgatatatattttccctaaataatacttttaaggtatttaaacagaacctaacaccattttagaatagagccatgcaatgatttcttcaggattattaagtaatccattctatttaccatagagcaaacacccagctcatttgaaattgtttgcttgtttgttttttagagatggggtcttgccgtgttgcccaggctggattagaattcctgggctcaaaagattctgctgtttcagcctcatcagtagctgagactataaacatgtaccacctcacccagctgaaataagattttaaatttgaaagtagacctcacctttcaaggacatctttattagagagcatgttgatactctctagtggcttgggccagatggccctataattctccccccttcaggttctataatgcatggagatggaagagaatgaataaagagaacgtcagaaaggctcaagtgtcaaaagagaaatgtaccaattatactgcttcccttagcaaaagtgaacctgggattagcatggcagcgatggaggtcacatctgtctgtgaggagcagagacatcattaaatagcttttgttttatcaatgaataatgtcatctggcttttcttcccttaaactagagctaattgatcagctctctcttcctcaaaaaaggtgttatcttacacattaactgcaaagcactttcaaagtttttcctcgagcagcccacagcaaccaaggaaagaaactccacatgtgcacaggaagttgggatgaccctgaatctaatataagagcatgycatgcaaaattaaactggggggcattctccaaaagaagtggcctgtattcttcaaaacttccaggatctttaaggacaatgaaaggctgcagttctgatgaaaggagacgaaggagacatgacagctccatgcactgtgtggtcccctttggatcctggatcagagaaaaaatatctataaagaacatgaatatggcaattgataaaaattgaatgtgcactgtagattat

SEQ ID NO: 550381 - DNA, 2056 bp, Homo sapiens
ggctaatgatagcaataacagtttgtatctgacagacacaactagatatatgcagtgagaaactatatttgaacacagattatactggatctatataatttcctcttctattgcttgacctgtcatcacagtctctctcagtgaagtttatgttttattttttaaagaaaaaacaattgtttttgaaaaaaatggttacacaattgaaaactatatcaaattagctgttttaattcttctacattctttagaagatattttcatatgtatatgtaatttctagtttgctgtaatcatagcagagatactagaattaattttttcatttaaattcttactgtaaacactgtgttctgaattttctagtgatattgttctatgttcctgttgatacaaaaatttcatttgaattatataaaatactgatgaacaaaataaatttgcttttacttataatctcaccaccatgttataattactattagcaatattttatatgatctttttgtgacaaatgcatatatactcaagtatattcacatattcatatatatatgtgcatgtgcatacacatacaatgatattttattgggtttttccttttcttttttgcttaatgctgcattgtgaaagtagttataacattaatttctctcttgaagtattactttaaatgactgtagattactttattacatagttttatttacaaccaacaacctgatgttgaatatttaatttttttcaattttttagcatattgaagagtatcatgatgaagattttattgtacctctgttcttaattctgaaaataaattcttaatagtaacatttctgggtcaaagcatatgtacatttgataatttaattatgtgtattgcaatttcaaggatcatcactaaaataaaaggaataaaatatataaattctgcacaagaaaaggaaaatgagatgattaaaataatcagcataaaagttaaaaaataagagaaaagcaggctagaatatgtatatcaacaaataccaagaggcagatgtaagtctaaatatattaaaacttacattgaatatgaaaggcctaaattctccagttaaatgacaatattagcagattaaaaaaaaaaactaaatgtatgatacttatgtaagtcatttaaaatagaatggttgaaagtaaaaacacagaagaatatataccatgtaaaccctaataaaataatgctactgcaaatattttaatacaaaaaatttaaatttaaaaaactagatataaaaggattactctttaattataaaaggttccatatgtcacatagccatacaattttacctgtgtatgctgcttaatagcattgcctaaaatacttacaaaagaaaataattatacaaaattatactacctttctcaggaagtgttaggagaggcaacaacaacagcatcaatagacattcgttgatcaacctaagtaacaaaattggtctaatggaagaccaagatccctgtatttaacatttataaataggcattttttcaatatacacagattatttacaactattgataatatagtggccataaaggatatctccattaattttaatgaacagatttcattataaaatatrtcctctgatcacaattcaactaagctaatacaaatagataactaaaaatatcccagtatatttgagaattaagaaataaatattttattacttttaaaaagcaccttgtaataaaattgattttttcctcctgtggcatcacagttttttgtttaatacatgtgtgtaccatcatatttaaatacaaaacaatttaatctccctccaaagtccccctgttccatctctcataactcctgacaaccactgactgcttctgagttcctatagatttggctcttcaagaatgacatataaatggaatcacatagtatgtaacgtcttgagattgacttcttttacacagcataatgcttttaagattcatccaaagtcttgtgtatttcaaaagcacatttcttttccttgctgaatagtattctattgta

SEQ ID NO: 550382 - DNA, 1449 bp, Homo sapiens
aagggagagatcagtccaagatatacacattaaggaaccccatcaacctatagatagtgtttaaaggtatagaactagataaggacatctaacagagaagatagagacaaagacaccgcaggcagagccctggaggaacagcaactttagatgtcacctggagcagaaggaataaaaaatcccagtcacctggggtatgaaatgaaaggcagagatgcagcccagttttcttgtttttaattgtgttgtattttacaactcatttactgaaggtattctaataactaactaaatgagccctgccctttcacaacccacctgcaaaggcagtscaccacaaaaggtatctacttaatgatgcaaacagaaaactccagattacaaatgaaaacaaactaaatcaaaacaaaggagcttcctggaaaatgaccaagcaatactcatgctttgataacttgatagaaaggctgaagatgacagaactagttcccattggggtatgtatttatttatatccagcttacttaaagcctaagccaacaaatctaaacacattgagcattgaatttcccttatatttccctgaattcagtgagaactgattaacccatttagaaagagctaaacctatctttacatgtagctaattatgttctaatgcatacattcagtaatgccatgaggctgtccatctgcaaactgccagaaataagctgcccaaattcagagaacaatttattttaaggctaaaaaatgacactgatttaaagcttgcatttgctgatttgataaactgtaagttgaaacaattacattaatgtagcacatcttaatgcctaagatttttctaaaaagaaaacaaaaagaaatagaaaaagtaattgcctttaactttatgtgttaacagaataacgatgatttaaaagtcagttgtgtttcttttttcttttttttaactacctgaaagtgctgccctagaataaagtgggtggaaaaggatgtgttaaccgttaatctcacctaagtgaatgacagtttccataacactgtttaagggtaagaggtttcgaggattgggaaccaaaagccattttttaagtggtcttcttcaggtatccttttaccaaaagctggtaaaaatagcaaatgaatagggtgatagttcaaaagttaggatagtcaattggtacaaatcatcctagcaggaggaaagactgcactgaatttaggagagaatcatcaacacagagtctagaaaacaaaaagaggcaaaagaccatgaagcaaggcagaggagaactaactttgagaattctgagccttttccacaggaattctttgtcaggaggcctaccttggtccctcaagggctgtggagaatcaggcactaatggtaaatccgttgcctcacagccaggttggatcaatacagtttcctaaagctcttcc

SEQ ID NO: 550383 - DNA, 1363 bp, Homo sapiens
tggaagagaggacacactgccatttaactactcacaatacatttgggttggagcccattccttattataagatagacatcagaatgaaagtaccaggagaaacggcacacaatgagcgagattcttgtttttctgggcgacttaatctggtactaaaatcagattacagttctttttaaaaaaycttcattttctggaaactctgaactatgtattctgctgataaactaattacagcataatgccacaatgcaaattatatttgtcagtatcccgtcttttattacttatcaaatcttataaaaacttcaagaaacgccacgcttaattaaactacctcttttctatttggcttctgacttgtaacatcctgagatatttatgctaatctatcattactcttctaaatacataaaaccattacattgatatttctaacattagcagtaatactcataataataacagaatagctgcatgttccttaatttactttaatgcttttaatctgcagtatttacttaatgaaaagtatgtatttagtttttctaaaaatttctaatggttttaagaattttaaggatttttaaagattgctcccacattcatatcttttttccctgtggaagctatttggctcatgcaatgtgtcaagcaatgtatttgagattggaaaaagaaattagtagccatctgaaatcctggaaaccttgtctaacaccactatggtagatataagcagaaaaaagcttccccctgcctttttttttttaattgaaaacatgggaccttaatctagtgggggtaaaggaagaaaatgagggaagccagcaaagcaaacttcatggaatagctgccttctgagctttattttgagtaaatagtacattctactggtatagagtttttggaggaattttatgctttctgtgcccttaatttcttccttccttgcttgcttcctttctttttctttagtttttttctctctcttttttatcttcctcccttcctctcttcctcctcccttcccccactccttcctttttattctttgtctcattttctttcttttctccctttctcttttcctacctccctcactctttctttctctctcttttctttctctttctttcttgcctgcttactttctccctcctttcccttcctttctcctcccttccttccttccttccgtccttcctttcttctgtcattctcacatttgtaaacatcactgatattatcttagtctttttatttccaggctgaaaatcttataatcatgttagtgtcttctcaccaagtactaaactatcagtaacatggtctgcagttggattaacatgatctgaatttt

SEQ ID NO: 550384 - DNA, 1363 bp, Homo sapiens
tggaagagaggacacactgccatttaactactcacaatacatttgggttggagcccattccttattataagatagacatcagaatgaaagtaccaggagaaacggcacacaatgagcgagattcttgtttttctgggcgacttaatctggtactaaaatcagattacagttctttttaaaaaaccttcattttctggaaactctgaactatgtattctgctgataaactaattacagcataatgccacaatgcaaattatatttgtcagtatcccgtsttttattacttatcaaatcttataaaaacttcaagaaacgccacgcttaattaaactacctcttttctatttggcttctgacttgtaacatcctgagatatttatgctaatctatcattactcttctaaatacataaaaccattacattgatatttctaacattagcagtaatactcataataataacagaatagctgcatgttccttaatttactttaatgcttttaatctgcagtatttacttaatgaaaagtatgtatttagtttttctaaaaatttctaatggttttaagaattttaaggatttttaaagattgctcccacattcatatcttttttccctgtggaagctatttggctcatgcaatgtgtcaagcaatgtatttgagattggaaaaagaaattagtagccatctgaaatcctggaaaccttgtctaacaccactatggtagatataagcagaaaaaagcttccccctgcctttttttttttaattgaaaacatgggaccttaatctagtgggggtaaaggaagaaaatgagggaagccagcaaagcaaacttcatggaatagctgccttctgagctttattttgagtaaatagtacattctactggtatagagtttttggaggaattttatgctttctgtgcccttaatttcttccttccttgcttgcttcctttctttttctttagtttttttctctctcttttttatcttcctcccttcctctcttcctcctcccttcccccactccttcctttttattctttgtctcattttctttcttttctccctttctcttttcctacctccctcactctttctttctctctcttttctttctctttctttcttgcctgcttactttctccctcctttcccttcctttctcctcccttccttccttccttccgtccttcctttcttctgtcattctcacatttgtaaacatcactgatattatcttagtctttttatttccaggctgaaaatcttataatcatgttagtgtcttctcaccaagtactaaactatcagtaacatggtctgcagttggattaacatgatctgaatttt

SEQ ID NO: 550385 - DNA, 550 bp, Homo sapiens
cagggcatttgtgagtgtgatctcattccgtgcctagaaaaaaaatctctaagtattggggaatattattccagttttacaaatgatgaaggtaacttggccaaggacacaaaggtagtgatagagacattattcaaccatggagttgatttccaagtcataaaccctcataaaatacccatggattccacatagggtacagtcttcgtaagaattcactcatgaaatcttatcaatttaaatcaacaacggatgcatagagaaggaaaatggtgscctgttatatagattaagggcatagtttctgaaaccagcttatatagagtgaaaaattgggtttgccacttaacctttgtgtgatcaatgtcacgtagataggtatttattaacatttcagattcctcatgtgagggacagtatccatcttaaggtttgttgtgaggattgaaagtgataatatgcagagaacaaaatttggaacactgcctggcatacagtaaatactcaaaataaatgtcaggtattatgattatttctctagatcaggcag

SEQ ID NO: 550386 - DNA, 646 bp, Homo sapiens
ccacttcccttcttgcttttctaagtggcaacaatcctcagtttgatattcatggcaacccacttaggcatactgtcactcagggatgtgcagtgcagaagcataccctctatcaaggctccttttatatagattgccaaaagcataaatgcatgtgggacactactggtggaagatcatttgcaaactcaatatagtagtgcaagttagagaataggaaacatttattgatccaaacctcagaaaygatcatttctgtatttaaaatgcacaaataaatacatgttttaaaatattttgcagcatatctccatagcccagtgaaattgctccttttttaaatcttagtggccccatgactgatatggtagagcaggctttgactattgggtagttattactgattctaagctattttgcgtaaaatctatctttgtgtaaaatttccttattctggagattaattaaatgtgttattgcctcaactggttcactttgctgtaaagaaacacgaaaagaaactagtgtcttgcaaactttacacagctcctcagttttcatgtcaaaactgggagtcccatttgctaattatttctacttctgatgtctttattagatggatgaaaagagatactttgctgttgac

SEQ ID NO: 550387 - DNA, 590 bp, Homo sapiens
tctgcacttctctctcctgtcaccatgtaaagaaggatgagtttgcttcttcttccaccatgattgtaaggcacctttggtcacctgaaaagatttctttctgttttatctagttgactgtggtagttactgggttccatgctttactctccttcccaaatttttcagaattaattgtgaaaaaatcagctcaagttagttcatctacttgaaaggaatcgaagttaacatcttatataaatcaatgggcattaaattttagttatcattgggatttctgctaccctacagttgtataaaagtcactaaggtatgaaggaaactcctctaatgggggctcaattgccaagaatattcaatacaatgtgtttgctttctctggaccactacaaggaacaccscatctttagtgaccctggaaacccctaaactaatgtctaggcttcttggtgtcctacctttgcaggtgctggtcccaagaggggacagacagatctaccctcttgaggctgaatgaatcttacctctacctctctgcttcttagaggtactctgccctttgtcttccttgtggtactcctagcacaatc

SEQ ID NO: 550388 - DNA, 556 bp, Homo sapiens
aatcctaaggtggagtaaatttaagatggaccttaacacctgcttggagaaacaagactatttttgcattatgaaagcaagagagcctcctgagacactacccaggaggaagcaaagagagccataaaccccggcatgccacggagtttggcacacacttgatcyccctaggatgctggcctgctaaatgaatgactggcaaaaaggaaggaccaaacaaaacaccaaaaatgtgagaagcagtccaatgaggaagaagatcctgtccctccaaattggcaacaattatgtgtgtaagggacagaaacaatagactaagggaacatcagtgtagccttccaaccctgaactttctgcacacattccataagaacttttaaaaggtagaaagaaaaaaaggtgggtgtccgtaaattaaactttcaccctgtatttgctttaagccatgaggcactatgaaaatttacatataactaaaaagcttgttgatttaaaaagttaggctgagccttgctatgtcttctagcagacatctaggtaaaaggccagcagtcca

SEQ ID NO: 550389 - DNA, 566 bp, Homo sapiens
attgctgggtcaaaaggtatttctggttctagatcctacaaagtctagttctttactttgagttctctagacatgattgtatttaaatgtttgagttaatcatgatctgttctgccttgcttaggtatgcagtttggaaattctttgtgatagagggagccttgagtagctatgcagttaaattatcctggagttttgcacaggctaaacagaggtggtttatctctataatacatttgtatgtattcagatataatttatatastgacatgcatctatatatcacaatatatttgatatagacatgatatagacatcatatatatacatatatatgatacatattggcaaaggtggggaatgtccattgttatggttaactatgaaaagcaaactgctgagaaatatctataacatgatcccactgttgtcagaacagatacatgccccatatacatgtctccatatatttgcatttgttcatatgagtttgaaggaatttgccaagaaattcccacttgcttcttaacattgatttcctcagagcaatgggcctatagctggat

SEQ ID NO: 550390 - DNA, 537 bp, Homo sapiens
ctgagattacaggcgtgagccaccrcacctggcccattcttttttatttcaaccatcatccatttgaaatatttactagcactgcttggtgcaaaatatcaaactaacaagaactgaaagactgactctgctcttaggaagcatacaatattgataaggaaataagacgtgaacacaaaaaacataactatcactatgtaccaaatgtggtccaccatagagtcagattcgtggtcctgattctgtattctctggatcgcagtaatcagggtcagctggccagaccatctaggaagaggccatttgtgcagagatatgggtagaatctaaatggggttaacatatgcaagaaagggaatgaaacatgctataagcatttcttttttttgagagggagtctcgctctgtcgctctgccaagtgcagtggtgcgatcttgactcactgcaagctctaccttctggttcaggccattctcctgcctcaggctcctgagtagctgggattacaggcgcctgccaccacgtccagctaatta

SEQ ID NO: 550391 - DNA, 537 bp, Homo sapiens
ctgagattacaggcgtgagccaccgcacctggcccattcttttttatttcaaccatcatccatttgaaatatttactagcactgcttggtgcaaaatatcaaactaacaagaactgaaagactgactctgctcttaggaagcatacaatattgataaggaaataagacgtgaacacaaaaaacataactatcactatgtaccaaatgtggtccaccatagagtcagattcgtggtcctgattctgtattctctggatcgcagtratcagggtcagctggccagaccatctaggaagaggccatttgtgcagagatatgggtagaatctaaatggggttaacatatgcaagaaagggaatgaaacatgctataagcatttcttttttttgagagggagtctcgctctgtcgctctgccaagtgcagtggtgcgatcttgactcactgcaagctctaccttctggttcaggccattctcctgcctcaggctcctgagtagctgggattacaggcgcctgccaccacgtccagctaatta

SEQ ID NO: 550392 - DNA, 610 bp, Homo sapiens
aaatgctttgagcttctcagaagaaagccactaaaattaccaggagtaaatcggggacattatgcagttaaaggggactttttgtttccataatgctttgcagctatgaactgttcttctcatattgtgatcctgggtagtagctccacttggagtttcactgcttaaacagaagataataaaattggagaacaaaatgasaccccaaggacatacatatggtgagttctatgttaacacaaaccagagctaaaaaaggggtctgggactgggaggtaccaaagaagtttgattaatgtagaaagcccacctgcataattaaagcaaacaaactgaagaagcaaacaaaccccccaccacttcacatctataggattgaactttgccagattttcatttcactttgtggttggtaggaactcagatggaggctcatctttttaaagcaaaaatcaaacacccaggagagttatgtgacgtgcgaggcttagcagacaagcagtagaggtatacttaaacacttgcaggcctggaaagtctaagatggaaaaaaaggaaagcaacactgcggggcttcttgtcctgcagctctcattgaacaggctgagca

SEQ ID NO: 550393 - DNA, 610 bp, Homo sapiens
aaatgctttgagcttctcagaagaaagccactaaaattaccaggagtaaatcggggacattatgcagttaaaggggactttttgtttccataatgctttgcagctatgaactgttcttctcatattgtgatcctgggtagtagctccacttggagtttcactgcttaaacagaagataataaaattggagaacaaaatgacaccccaaggacatacatatrgtgagttctatgttaacacaaaccagagctaaaaaaggggtctgggactgggaggtaccaaagaagtttgattaatgtagaaagcccacctgcataattaaagcaaacaaactgaagaagcaaacaaaccccccaccacttcacatctataggattgaactttgccagattttcatttcactttgtggttggtaggaactcagatggaggctcatctttttaaagcaaaaatcaaacacccaggagagttatgtgacgtgcgaggcttagcagacaagcagtagaggtatacttaaacacttgcaggcctggaaagtctaagatggaaaaaaaggaaagcaacactgcggggcttcttgtcctgcagctctcattgaacaggctgagca

SEQ ID NO: 550394 - DNA, 610 bp, Homo sapiens
aaatgctttgagcttctcagaagaaagccactaaaattaccaggagtaaatcggggacattatgcagttaaaggggactttttgtttccataatgctttgcagctatgaactgttcttctcatattgtgatcctgggtagtagctccacttggagtttcactgcttaaacagaagataataaaattggagaacaaaatgacaccccaaggacatacatatggtgagttctatgttaacacaaaccagagctaaaaaaggggtctgggactgggaggtaccaaagaagtttgattaatgtagaaagcccacctgcataattaaagcaaacaaactgaagaagcaaacaaaccccccaccacttcacatctataggattgaactttgccagattttcatttcactttgtggttggtaggaactcagatggaggctcatctttttaaagcaaaaatcaaacacccaggagagttatgtgacgtgcgaggcttagcagacaagcagtagaggtatacttaaacacttgcaggcctggaaagtctaagatggaaaaaaaggaaagcaacactgcggggcttcttgtcctgcagctctcattgaacaggctgrgca

SEQ ID NO: 550395 - DNA, 603 bp, Homo sapiens
taccaagggagattaaagaaaagggggaataagcctttctactataatggttttacttcaatttttaaaaaatagaatgctttcccattattgcttctttgcttctggtaaccagtmttcaggagtaattagtttgataattagttcgagatgtcatttaaaaagaagcaatttttaatggactaacttgaaaacaatcttttatcttatgctggatgatttttcttaatgaattaaataaacaatttctatgcttacagaaagtaaacagacccattcccaaaaggataaactctcttgccatctagggagtttcagatctgtttagggaactaagatagtgaaacaatagcactgaggaggctattgatagacgatgtgtcactggggtgttgtagacattaatcatgaatgctgaagaaattcaagaggtaaagtctgttgggggcaatttcattttcaaatgaatataatttcgttgggggacattcttcatgggataaaactcgacttctttaaagctgtaccctattaatccacagtgcaacccaaagactggaaaagcaaagtgaaaggcctctggttcataacccttgtccctga

SEQ ID NO: 550396 - DNA, 603 bp, Homo sapiens
taccaagggagattaaagaaaagggggaataagcctttctactataatggttttacttcaatttttaaaaaatagaatgctttcccattattgcttctttgcttctggtaaccagtattcaggagtaattagtttgataattagttcgagatgtcatttaaaaagaagcaatttttaatggactaacttgaaaacaatcttttatcttatgctggatgatttttcttaatgaattaaataaacaatttctatgcttacagaaagtaaacagacccattcccaaaaggataaactctcttgccatctagggagtttcagatctgtttagggaactaagatagtgaaacaatagcactgaggaggctattgatagacgatgtgtcactggggtgttgtagacattaatcatgaatgctgaagaaattcaagaggtaaagtctgttgggggcaatttcattttcaaatgaatataatttcgttgggggacattcttcatgggataaaactcgacttctttaaagctgtamcctattaatccacagtgcaacccaaagactggaaaagcaaagtgaaaggcctctggttcataacccttgtccctga

SEQ ID NO: 550397 - DNA, 613 bp, Homo sapiens
agactatgtactgtattttagagtgatagttcatgtccagtgaagtaattctattgaatttcaagtaaaggagcgttataactagataataataacaaataaaactgtgatttagtctaggttttcagcttgtatgaaagaagaaatatacaaattcagagttgattttttaatatcaaaatgcatatttgaaaacaaaataaatatttaaaaatttaaaaaatgcctatttgatttttataaattggtttttaaaagtcatccagtgaaagagccaacrtatttgcattctgcctatagaagtttatgaagtaacgacgtcagtctttattttattagtgactacaggaacagctatttctgcaacagctggttgtccttgatcatttttctctcgatttcacaggttatgtgatagtgtctgtgcaatcagtaagaagtatatttcaggcgattgcattgaatagcgtttcctaattgaggtttataccccagctggcaatttcctaggtctatctgctgaaactttggtcttttcatgaagctatgagctagctgggtagagttcagctccactgacacatggagaaaatgtgtggccacttggacgctt

SEQ ID NO: 550398 - DNA, 621 bp, Homo sapiens
taaagttccacataccgttacagagagagactgatgagactgaaaaagaccatcccacacctgttagtctggttctcatggtgagtgctcctggcctgaataaatatttccacctaagtcctataatcagcctgtggggagcatttcgtattacagtttttgttgtgctctgtcttagtgtgggtgtccctaaacctggagataaggattcaaatgcaagtarcttatttgggaatggagataagggaggggatctaacacagggaaggcagccagcgaagggtgtgttaagttaccttcatggtgactaggactggatctgtgggaagaccctgggaggtaaatgccccagatagtccattcaagaggtgagggagctggggtatttctacacgaattccctccacccagccattgctgagggctgcaggcagcggtataaattcccaagcacccctgtctttcctcaggggtgggtagaccaggtttctgcaattatgcagaaagacccccacacaaagatgcaaatcctggcagctggaaatctctggagcccaaagaagtggcagggtctgaggataccagagagatgtgaaagctatactctgtgtggttgttgtt

SEQ ID NO: 550399 - DNA, 621 bp, Homo sapiens
taaagttccacataccgttacagagagagactgatgagactgaaaaagaccatcccacacctgttagtctggttctcatggtgagtgctcctggcctgaataaatatttccacctaagtcctataatcagcctgtggggagcatttcgtattacagtttttgttgtgctctgtcttagtgtgggtgtccctaaacctggagataaggattcaaatgcaagtagcttatttgggaatggagataagggaggggawctaacacagggaaggcagccagcgaagggtgtgttaagttaccttcatggtgactaggactggatctgtgggaagaccctgggaggtaaatgccccagatagtccattcaagaggtgagggagctggggtatttctacacgaattccctccacccagccattgctgagggctgcaggcagcggtataaattcccaagcacccctgtctttcctcaggggtgggtagaccaggtttctgcaattatgcagaaagacccccacacaaagatgcaaatcctggcagctggaaatctctggagcccaaagaagtggcagggtctgaggataccagagagatgtgaaagctatactctgtgtggttgttgtt

SEQ ID NO: 550400 - DNA, 621 bp, Homo sapiens
taaagttccacataccgttacagagagagactgatgagactgaaaaagaccatcccacacctgttagtctggttctcatggtgagtgctcctggcctgaataaatatttccacctaagtcctataatcagcctgtggggagcatttcgtattacagtttttgttgtgctctgtcttagtgtgggtgtccctaaacctggagataaggattcaaatgcaagtagcttatttgggaatggagataagggaggggatctaacacagggaaggcagccagcgaagggtgtgttaagttaccttcatggtgacyaggactggatctgtgggaagaccctgggaggtaaatgccccagatagtccattcaagaggtgagggagctggggtatttctacacgaattccctccacccagccattgctgagggctgcaggcagcggtataaattcccaagcacccctgtctttcctcaggggtgggtagaccaggtttctgcaattatgcagaaagacccccacacaaagatgcaaatcctggcagctggaaatctctggagcccaaagaagtggcagggtctgaggataccagagagatgtgaaagctatactctgtgtggttgttgtt

SEQ ID NO: 550401 - DNA, 621 bp, Homo sapiens
taaagttccacataccgttacagagagagactgatgagactgaaaaagaccatcccacacctgttagtctggttctcatggtgagtgctcctggcctgaataaatatttccacctaagtcctataatcagcctgtggggagcatttcgtattacagtttttgttgtgctctgtcttagtgtgggtgtccctaaacctggagataaggattcaaatgcaagtagcttatttgggaatggagataagggaggggatctaacacagggaaggcagccagcgaagggtgtgttaagttaccttcatggtgactaggactggatctgtgggaagaccctgggaggtaaaygccccagatagtccattcaagaggtgagggagctggggtatttctacacgaattccctccacccagccattgctgagggctgcaggcagcggtataaattcccaagcacccctgtctttcctcaggggtgggtagaccaggtttctgcaattatgcagaaagacccccacacaaagatgcaaatcctggcagctggaaatctctggagcccaaagaagtggcagggtctgaggataccagagagatgtgaaagctatactctgtgtggttgttgtt

SEQ ID NO: 550402 - DNA, 621 bp, Homo sapiens
taaagttccacataccgttacagagagagactgatgagactgaaaaagaccatcccacacctgttagtctggttctcatggtgagtgctcctggcctgaataaatatttccacctaagtcctataatcagcctgtggggagcatttcgtattacagtttttgttgtgctctgtcttagtgtgggtgtccctaaacctggagataaggattcaaatgcaagtagcttatttgggaatggagataagggaggggatctaacacagggaaggcagccagcgaagggtgtgttaagttaccttcatggtgactaggactggatctgtgggaagaccctgggaggtaaatgccccagatagtccattcaagaggtgagggagctggggtatttctacacgaattccctccacccagccattgctgagggctgcaggcagcggtataaattcccaagcacccctgtctttcctcaggggtgggtagaccaggtttctgcaattatgcagaaagacccccamacaaagatgcaaatcctggcagctggaaatctctggagcccaaagaagtggcagggtctgaggataccagagagatgtgaaagctatactctgtgtggttgttgtt

SEQ ID NO: 550403 - DNA, 533 bp, Homo sapiens
actaggtgtgaatcctttctctaggtgagtagctgcatggtgtgccaatcctgccttacagagcccacatctagaggcctcaagaagagactgggcagtgggaacacaaccggcttgtgtcctccccacgagcgtttccccgttcagggacaggggacacgagcagtgagcatgacaaatgaagcacagtgaaggaaggggaagtgggtgacttcagaccaagaggctactgtggtcatgtgcagtggggccgcttctgataggggaagcrcaagaggcagtgtgggccagggagaatgtcctggatctggcattcctgcatcttgcccccactcacactgcctggtaacaatgtacccaaccacacaacttctggcctccatgtcactacgccctcaggcatctagatgcgcagcctggggatgggggcatttaataatagacagatgtctgaggcagatgtcgtcagacttccaggcacaacgtgcctcattgtggagcaattagggcagtcatcggcaaaaaactaaaga

SEQ ID NO: 550404 - DNA, 555 bp, Homo sapiens
tagatacacttactgtatagatataagtaagtatagatatacttaactgttgtgttacaattgyctacagtattcagtacagtaacatgctgcacaggtttgtagcctaggaggaataggctataccacctaacctagatatgtaatcagctatagcatctaggtttgtgtaagtaaactctgtgatgttcacacaataataaaatcgtccagcaatgcatttctcagacacacccctgtcattaagtgacacatgactgtattagttaacactatgggaacttcatgggaaatggacactctagctccaccataaatagaaactgtttatgtcaaaaaacacataaaagcatagttgcaagattacatttccttccagatatttcatttagtatctccacagatcactaacttcctgaatagcattcttgtgtctccactgcctcacatttgatttcaggtcattccatcaattgtcaaagacgcatccaacattaacttcccaactactggtttggattgtgtcaacattgtcattctgggccacaacaacac

SEQ ID NO: 550405 - DNA, 555 bp, Homo sapiens
tagatacacttactgtatagatataagtaagtatagatatacttaactgttgtgttacaattgtctacagtattcagtacagtaacatgctgcacaggtttgtagcctaggaggaataggctataccacctaacctagatatgtaatcagctatagcatctaggtttgtgtaagtaaactctgtgatgttcacacaataataaaatcgtccagcaatgcatttctcagacacacccctgtcattaagtgacacatgactgtattagttaacactawgggaacttcatgggaaatggacactctagctccaccataaatagaaactgtttatgtcaaaaaacacataaaagcatagttgcaagattacatttccttccagatatttcatttagtatctccacagatcactaacttcctgaatagcattcttgtgtctccactgcctcacatttgatttcaggtcattccatcaattgtcaaagacgcatccaacattaacttcccaactactggtttggattgtgtcaacattgtcattctgggccacaacaacac

SEQ ID NO: 550406 - DNA, 628 bp, Homo sapiens
tctcttgttgcaagaaatggtccatctgtgatttcaagtctctcgcttgagtgaattggatggaagtggtgaatttcagccaaagtggccaaagaaatcctgttcctgtgataatgacgccatcagcctctgcayctctgtcttcccttctgccacatgttgcctgttctccgtgactttggtaagagcttccttgtgtatgaggatgatgtccaggatgttggtctggtgtccctgagacagcactaacaggtccatggctgggtccaggtcattcctggactcattggcaaagagcttactgatgttcttgaaggcatctctggtgaagtggatggcctagtcaagttccaaggcctggctgaagctgaagaaaaactggccacctcctgatgctctttctaaaagcctgtcactgtcatctgcttgcttgtcaactcattggctgtgaggatgagctgagtggcctgtgtccatcttcttggggaagcatttgaagccatcagtcttgctctcccacccctaaaggttgagggtcaccacctggggttgtgctgagggtcagaaagaagccagcactcactatctcatccttctcagccttcctcttgcactctctccaggctgt

SEQ ID NO: 550407 - DNA, 628 bp, Homo sapiens
tctcttgttgcaagaaatggtccatctgtgatttcaagtctctcgcttgagtgaattggatggaagtggtgaatttcagccaaagtggccaaagaaatcctgttcctgtgataatgacgccatcagcctctgcatctctgtcttcccttctgccacatgttgcctgttctccgtgactttggtaagagcttccttgtgtatgaggatgatgtccaggatgttggtctggtgtccctgagacagcactaacaggtccatggctgggtccaggtcmttcctggactcattggcaaagagcttactgatgttcttgaaggcatctctggtgaagtggatggcctagtcaagttccaaggcctggctgaagctgaagaaaaactggccacctcctgatgctctttctaaaagcctgtcactgtcatctgcttgcttgtcaactcattggctgtgaggatgagctgagtggcctgtgtccatcttcttggggaagcatttgaagccatcagtcttgctctcccacccctaaaggttgagggtcaccacctggggttgtgctgagggtcagaaagaagccagcactcactatctcatccttctcagccttcctcttgcactctctccaggctgt

SEQ ID NO: 550408 - DNA, 628 bp, Homo sapiens
tctcttgttgcaagaaatggtccatctgtgatttcaagtctctcgcttgagtgaattggatggaagtggtgaatttcagccaaagtggccaaagaaatcctgttcctgtgataatgacgccatcagcctctgcatctctgtcttcccttctgccacatgttgcctgttctccgtgactttggtaagagcttccttgtgtatgaggatgatgtccaggatgttggtctggtgtccctgagacagcactaacaggtccatggctgggtccaggtcattcctggactcattggcaaagagcttactgatgttcttgaaggcatctctggtgaagtggatggcctagtcaagttccaaggcctggctgargctgaagaaaaactggccacctcctgatgctctttctaaaagcctgtcactgtcatctgcttgcttgtcaactcattggctgtgaggatgagctgagtggcctgtgtccatcttcttggggaagcatttgaagccatcagtcttgctctcccacccctaaaggttgagggtcaccacctggggttgtgctgagggtcagaaagaagccagcactcactatctcatccttctcagccttcctcttgcactctctccaggctgt

SEQ ID NO: 550409 - DNA, 628 bp, Homo sapiens
tctcttgttgcaagaaatggtccatctgtgatttcaagtctctcgcttgagtgaattggatggaagtggtgaatttcagccaaagtggccaaagaaatcctgttcctgtgataatgacgccatcagcctctgcatctctgtcttcccttctgccacatgttgcctgttctccgtgactttggtaagagcttccttgtgtatgaggatgatgtccaggatgttggtctggtgtccctgagacagcactaacaggtccatggctgggtccaggtcattcctggactcattggcaaagagcttactgatgttcttgaaggcatctctggtgaagtggatggcctagtcaagttccaaggcctggctgaagctgaagaaaaactggccacctyctgatgctctttctaaaagcctgtcactgtcatctgcttgcttgtcaactcattggctgtgaggatgagctgagtggcctgtgtccatcttcttggggaagcatttgaagccatcagtcttgctctcccacccctaaaggttgagggtcaccacctggggttgtgctgagggtcagaaagaagccagcactcactatctcatccttctcagccttcctcttgcactctctccaggctgt

SEQ ID NO: 550410 - DNA, 1446 bp, Homo sapiens
ccattagcagttttcttggcgttgcgtggcatccgcccaggaaatactggaagtcaagaccatattttgcctagagagatttgtaaccggttactaaatatttttcatcctacagatccagtggtgagttgcaatatagactcttttttttctcaatgtcaaattgttcctaaaaagaatctatcagctgggcacagtggctcacgcttgtaatcccagcactttgggaggctgaggcgggcgcatcatctgaggtcaggagttcaagaccagcctgaccaatgtggtgaaacctcatctctactaaaaatacaaaaattagctgggcgtggtagtgggtgcctgtaaggcaggagaatcacttgaacctgggaggtggaggttggactgagccaagatcatgccactgcactccagcttgggtgacagagtagtgagactccatctcaaacaaaaagaaaaaagccgggcgtggtgctcatgcctgtaatcccagcactttgggaggccaaggcaggcagactgcctgagctcaagttcgagactagcctgggcaacatggtgaaactccatctctactaaaatacaaaaaattagctgggcacggctgtaatcccagctactcgggaggctgaggcaatagaattgcttgaacctgggaggcagaggttgcggttagccgagattgtgccactgcactccagcctgggcaatagagcgagactctgtctccaaaaagtaaaaatctgtctaagacatcttacaaggtgccatcgaattaatgaaaacacttcatttatctgattattaaacgtgtgttttggttaatttagggctcatgagataaagtaccttagagatggtctggttatgttgcacctgtaatacaagagtgtaatgtaaaaatattattcccagacagttagtacaagagacaggagtctactggacttycaaaccttaaccaattgtaataccagtaacctagaaaccataaatcttaaaaatcctgctctaaatacttttttaatctaaagtatgctacaatattggaatgtattttgtagactctctgaaaaatgaaaatattcaaatactgaacatcaaaataaaactttattatagcctaatagaattgtaagatgttggatttttctattctctattatgtttatgctgtaaatattttttttaatggaagcactccaagaaccttgcatcctgttaaacagtgtaatgccaagtaagattttcagacaagaaaaatgcccccttaatacttctttgggacaaggctggtttaactaaatattaaactattttaaatagcatttattctctgaaaaaatagcttcatataattgtggaaagtcttttaaaggatccttttagctagtaccaaataaatataacattgactaaccattcgaattttagaaaatctct

SEQ ID NO: 550411 - DNA, 643 bp, Homo sapiens
gtgcgtccctcagtggtcaataaatgtttaagtgaagcagaaatggataatgatgatggatttaagctctactttgaggattggtaagaagaaaagatcaaacagcagaataaagcatagaattttagcctcagtttctgtagatttcattgtatattttttgggaagttttggagtcaagaaactaatatacttccacaagaagttagcattttcatgtagctaatcagagattcatgttgttccacctaggagacttaataaaaaaataaagttagaaaaagattgaaagtgattttcagattttatttcagctatagtaagacatttctttaacatttgttctcagataaaacagtgctctgacattctcctagacctggtgaattccctctaggagcagaggttgctgaagtatataaacactgcaccacaaaatcattcccttcccagttcttcaggtaagaacggaaaaaaaaataaagttcaaattccctgtttacacaagggtagatattaatagggaccacatatatcctgatttattttgtaccttctctgttgtttacgtaactttgccctgatggccaaatkccataggagtagggtatgccaagtgttagaattacaattagatataaat

SEQ ID NO: 550412 - DNA, 1783 bp, Homo sapiens
tgtttttttttgtttatgaaatgccwggttatatgtttcctttgtccagttttgtattcgtttctcttctgatttgtataaattcttcatattccataaacactactcctttttcataggtgttgcaaatcatcttctttccactaatggcttctattccctttttataaagtcttttgataaactaaaatgttaatattattgttgtaaaatgaaccaatgttttacttcatagttttgtgttttgggtatgaaatccttgtccactggaaggtataaactacttcttcatattttttgaattttaaagttttttattttttattttaactcattagaaattacgtttgtttttttgtgtccagtgacaggtaggggtccaattttatattttttctcatctgtaactaatgtcccagtaccattaatatttagagttgcccattctttcccaatggacctgaagcagaagatctcatgcactgggttcccttataattcggctatttctacattttgagctgtttgtctttcttatataactctgtagtcatgtaagtagtcttatgtatggagtctcccttctgatggagttacctaccccactgatttttttttaggctttctctttactaataaatgtatttacaaatacaaaccaccttctaaagaatgctttagttgcaccaaacatatacaagctttgatatgtagtgtttttattgccattctgttctaaacataacttcattttcttatttcaaatgtatttttaaatttcgcaaagtatagtatcttgcgatcttctggttaacaaaatctatgttgtcaaattgtggtctaagaatatgatcatattaattattattattactattttttttttgagatggagtctcactctattgccaggctggagtgcaatggtgccatctcagctcactgcaacctctgcctcctgggttcaagcaattctcctgcctcagcctcccgagtagctgggattacaggcacgtgtcaccacacccagctaatttttgtatttttagtagagacagggtttcaccatgttggccaggatggtctcgatttcctgacctcgtgttctgaccacctatccctcccaaagttctgggattacaggcgtgagccactgcacctggcccgatgattattatttattgatacttgctgtggcctagtacactgcaatttttataagtgtttcatatcaacttgaaaggaaagcattttttgtcatttttgagtattatggtctgttactacccttttcataaaattttcataaatagtgttttcaaatatccttattttgagattttgtttttggtttattgctcaaccagtatctgagggaagtattatttaattgtggcaaaatacaacataaaatgacaattttaaccatttttaaatacaattcagtagtgttaagtgtattcgcattcagaacacaaccagtctccacaactttttcatcttgtgaaacagaaactacatccattaaataacttgtcccctccccacagtgagagaggtattttaaactgtctctctggaatatctgttcacttatcatgattttgtcaacttttacatcatatggattgaggctttttatatgcataaaggtgaactttattattacttcttactttataataatgtattattttaagcattttaagtacttacaaagctgattatgtatatttagtctctaaatacctgcaaggaataagtatagtgctttatttctaag

SEQ ID NO: 550413 - DNA, 1783 bp, Homo sapiens
tgtttttttttgtttatgaaatgcctggttatatgtttcctttgtccagttttgtattcgtttctcttctgatttgtataaattcttcatattccataaacactactcctttttcataggtgttgcaaatcatcttctttccrctaatggcttctattccctttttataaagtcttttgataaactaaaatgttaatattattgttgtaaaatgaaccaatgttttacttcatagttttgtgttttgggtatgaaatccttgtccactggaaggtataaactacttcttcatattttttgaattttaaagttttttattttttattttaactcattagaaattacgtttgtttttttgtgtccagtgacaggtaggggtccaattttatattttttctcatctgtaactaatgtcccagtaccattaatatttagagttgcccattctttcccaatggacctgaagcagaagatctcatgcactgggttcccttataattcggctatttctacattttgagctgtttgtctttcttatataactctgtagtcatgtaagtagtcttatgtatggagtctcccttctgatggagttacctaccccactgatttttttttaggctttctctttactaataaatgtatttacaaatacaaaccaccttctaaagaatgctttagttgcaccaaacatatacaagctttgatatgtagtgtttttattgccattctgttctaaacataacttcattttcttatttcaaatgtatttttaaatttcgcaaagtatagtatcttgcgatcttctggttaacaaaatctatgttgtcaaattgtggtctaagaatatgatcatattaattattattattactattttttttttgagatggagtctcactctattgccaggctggagtgcaatggtgccatctcagctcactgcaacctctgcctcctgggttcaagcaattctcctgcctcagcctcccgagtagctgggattacaggcacgtgtcaccacacccagctaatttttgtatttttagtagagacagggtttcaccatgttggccaggatggtctcgatttcctgacctcgtgttctgaccacctatccctcccaaagttctgggattacaggcgtgagccactgcacctggcccgatgattattatttattgatacttgctgtggcctagtacactgcaatttttataagtgtttcatatcaacttgaaaggaaagcattttttgtcatttttgagtattatggtctgttactacccttttcataaaattttcataaatagtgttttcaaatatccttattttgagattttgtttttggtttattgctcaaccagtatctgagggaagtattatttaattgtggcaaaatacaacataaaatgacaattttaaccatttttaaatacaattcagtagtgttaagtgtattcgcattcagaacacaaccagtctccacaactttttcatcttgtgaaacagaaactacatccattaaataacttgtcccctccccacagtgagagaggtattttaaactgtctctctggaatatctgttcacttatcatgattttgtcaacttttacatcatatggattgaggctttttatatgcataaaggtgaactttattattacttcttactttataataatgtattattttaagcattttaagtacttacaaagctgattatgtatatttagtctctaaatacctgcaaggaataagtatagtgctttatttctaag

SEQ ID NO: 550414 - DNA, 1783 bp, Homo sapiens
tgtttttttttgtttatgaaatgcctggttatatgtttcctttgtccagttttgtattcgtttctcttctgatttgtataaattcttcatattccataaacactactcctttttcataggtgttgcaaatcatcttctttccactaatggcttctattccctttttataaagtcttttgataaactaaaatgttaatattattgttgtaaaatgaaccaatgttttacttcatagttttgtgttttgggtatgaaatccttgtccactggaaggtataaactacttcttcatattttytgaattttaaagttttttattttttattttaactcattagaaattacgtttgtttttttgtgtccagtgacaggtaggggtccaattttatattttttctcatctgtaactaatgtcccagtaccattaatatttagagttgcccattctttcccaatggacctgaagcagaagatctcatgcactgggttcccttataattcggctatttctacattttgagctgtttgtctttcttatataactctgtagtcatgtaagtagtcttatgtatggagtctcccttctgatggagttacctaccccactgatttttttttaggctttctctttactaataaatgtatttacaaatacaaaccaccttctaaagaatgctttagttgcaccaaacatatacaagctttgatatgtagtgtttttattgccattctgttctaaacataacttcattttcttatttcaaatgtatttttaaatttcgcaaagtatagtatcttgcgatcttctggttaacaaaatctatgttgtcaaattgtggtctaagaatatgatcatattaattattattattactattttttttttgagatggagtctcactctattgccaggctggagtgcaatggtgccatctcagctcactgcaacctctgcctcctgggttcaagcaattctcctgcctcagcctcccgagtagctgggattacaggcacgtgtcaccacacccagctaatttttgtatttttagtagagacagggtttcaccatgttggccaggatggtctcgatttcctgacctcgtgttctgaccacctatccctcccaaagttctgggattacaggcgtgagccactgcacctggcccgatgattattatttattgatacttgctgtggcctagtacactgcaatttttataagtgtttcatatcaacttgaaaggaaagcattttttgtcatttttgagtattatggtctgttactacccttttcataaaattttcataaatagtgttttcaaatatccttattttgagattttgtttttggtttattgctcaaccagtatctgagggaagtattatttaattgtggcaaaatacaacataaaatgacaattttaaccatttttaaatacaattcagtagtgttaagtgtattcgcattcagaacacaaccagtctccacaactttttcatcttgtgaaacagaaactacatccattaaataacttgtcccctccccacagtgagagaggtattttaaactgtctctctggaatatctgttcacttatcatgattttgtcaacttttacatcatatggattgaggctttttatatgcataaaggtgaactttattattacttcttactttataataatgtattattttaagcattttaagtacttacaaagctgattatgtatatttagtctctaaatacctgcaaggaataagtatagtgctttatttctaag

SEQ ID NO: 550415 - DNA, 1783 bp, Homo sapiens
tgtttttttttgtttatgaaatgcctggttatatgtttcctttgtccagttttgtattcgtttctcttctgatttgtataaattcttcatattccataaacactactcctttttcataggtgttgcaaatcatcttctttccactaatggcttctattccctttttataaagtcttttgataaactaaaatgttaatattattgttgtaaaatgaaccaatgttttacttcatagttttgtgttttgggtatgaaatccttgtccactggaaggtataaactacttcttcatattttttgaattttaaagttttttattttttattttaactcattagaaattacrtttgtttttttgtgtccagtgacaggtaggggtccaattttatattttttctcatctgtaactaatgtcccagtaccattaatatttagagttgcccattctttcccaatggacctgaagcagaagatctcatgcactgggttcccttataattcggctatttctacattttgagctgtttgtctttcttatataactctgtagtcatgtaagtagtcttatgtatggagtctcccttctgatggagttacctaccccactgatttttttttaggctttctctttactaataaatgtatttacaaatacaaaccaccttctaaagaatgctttagttgcaccaaacatatacaagctttgatatgtagtgtttttattgccattctgttctaaacataacttcattttcttatttcaaatgtatttttaaatttcgcaaagtatagtatcttgcgatcttctggttaacaaaatctatgttgtcaaattgtggtctaagaatatgatcatattaattattattattactattttttttttgagatggagtctcactctattgccaggctggagtgcaatggtgccatctcagctcactgcaacctctgcctcctgggttcaagcaattctcctgcctcagcctcccgagtagctgggattacaggcacgtgtcaccacacccagctaatttttgtatttttagtagagacagggtttcaccatgttggccaggatggtctcgatttcctgacctcgtgttctgaccacctatccctcccaaagttctgggattacaggcgtgagccactgcacctggcccgatgattattatttattgatacttgctgtggcctagtacactgcaatttttataagtgtttcatatcaacttgaaaggaaagcattttttgtcatttttgagtattatggtctgttactacccttttcataaaattttcataaatagtgttttcaaatatccttattttgagattttgtttttggtttattgctcaaccagtatctgagggaagtattatttaattgtggcaaaatacaacataaaatgacaattttaaccatttttaaatacaattcagtagtgttaagtgtattcgcattcagaacacaaccagtctccacaactttttcatcttgtgaaacagaaactacatccattaaataacttgtcccctccccacagtgagagaggtattttaaactgtctctctggaatatctgttcacttatcatgattttgtcaacttttacatcatatggattgaggctttttatatgcataaaggtgaactttattattacttcttactttataataatgtattattttaagcattttaagtacttacaaagctgattatgtatatttagtctctaaatacctgcaaggaataagtatagtgctttatttctaag

SEQ ID NO: 550416 - DNA, 1822 bp, Homo sapiens
gacatttgaaaatagaaagttgaattaaacaaccaggggtttggacatgagatgagattccaatttctataacaactgctgctgatgggtgagactcatagccaaggggcttaatacagagtcaggctgagtagcttcctcttgcccaaggttatttctgaaaaggagtataggactaaatcagcagatggggcttaaagaattatagctgggccaggcacggtggctcatgcctgtaatccgagcactttgggaggccaaggcttgtggatcacctgaggttgggagtttgagaccagcctgaccaacatggagaaaccccgtctctactaaaaatacaaaattagctgggtgtggtggtgcatggctgtaattccagctactcgggaggctgaggcaggagaattgcttgaaccctggaggcggaggttgcagtgaaccgagatcgcgccattgtactccagcctgggcaacaagagtgaaactccgtctcaaaaaaaaaaaaaaaaaaaaaaaaaaagaattatagctatgatgatgagaaaagatggagagccttgctactcaagtgtgatcccaggcaagcagcatcagcatcttttgggagcttattaggaatgcagagtctgaggcctcatcccagacccatggaatcaggagctacaatgtaacaagatccctacatggtttgtgtacacattaacatttgagtagcaccggtgttaagctgtggttctccatactgcctataacttagaattacctggggaactttaaaaatataggtatctgagatctgtccccagggattgcaattcaaatgttctgaggcagagctatagagtttgtacttttaaaaactccctgtcatgcaactaaggtcgagaaccactggtctaacccagacgaatgccatggataatgaggatttaggagtctcaggagacatgataagaaccaccactttgagcctttccacagataagtgctgcctttggaacctggttcactatgataagttagaaccacctgaagagcatccatggccttttagaaggayccctcatagatgttatcagatgcaaaagctacaccacccttttaggctcagttacttctgtaacttcttccttaaagttgatttaggagttgtaccattctatcttctccgggtctcagtatgttgtcagaaccacacccttcttgcgagcaggcttgtatgccaaccagaaggctaacagccttaattacagaatgtcctttccctaggagttggtcaaagtcatcttgacatcctcagttgggtggagaatcttgggttatgtagaaaatctcagagaggggaatcgcctcaaatgtgcacaggcttggtattccatcattggtcacaaatgtttcttatggaataaaaatacctaaatgtattaagtagttcctgcagtagacaatttgcttgagctacctagtttaaggcttttttttttttttttttttttttccacttagcgttcttgccttaggaaagtaaaccaagcctcctggaaagtaattattttcctgactattaaggggcagaactggaattagaattcataccagcatggctctaaagctcctgcttttctgactgcactactgaccagagcattgagacacacagaccggctctagttcagacccaggacagacatgactgatcccacatctcactggaaattatgatttcagacaactggaaaattctcattcatcagaggatagagctacccatcaagccatgtaatgtcttcccttgcatcatagcttgtcctctgctgctggc

SEQ ID NO: 550417 - DNA, 1822 bp, Homo sapiens
gacatttgaaaatagaaagttgaattaaacaaccaggggtttggacatgagatgagattccaatttctataacaactgctgctgatgggtgagactcatagccaaggggcttaatacagagtcaggctgagtagcttcctcttgcccaaggttatttctgaaaaggagtataggactaaatcagcagatggggcttaaagaattatagctgggccaggcacggtggctcatgcctgtaatccgagcactttgggaggccaaggcttgtggatcacctgaggttgggagtttgagaccagcctgaccaacatggagaaaccccgtctctactaaaaatacaaaattagctgggtgtggtggtgcatggctgtaattccagctactcgggaggctgaggcaggagaattgcttgaaccctggaggcggaggttgcagtgaaccgagatcgcgccattgtactccagcctgggcaacaagagtgaaactccgtctcaaaaaaaaaaaaaaaaaaaaaaaaaaagaattatagctatgatgatgagaaaagatggagagccttgctactcaagtgtgatcccaggcaagcagcatcagcatcttttgggagcttattaggaatgcagagtctgaggcctcatcccagacccatggaatcaggagctacaatgtaacaagatccctacatggtttgtgtacacattaacatttgagtagcaccggtgttaagctgtggttctccatactgcctataacttagaattacctggggaactttaaaaatataggtatctgagatctgtccccagggattgcaattcaaatgttctgaggcagagctatagagtttgtacttttaaaaactccctgtcatgcaactaaggtcgagaaccactggtctaacccagacgaatgccatggataatgaggatttaggagtctcaggagacatgataagaaccaccactttgagcctttccacagataagtgctgcctttggaacctggttcactatgataagttagaaccacctgaagagcatccatggccttttagaaggacccctcatagatgttatcagatgcaaaagctacaccacccttttaggctcagttacttctgtaacttcttccttaaagttgatttaggagttgtaccattctatcttctcygggtctcagtatgttgtcagaaccacacccttcttgcgagcaggcttgtatgccaaccagaaggctaacagccttaattacagaatgtcctttccctaggagttggtcaaagtcatcttgacatcctcagttgggtggagaatcttgggttatgtagaaaatctcagagaggggaatcgcctcaaatgtgcacaggcttggtattccatcattggtcacaaatgtttcttatggaataaaaatacctaaatgtattaagtagttcctgcagtagacaatttgcttgagctacctagtttaaggcttttttttttttttttttttttttccacttagcgttcttgccttaggaaagtaaaccaagcctcctggaaagtaattattttcctgactattaaggggcagaactggaattagaattcataccagcatggctctaaagctcctgcttttctgactgcactactgaccagagcattgagacacacagaccggctctagttcagacccaggacagacatgactgatcccacatctcactggaaattatgatttcagacaactggaaaattctcattcatcagaggatagagctacccatcaagccatgtaatgtcttcccttgcatcatagcttgtcctctgctgctggc

SEQ ID NO: 550418 - DNA, 1822 bp, Homo sapiens
gacatttgaaaatagaaagttgaattaaacaaccaggggtttggacatgagatgagattccaatttctataacaactgctgctgatgggtgagactcatagccaaggggcttaatacagagtcaggctgagtagcttcctcttgcccaaggttatttctgaaaaggagtataggactaaatcagcagatggggcttaaagaattatagctgggccaggcacggtggctcatgcctgtaatccgagcactttgggaggccaaggcttgtggatcacctgaggttgggagtttgagaccagcctgaccaacatggagaaaccccgtctctactaaaaatacaaaattagctgggtgtggtggtgcatggctgtaattccagctactcgggaggctgaggcaggagaattgcttgaaccctggaggcggaggttgcagtgaaccgagatcgcgccattgtactccagcctgggcaacaagagtgaaactccgtctcaaaaaaaaaaaaaaaaaaaaaaaaaaagaattatagctatgatgatgagaaaagatggagagccttgctactcaagtgtgatcccaggcaagcagcatcagcatcttttgggagcttattaggaatgcagagtctgaggcctcatcccagacccatggaatcaggagctacaatgtaacaagatccctacatggtttgtgtacacattaacatttgagtagcaccggtgttaagctgtggttctccatactgcctataacttagaattacctggggaactttaaaaatataggtatctgagatctgtccccagggattgcaattcaaatgttctgaggcagagctatagagtttgtacttttaaaaactccctgtcatgcaactaaggtcgagaaccactggtctaacccagacgaatgccatggataatgaggatttaggagtctcaggagacatgataagaaccaccactttgagcctttccacagataagtgctgcctttggaacctggttcactatgataagttagaaccacctgaagagcatccatggccttttagaaggacccctcatagatgttatcagatgcaaaagctacaccacccttttaggctcagttacttctgtaacttcttccttaaagttgatttaggagttgtaccattctatcttctccgggtctcagtatgttgtcagaaccacacccttcttgcgagcaggcttgtatgccaaccagaaggctaacagccttaattacagaatgtcctttccctaggagttggtcaaagtcatcttgacatcctcagttgggtggagaatcttgggttatgtagaaaatctcagagaggggaatcgcctcaaatgtgcacaggcttggtattccatcattggtcacaaatgtttcttatggaataaaaatacctaaatgtattaagtagttcctgyagtagacaatttgcttgagctacctagtttaaggcttttttttttttttttttttttttccacttagcgttcttgccttaggaaagtaaaccaagcctcctggaaagtaattattttcctgactattaaggggcagaactggaattagaattcataccagcatggctctaaagctcctgcttttctgactgcactactgaccagagcattgagacacacagaccggctctagttcagacccaggacagacatgactgatcccacatctcactggaaattatgatttcagacaactggaaaattctcattcatcagaggatagagctacccatcaagccatgtaatgtcttcccttgcatcatagcttgtcctctgctgctggc

SEQ ID NO: 550419 - DNA, 1822 bp, Homo sapiens
gacatttgaaaatagaaagttgaattaaacaaccaggggtttggacatgagatgagattccaatttctataacaactgctgctgatgggtgagactcatagccaaggggcttaatacagagtcaggctgagtagcttcctcttgcccaaggttatttctgaaaaggagtataggactaaatcagcagatggggcttaaagaattatagctgggccaggcacggtggctcatgcctgtaatccgagcactttgggaggccaaggcttgtggatcacctgaggttgggagtttgagaccagcctgaccaacatggagaaaccccgtctctactaaaaatacaaaattagctgggtgtggtggtgcatggctgtaattccagctactcgggaggctgaggcaggagaattgcttgaaccctggaggcggaggttgcagtgaaccgagatcgcgccattgtactccagcctgggcaacaagagtgaaactccgtctcaaaaaaaaaaaaaaaaaaaaaaaaaaagaattatagctatgatgatgagaaaagatggagagccttgctactcaagtgtgatcccaggcaagcagcatcagcatcttttgggagcttattaggaatgcagagtctgaggcctcatcccagacccatggaatcaggagctacaatgtaacaagatccctacatggtttgtgtacacattaacatttgagtagcaccggtgttaagctgtggttctccatactgcctataacttagaattacctggggaactttaaaaatataggtatctgagatctgtccccagggattgcaattcaaatgttctgaggcagagctatagagtttgtacttttaaaaactccctgtcatgcaactaaggtcgagaaccactggtctaacccagacgaatgccatggataatgaggatttaggagtctcaggagacatgataagaaccaccactttgagcctttccacagataagtgctgcctttggaacctggttcactatgataagttagaaccacctgaagagcatccatggccttttagaaggacccctcatagatgttatcagatgcaaaagctacaccacccttttaggctcagttacttctgtaacttcttccttaaagttgatttaggagttgtaccattctatcttctccgggtctcagtatgttgtcagaaccacacccttcttgcgagcaggcttgtatgccaaccagaaggctaacagccttaattacagaatgtcctttccctaggagttggtcaaagtcatcttgacatcctcagttgggtggagaatcttgggttatgtagaaaatctcagagaggggaatcgcctcaaatgtgcacaggcttggtattccatcattggtcacaaatgtttcttatggaataaaaatacctaaatgtattaagtagttcctgcagtagamaatttgcttgagctacctagtttaaggcttttttttttttttttttttttttccacttagcgttcttgccttaggaaagtaaaccaagcctcctggaaagtaattattttcctgactattaaggggcagaactggaattagaattcataccagcatggctctaaagctcctgcttttctgactgcactactgaccagagcattgagacacacagaccggctctagttcagacccaggacagacatgactgatcccacatctcactggaaattatgatttcagacaactggaaaattctcattcatcagaggatagagctacccatcaagccatgtaatgtcttcccttgcatcatagcttgtcctctgctgctggc

SEQ ID NO: 550420 - DNA, 642 bp, Homo sapiens
tgttggtgcctcacctgtatccccttggcactcaccatggcagtagctgccgatgacattctacaacaagcacctgggactctccacttctctgccccagggctttttctcagcccacaagcaggacagagcagaagtgccctggagttcctgcccccaggaatggccctctgtcattgatgatgggagctggagaataggtacagctcccgtccctcgggtgagacaactctgcagcatgttcacattgtcgcccagagaccccagtgggacggagcctcaattgwccacaatagtaatgggctcattaatgcaccctgcattgcttcctgccttcccctttcttgttccccagatcctctgctgatgtcacttgggaccaccttgcagatagactacttcattccttgtgactgagcctgcttgtgagacagcccagcccaagagaagcagccatatccttgtgcctgcaggaaccaacatcgtctgtgctaggttatgtgtttactcatttgcttacatcctccattcattcattcattttgtcagcccacaacatttactgagcattggctatgtaccagaaattgagaatttcatactcatatagagaaggggaaactgaggctctgagataaacat

SEQ ID NO: 550421 - DNA, 642 bp, Homo sapiens
tgttggtgcctcacctgtatccccttggcactcaccatggcagtagctgccgatgacattctacaacaagcacctgggactctccacttctctgccccagggctttttctcagcccacaagcaggacagagcagaagtgccctggagttcctgcccccaggaatggccctctgtcattgatgatgggagctggagaataggtacagctcccgtccctcgggtgagacaactctgcagcatgttcacattgtcgcccagagaccccagtgggacggagcctcaattgtcmacaatagtaatgggctcattaatgcaccctgcattgcttcctgccttcccctttcttgttccccagatcctctgctgatgtcacttgggaccaccttgcagatagactacttcattccttgtgactgagcctgcttgtgagacagcccagcccaagagaagcagccatatccttgtgcctgcaggaaccaacatcgtctgtgctaggttatgtgtttactcatttgcttacatcctccattcattcattcattttgtcagcccacaacatttactgagcattggctatgtaccagaaattgagaatttcatactcatatagagaaggggaaactgaggctctgagataaacat

SEQ ID NO: 550422 - DNA, 494 bp, Homo sapiens
atctgtatggcctaacgaaaaatggtgtgtttactgccttcaccagatgcccattgtgaatcagctgggtcctcacccgaggacccagtctaatgggcaatctgccacattatctcaaacatgtgcttaatcaccatgtccagggtgaaggaaagtgtggtcgatcgctcaccagcttttaactctctttcccctgtaagcttyttttgggagggactcatgccaattctgctcatatttcattggccaaagcaaatcggccacacacactgccaagttatatacaaacctaccacaagtctggaagtggaggaaaccttgaaaaatttggtgaatagccctaataatgaccatagtctgagaagaggaatggcttcaaagcctcatcccccacattccacaacagagcaagccaaataactaagtgcccttagagtgggtgctttcaaggcttatatatatcccaaggactcaacagagattcatgcctgggc

SEQ ID NO: 550423 - DNA, 1425 bp, Homo sapiens
  misc_feature 623, 624, 625, 626, 627, 628, 629, 630, 631, 632, 633, 634,635, 636, 637, 638, 639, 640, 641, 642, 643, 644, 645, 646,647, 648, 649, 650, 651, 652, 653, 654, 655, 656, 657, 658,659, 660, 661, 662, 663, 664, 665, 666, 667, 668, 669: n = A,T,C or G
  misc_feature 670, 671, 672, 673, 674, 675, 676, 677, 678, 679, 680, 681,682, 683, 684, 685, 686, 687, 688, 689, 690, 691, 692, 693,694, 695, 696, 697, 698, 699, 700, 701, 702, 703, 704, 705,706, 707, 708, 709, 710, 711, 712, 713, 714, 715, 716: n = A,T,C or G
  misc_feature 717, 718, 719, 720, 721, 722: n = A,T,C or G
atcctttaccataaactgctccaaacagcaaccccttttctcctaccagacatgcaaaaaaatgaatccatgtgtgcataagtagcagttccaaaaataatagtgacattagatactataagaccatgggacagaagaaattgtcctgggaaagaatgttcaggaaagaatttattgaggaaacatgatttgatctgggttttgaaggatgaatagaagttagacatatggataagagagaaagcatgccttgggtagagaagaacatgacaaagctgtagaggtagtaatgagcaaagacaagccagtgggtaatgagtagagctgagaagctgtgcagagaaatgtggggtggggtaggagggcagttgtgatggtataaggagctggagactccgagtaagacagggacttgatagggtcaaattcatctttgtgtgcacaggacagagcctagcacagaggagtgctcaataaatacctgtgactacatcagtgaatgcataaacaaaataaaattgaattttcagatgatttgcctggctggacgtattggaggaaagagttgaggatggcagcccaggtaggaggttactacaatagtctaagcctgggtgataaannnnnnnnnnnnnnnnnnnnnnnnnnnnnnnnnnnnnnnnnnnnnnnnnnnnnnnnnnnnnnnnnnnnnnnnnnnnnnnnnnnnnnnnnnnnnnnnnnnntgaggatggcagcccaggtaggaggttactacaatatctaagccggggtgacaaagaacaaaaccagaaagttcatgatcaacgtgagaaatgtgctaaaggaggattttaagccgttaaagacgggctgcataggggaaggaaggcaaattccaaggtgctttgggctcagggcctgtgtaattggctaactgagacagcagtgaggacaatattatcaagagcaagtgtgagagtgaggaaaagaaggtataacaagtccagctttgagcacttgargtgatgggaaagcagccacgtgcaactgtcccgtcctcatatgaaaaaaagggtctaggagcaaaccaagataactggagggtcctcttgaaggagacattgtgattccccagcctcaaaagcatttgtcttatacttgtttttcttagacagcattctaaaactatgttaagctctacatatagtattttttgaaaaattgagattcagaaaacaacctccaagactctaagtctggtatcatgctgctattatgtgtggaaactttcctgagggctagtgtaagagtcccaaatgcagctgcatcagaatcacttgggtgtggagccctgggatctgtatttctagcctgctcttcaagtcatctgatgctcacaggagtttaagaatggctggcatggagaaagggaagcctctcgatatc

SEQ ID NO: 550424 - DNA, 636 bp, Homo sapiens
cggaggccctgaagcaagattctagagtgatatgcatgtatttaacactgtgtgagaggcttgaaaatgtatgccaaattttcagtgtttgtttgggagtatrtttttctgaagaaagagtccaggtattgcttcagattctcagtctccaatacttagtatgctgcctggcatgtaataaatgctttataaatacacaaataaaaggatgagagaatgaatgaaggcaaagctctaaagacattcaaaagaatgaccacagaagtaaattatttaatactaggaaacactggtgtcagtgaagcccaagtaaaagaagatttcaagaagaaagtggataaactgtcacactggactgaacagaggtcaagtcagatagggtctgagaaatacccagtggatttagaaatgaagtggtagttagtgacctttaaaactggtaatttcagttgagataaaatgttgcagttggttgaagaataaacaggaagttcacggaaataaacagtgagtaaagacaactttttcatgaacacttgtctgtggacagagaggtatgaaacagaagagagagcggcaaattggtgtaggatggttttatttttttcttctaagacagaaaagatgtgagaatgc

SEQ ID NO: 550425 - DNA, 1244 bp, Homo sapiens
tttgttgtctatgaataactctttggcataatacaaaagaagaatccactaatcttattaaaggtaaattatttatgagtaacttattcaacaggatacacagaagaataaaacattagatattaggacctcataggtaaggtttctatttcggatatgctattgagaaaacaatcagtttatcatcaggaaaggttttcactttatttctatggagaaaaataacctcccacctgctgctaaacatacttaattaaagagatccggattgtactgcttatacttgtggcatatcacttgaacttttcactaagtgtcattcttataacattatcacagactcctagcttattatgagaacagaggtgctaatcaagaggaattacttagtaattatatttttatttagaattttaaaaggatgcatttctatttttttggagcaccccaaccatatttctccacacacatttatctaaggaagttcaattaactatgtaggcacacctagatttgcccctcttatggcactgtttgatgagtagaaatgttttagaatacagtattcaaaactgtaatcattaaatgcattagttaggattctccaggaaaacagaggggagagagagagagagagagacagtgtgtgtgtgtgtgtgtgtgtgtgtgtgtgtgtgtgtgtataaagaaatttcttataaggaactggaattggctcaggagattgtggaagcttaaaagatctgcaatcaccaagctggagacccaggagagccaatggtgtagctagtccaagtccaaaggcttgagaaccagaagaactgatatttcagttggagtctcaaggcagaaaaaaaaaaaaaacgccctacccagttcaaggcagtcaggcaggagaaactcctttttatttgtgagaacgtcagctttttttttttttcytgaattcaggcctccgcttggatggtacccatctacctgaaggactgcaacctgctccactcagtctaccatccagatgtttatttcacccagaaacatccttccagtcacacccagagtaatgtttgaccaaatacctgggcaccccagtgaagccggcacataaaattaaccatcataccaagtgaacatgaaatagctaaattatttcagcaacttgcctccattatacattgtcctgaacagaacatgagattcagttctaactccaataaccagatagggaaataattttaataatt

SEQ ID NO: 550426 - DNA, 635 bp, Homo sapiens
atttcttagatgatgccagccaaggaagcaggtacagggactggggtggctcacagctatgaggaggaaggagggagtgagagaagatgtggcctgtgtattgactctcctctgcttttcaagcacttgtctcttattccaatagaaacagataggttaaaagatgatagatatagatagatgatagatataaatagataaagatagagacaattaagagatagagatagatatatggcagatagatgatagatataaatagataaagatagagataattaatagatagagatagatatatgacagatagatgatagatggaacatagaatacagacagatgatagatagatagatagatagatagatagatagatagatagatagacagacagacagatagatggatagatgatagacaaggttttttaagaagttgagtttggaactcacaggmtgcatccaccatggtaagtcacaatcccatcaaaatcaccccaatactgaagtggatatggggacttcaaaaaggagaatccaaattcagtgtctccatgtgctgggcactgtgctaggaaaagatccaggcattgaataaagcagacaaggtcactgtctcgatagaggttatggacc

SEQ ID NO: 550427 - DNA, 635 bp, Homo sapiens
atttcttagatgatgccagccaaggaagcaggtacagggactggggtggctcacagctatgaggaggaaggagggagtgagagaagatgtggcctgtgtattgactctcctctgcttttcaagcacttgtctcttattccaatagaaacagataggttaaaagatgatagatatagatagatgatagatataaatagataaagatagagacaattaagagatagagatagatatatggcagatagatgatagatataaatagataaagatagagataattaatagatagagatagatatatgacagatagatgatagatggaacatagaatacagacagatgatagatagatagatagatagatagatagatagatagatagatagacagacagacagatagatggatagatgatagacaaggttttttaagaagttgagtttggaactcacaggatgcatccaccatggtaagtcacaatcccatcaaaatcaccccaatactgaagtggatatggggacttcaaaaaggagaatccaaattcagwgtctccatgtgctgggcactgtgctaggaaaagatccaggcattgaataaagcagacaaggtcactgtctcgatagaggttatggacc

SEQ ID NO: 550428 - DNA, 660 bp, Homo sapiens
aaaaaactccatcatcttcctcaagttcaatcagtatcctgagtgcctagcacaattcttaatgtgtagcaggtgtatgatcactatggatgaaggaatggatatagcgtgatcacaacattattctttttttttttttaagatggagtttcactcttgttgcccaggctgtagcgcaatggcacgatctcagctcactgaaacctctgcctcctgggttcaagtgattctcctgtctcagcctcccgaatagctgggattacaggctcccaccaccatgcccggctaattttttttcttatttttagtagagatggggtttstccatgttggccaggctggtcttgaactcctgacctcaagtgatccacccacctcgctctcccaaaatgctgggattacaagcatgagccaccgtgcctggccaacactgctattttaatacatagatgataccaaaagcctggccaacattattcctactacaaataggatgtttgaagaggatatggattctttatttaatctctaactgacctgatcttttttatgagctgggagcccatttgctaggtagtgggagaaaatctttagatcagtttaaatctccattggaaacaaaaattgacactctcttttgaggtttaacttagccttttc

SEQ ID NO: 550429 - DNA, 642 bp, Homo sapiens
tactccaccatggtcaccaacaacctcctaatgatcaaaaccagcaatcttctcttcatttccatgtctccacacttgctcctgaagtgtagtcttgtcataaaaactactcacctcaccttggaatctttgactctgtttatcttacgtattccactattgctctgatcctaacttcttttttttttttttttttaagttcagaggtacaagttcaggggtactgaaatgacttccaaaaacatttctccagatttctcatctctcccagcttcaagcctctatttccaaaagcatacactacatgtccatctagatatcttactaaataactcactatctatgtgtcccaaacagtggtggcaacaagggatgaccaggtcaagattgatcatttctctactaggcacctctcacaactataccaaagaaagaaaatcatatgtccgtactgcaaatgcagcaacttcttctaccatcttaggccccacacatataaattcagaagatgccacagaggctgaccttgccgcttctcctaaccctgcttcttttttttttttyttcctttgagatggagtcttgctcttgttgcccaggctggagtaaaatggcacgatctcggctcaccgcaacctctgc

SEQ ID NO: 550430 - DNA, 544 bp, Homo sapiens
ttacagtaaacaatttctctgaacctactgtccactgtaaccatacttcattgaaaaaatgcaatcaaaatttcttttctctaacggtgtgtatacaaaagggaaacattcaattacattaaataatttgtttcactccctaatccttaaattcaggtctgccactcactagctttgtaaccataagcaggtcagttgatttttccaagtatcaatttctgagtctcatttcctctgtaaaatgaaaataatgcatactgcagtattgttgtggggtttaaatggaataatgcatatatatgtcagtacgtagtaggtagtcaatcatcgttggcacttacttttgcaggcaaaaagtaggtattataactagatgatccttaatattctacatttctgtgatttaaaaaatagtaaagggtgggtaatgcagaagtgctggcactggaacttcaggcracactgtagtaaattggtgctttttcccccgcaagagagagcagctttcttgatgtcatctcaaagtctaggaaacaggtcttgc

SEQ ID NO: 550431 - DNA, 1764 bp, Homo sapiens
tttgtcaggatctacgtaagtccatgctttgttggaatctgtgttagaaaacatgtcagtctattattccattattgttactgcattttgctacttccatcattcatccctcaacaaacattcattgggtaccttttaagtaataggtagtagatacagaaaatacagaggtgaaaaagacgtacctttttccctgaagactgtcacaaaggcaaatagttccatgacagtgtgaaatgggctacaaaatatgtaagaatatgggtcttgatcgcacaaagaagggtatgaccagctgcagctgagatgtgaggggaggtcaaggaagtttttacaaataaggtaactcaaactaggtcttgagggatgaacagattttaccaaatatataggaaggaaaacactttctctccaaagagagaataagaacagaggtgtgtatttaacacattatataaagggaagtgcaaatgattctttcaacaatattgatgaagttgtgaaccaaaagtatctgagataggactcaatcaatttagaagtttattttgccaaggttaaagacacacccatgacacagcctcaggagataaaaaagctacataccttcctcacaatttgcctacaaggaaattctttgtgggcctcaagatgatgacacgtgcccaatgtggctggggtacagcttggttttttatattttagggagacatgagacatcaatcaatatgtgtaagatgtagattggtttggtctggaaaggtgagacaacttgcagtgggtaggaggctttcaggtcatagattggtaagagacaaacagtggcattcttttgagtctttgatcagcctttcactgaatacagaatttacatgtgagagagggggtagaggaagagtcacttttgtcttagtctggctcagtgaatgtacatttttgtataaacaataggtgagaagaagcaatcagatatgcatttgcctcagatgagcagagggatgactttgagttctgtcctttgtcccgcagctgtgaagataagctatcaatttacattgccaaggtgaaatccaactgaactcctttaagataaagatcttgagtcccaaaaggaatttcctagtgggcaaattgtgagggaggtatgtagcttttttaatctttgtagttatcttatttaggaataaaatgggaggcagctttgcctgagcaagttcccagcttgacatttccctttggcttagtgattttggggtcctgagattcatttgcctttcaaaaagtstatacaacagacatggtgaatgtaggctcagggtgggaagctaccagaagggaacctagagaagaaatgagaatgaagtcaaagtaggcttcccatagctatcaaaatgaacttagaagagcctgatggttgaagtggaagccacagaaggattttaaataggagactaatacagttaggaaaaacactctgcagggtggagaatagatttgaggggtcgagagtgtaggatgggaagagtgaatgaagagactgttgcaatcagtagtctaagtgggaggtagcgaggtccaggaagtgaggatggattgaagtgatccatctactttgcaagaaggcagagtgtgggagtactggggactgattcaatttgagaggactggaggtgtgaaaaggaagcttgaattacagcgtgattgtaccaggaggcacctgaggaggaacttccgtggagaagataatgctttcagcttaggaca

SEQ ID NO: 550432 - DNA, 963 bp, Homo sapiens
taattcgatgttttgtcctctccaaaatcatattgaaacttaatccccaatgcaacaatattaggaggcgtggcctataaaaggtgattgagtcatgacagcttcaccctcatgaataagattgggtgcccttataaagggcttgatggagaaagtttgcctctttttgccccttttatcccttcctctatgtgaggacacagtgtttctcctctccagaggatgcctcaacaaatcactgtcttgggagggaagaccgggccctcatcagacaccgaacctgctgggatcttggacttcctagtctccagactgtgagaaataaacttctgttgtttataagttacctagtctcaggtgttttgttttagcaacactaatggattaagacataaagtaagggcatagaatataaaaaggataggtgtttcactcagaaagaactatccatttttttccaattttgctcaaatgaacaaatgaaaaccaggtcaggtacagtggctcatgccagaaatcctagcactctgaggccaagacaggaggatcacttgagcccaggagttcaaaaccacagtgagcaataatygtgtcactgcactccagcctaggcaacatagcaaggccctgtctctagcagatttggaatctgtaggcctaacaaatatgaaaagaaagatctgggctcagtgatcaaaaatagtttgatgaagacatgattatgaacttaatcctatttcatttccaggcacgatgggatttgggaactagatttactcttctgccagcaacaacaaaaacaagcaaaattcttttgaaacttaagaaactaatttaagaacaaggcacagtggtgtgctcctatagtcctagctactcaggaggctgaggcaggaggattgcttgagcccagttcgaggccagcctgggcaacatagtgagtctctgtctctaaaaaaaaaa

SEQ ID NO: 550433 - DNA, 888 bp, Homo sapiens
aaattcgtgtctatagcttttaaggacttgattacatcattttcaagcctgatagttttggaatcaccattagagcttaagacacacctgccttcatttcaaccacctgtcttcataccctgacgaagtgcaccttttaacactcctttgtccttggattacttaagagttcccagaaatacatttgccaccaacagagtaggtaagtgaatgttctctgcctagtccagtattaagacacattgtttttctgaagacggatgtcgagtacagtaaacctttcatactctttttttaaaggcagagaagtcagtaatcatttgagtataaaaaacatcatatttttcttttctatattttgactttaaataaatcagtaacttcaaattaaaatttcttactgcctttttttttttccttaaagagataagatctctgttgtccaggctggagtgcagtggtgggatcatagctcactgcagcctggaactcctgggytcaagtgcttctcctgcctcagccttcctagtaactgggactacaggtgtgcgccaccaccatgactgcctaatttttacattttttgtagagacaggatttcactatgtttcccagactggtctcaaactcctgggctcaagcaatcttcttgccttggcctccctattactgttctttattttattttatttttttaagatggagtctctctgttgcccaggctggagtacagtggcacaatctcagctgactgcaacctttgcctcccaagcgattctcctgcctcagcccccacaagtagctgggattacaggcgcccgccaccatgcctggctaaattttgtatttttagtagagatagggtttcaccatgttggccaggctggt

SEQ ID NO: 550434 - DNA, 582 bp, Homo sapiens
cctcccaaagtgctgggattataggcataagccagtgtgcctggccagtagctgcttttgatattggatatttccaatcatgaataagtccttgctatactcatactccattcattgtctgagttctgctttctgctgcaccagccaagatttacttctttctgctacataacagcccttcaaatatcaagctacttcaacttgtatgttttagagaagaatacagcccagatttttgaccatttctcttatgatatgctttcagagcttcccccttcctggttattctcatctgcacacattcttgctggttaatcttactagactcagtacagaatcatatactctgaaacattgtaggtttgtgtgatgagcctagatcaggaaagtaaggacgcttattcrtaaaaatatcaatatattttcccttatagaattaggaaaattatcacaatttaaatatattatttttttcatgaagaattgtggttatataactgacacaaagaaaatatttttattctaagccaacaaacgctgtctgctaaagtgaagttccattgcagaagacatggttatttt

SEQ ID NO: 550435 - DNA, 644 bp, Homo sapiens
agttaggcatttttatattcatttttagagggtgaaactgaggctcagagatattaaatgtactcaaaagaggcttgtattaaaatgacttgcctgagactcaattctggtaggtctggatctaaggatgtttgatgctgtggctgttttgttttgcaactttcctataatccattgttcttacggcttcacttgagagctgccccttctatgtaaagagcatgcatagcctgggaaattctgatgaaaattagagtacaaccctgaaatgccagaacttggattgcactcaaactgtcacatgctttctagctatgataaatgggactgaactcattagtgatggatttctagcagcagcaattgcacaggtaaaacttcttaactaagcagatattcaatcattctggcactgtaaaatgtcataagtgctctcagtgtaatcatctttttgtttctttgctacatttggatgagtaaaatcaggaagcattagaatamtgctaagtccttccaaaagtataggccaaatgcagaggtattttgggaaacccacttcttgtgtcatactaagctttcttggatcttgattatttaatgccaaaagtgctagttgaattacagtcttgtacacttgaatgcag

SEQ ID NO: 550436 - DNA, 548 bp, Homo sapiens
cctgttgacagatctttgatggcaaggctacatttttgatggtttccaaagatggaaaaattgcagaataaagttcagaaaacatggtgagcttaaatgaataagttatatttaattgggtatatggtattgttttcaatattaaagrtattttgaggcccaattagacaagactttactgacctgaagatgtctaaaattatattatagttcaagaacaagagatgatagaaatttggtcagatcatttcttaatttctctttgttcacttattattaatcacgttgttaggagtatggggactattcctatgagaactaaaggaatctttttttgtttgtagtttatgtcccagtaggtggataatacaatttagttttgctttaaggattttaggatgcatatgtgtttgtttttatgtattttatatatagtgtatatacacatacttatgtattatatataactataatatataagtataaacttgacttcaagataattttttaaagtaaacttttagttcaaaatttatttctttttaaat

SEQ ID NO: 550437 - DNA, 921 bp, Homo sapiens
tggaattaaaaattatcttagctctgcaggctggctgagagctcagagctcagagaaggtggggggatggagagacaataaggaaagctgccctacttctggaggctccaagacaccatttttagtgacagcaacgtgctttcaagagccaggtgtgtgtgggtgggggaaagaaggttggacttacgtatgagaataatgacaatacagaaagcctctgrgtattttccagggaaatgcagattgtagctttggattttaagttttactttcactgttaacacatgaacaggtattcctaggtttcttgcacttcccccaaatctttctgtagcaaaactaagtaggggaaagttactattataagatgtatcacttgtaaaacatttaaattgttcctgtttttctgttatttatgagagtgcacaggaataccacataattccttaacttgattttataaaaaaacaccagccttagtatcatccaaaatacagctcctatatttttactctcacattgaaaagccaattttttttttttttgtctttcagatagagcactaaacagctcttccttttcattaaagtataccagctaaataatatatcatcttggcttatgtttcaatcatgcagtttttcttctcctggacttgaaagaagcttcttccttaagaaccccttctcaaatataaattattattattttttagcctggaaaagttgggtggggaggtacattgtgagtcacctatgtcaatctgaacattgctgaaaacgaaatatactttaatagttccaatggtattcattcagccttattctgacctttccttgtttttactctaattaaacataaatcttgaaaaacaaagagccctttgacgactataatacatttttgtactgtgacatgccc

SEQ ID NO: 550438 - DNA, 921 bp, Homo sapiens
tggaattaaaaattatcttagctctgcaggctggctgagagctcagagctcagagaaggtggggggatggagagacaataaggaaagctgccctacttctggaggctccaagacaccatttttagtgacagcaacgtgctttcaagagccaggtgtgtgtgggtgggggaaagaaggttggacttacgtatgagaataatgacaatacagaaagcctctgggtattttccagggaaatgcagattgtagctttggattttaagttttactttcactgttaacacatgaacaggtattcctaggtttcttgcacttcccccaaatctttctgtagcaaaactaagtaggggaaagttactattataagatgtatcacttgtaaaacatttaaattgttcctgtttttctgttatttatgagagtgcacaggaataccacataattccttaacttgattttataaaaaaacaccagccttagtatcatccaaaatacagctcctatatttttactctcacattgaaaagccaattttttttttttttgtctttcagatagagcactaaacagctcttccttttcattaaagtatacmagctaaataatatatcatcttggcttatgtttcaatcatgcagtttttcttctcctggacttgaaagaagcttcttccttaagaaccccttctcaaatataaattattattattttttagcctggaaaagttgggtggggaggtacattgtgagtcacctatgtcaatctgaacattgctgaaaacgaaatatactttaatagttccaatggtattcattcagccttattctgacctttccttgtttttactctaattaaacataaatcttgaaaaacaaagagccctttgacgactataatacatttttgtactgtgacatgccc

SEQ ID NO: 550439 - DNA, 921 bp, Homo sapiens
tggaattaaaaattatcttagctctgcaggctggctgagagctcagagctcagagaaggtggggggatggagagacaataaggaaagctgccctacttctggaggctccaagacaccatttttagtgacagcaacgtgctttcaagagccaggtgtgtgtgggtgggggaaagaaggttggacttacgtatgagaataatgacaatacagaaagcctctgggtattttccagggaaatgcagattgtagctttggattttaagttttactttcactgttaacacatgaacaggtattcctaggtttcttgcacttcccccaaatctttctgtagcaaaactaagtaggggaaagttactattataagatgtatcacttgtaaaacatttaaattgttcctgtttttctgttatttatgagagtgcacaggaataccacataattccttaacttgattttataaaaaaacaccagccttagtatcatccaaaatacagctcctatatttttactctcacattgaaaagccaattttttttttttttgtctttcagatagagcactaaacagctcttccttttcattaaagtataccagctaaataatatatcatcttggcttatgtttcaatcatgcagtttttcttctcctggacttgaaagaagcttcttccttaagaaccccttctcaaatataaattattattattttttagcctggaaaagttgggtggrgaggtacattgtgagtcacctatgtcaatctgaacattgctgaaaacgaaatatactttaatagttccaatggtattcattcagccttattctgacctttccttgtttttactctaattaaacataaatcttgaaaaacaaagagccctttgacgactataatacatttttgtactgtgacatgccc

SEQ ID NO: 550440 - DNA, 629 bp, Homo sapiens
gatatttatgataaattagataaattattttaataatctgaatgatagtctgtcaaatgttttattattctggtctaatgtgacaggttacaattcaaccattcgaccattacacttcagttaggcaaacaataagtaatttataacttaattcctcttccttgagtcttcctcccctttgggtgtccctatgttggtgagtgtttgtgtgtgtgggtcgagaggggcacaccaagaaccacatgttaaactttccagtcaatggaatctcagattcccattagtctttgctacggattatctcatctattctatttccagactggcttttaatgagatatacagattctatttggcctaatagggaacaccaygcaggaatctgctgctgcagtaatacaaatttcttttataccctgacttctttgtcctgataccagcctaccagctctcctctcacatccaagatcattcaagttctccagtgaagaggaggatggcatattagatttatcaaaatatctgcctctcctgtcaccactgagtcaacattccagacacaatgctccacacatttttgaacaggaaaaactatgagaaaggggcttcttccagagttcaaaatagag

SEQ ID NO: 550441 - DNA, 629 bp, Homo sapiens
gatatttatgataaattagataaattattttaataatctgaatgatagtctgtcaaatgttttattattctggtctaatgtgacaggttacaattcaaccattcgaccattacacttcagttaggcaaacaataagtaatttataacttaattcctcttccttgagtcttcctcccctttgggtgtccctatgttggtgagtgtttgtgtgtgtgggtcgagaggggcacaccaagaaccacatgttaaactttccagtcaatggaatctcagattcccattagtctttgctacggattatctcatctattctatttccagactggcttttaatgagatatacagattctatttggcctaatagggaacaccatgcaggaatctgctgctgcagtaatacaaatttcttttataccctgacttctttgtcctgatacmagcctaccagctctcctctcacatccaagatcattcaagttctccagtgaagaggaggatggcatattagatttatcaaaatatctgcctctcctgtcaccactgagtcaacattccagacacaatgctccacacatttttgaacaggaaaaactatgagaaaggggcttcttccagagttcaaaatagag

SEQ ID NO: 550442 - DNA, 482 bp, Homo sapiens
agggacccccctgcttctttttcatcatcagagcccacttttcttggtgactggttaagagatgaggatgagatgggaaagagaggcactggccctttaaaggggaagccaaggtttgtagcaaagtgcaaattgcatgcaaatggatccgcaaaagagacttgggacccagggacagctggcttggatgaaccaaagggtttttgtgccagtttgcccagccctgagtcatggttccctgctggatgtgagaagaggcactacagctccagaatttctataaaggaggctctgggattgggggtgaggcacaatctggctgggaaggtgagargctgtggaaagtcacccaactgcctgggagccacgcactttttactaactgtatgttttcagcggatggctttgactctcaacttcctctctaatctgtcaatgtgacagcaagaaccaatgtcactttaacaacccccatgctcaat

SEQ ID NO: 550443 - DNA, 554 bp, Homo sapiens
ggatatatgaaatataaatatgtggatacatataaaatacaattttttctgattgtctaacagacaaggcaaacacaaccattttgaggttatgatttattgaagcttactttatatcaggcactgtgtcctaaatgttttacaaatattaattcatccctacaataatataacaagatgcagagacgtgcaggagcatgtctaaggtcacaattagtaggtggttagagtttagtgggtaaaacatggttctggaattaaacagacctgcattcaaatctcatctttccacttactagctgaatgtcttcgataaattttcttaataccttaaatatcagttttcttgtctaaaaatatgcataataatatcgattaagttgtgaaaaatcaaatgatattgaaataattcatgcaaaaaacattataccaaaggtggacacctcataagcyctccacagaaattagcttttattattatgtgatctgggatttgaacttagaactgtcggacaataaaacccatgaccaaacttaaccagtgcaccatacta

SEQ ID NO: 550444 - DNA, 1670 bp, Homo sapiens
atcttcccactttataaacatcagctttcattgtttctgcattaggtggaggaaatattgagcccagctttccctttgaatgcttacaaggttgcttgtaaaatattcttctgatgacacagactggagagaactgtgtctttaacctattgcatttaacccagggatgctcactgctagctgagggtggcccaaaatggaggccacaaatgaacctcttctctactcttctttccttttatcctctcctttcctttctcctttcccttcccttccctcccctcctcccctaccctctcctttttctttccttttctttccttttttaaaattttttytttctttctttccttccttccttccttccttccttccttccttccttccttccttccttccttcctcctttcctcccttctaacatttatggacacattaccatgaacacagtggacgctgttgttaattccatcttaaaaatgaggaaaatgaggttttaagaagttaggcaactcatctgatgttacacatctgagaggtaagaaagctgtactgaaaccaggatcacctgaccctgtgatacagcctgtcactcattcacttcatgtctctcagagatctcttcacgtgccagtctcactgctcggaggagcacagaagtctcattggagaatatctgggtagtaccagatagggaacctgtcctcagaaagccacctttctcacccagataccccttcggctacttgatagatcacctgtcacgcccatcacctgtgcctatggtcagcgtctccccacacttgcagctgctctcagtgactagggcaaagtctgactttgaaagctcatttcaggtgctatgcacgtgacagtgtaccagcaatgtctggcttgttccttctcccattccttcaggggtggtcaaccaattctgagaaggaagccctgcccccattcctccatccccacatccccgtcgtcctcggctcccagctctgcccttccatttctggcatgccggtgggtcgagcattgtctgccttctggggaacacaaacccttttgagttgttgggaagtttctgatgcgtgagttgttgggaagtttctgatggggtcagctctggttctcatgggccattaaagttggattgttgagggctagaaaggaagacaaaagtgcatgtcctgagtggaggtatgaagggtgaatggggaccggaccctgaatggatgccctgagcaagcgaggggtctaccagatggaagcccagaggtccgagctgatgtggaggacaatggacagggaggggcagtgcccactgcttgtgcaatggtaagaaaatgtacagagggaaggacaaaccccaggagctttgctcaaatacccagccgccctgggactcccagacacgcaggcccagcctacagtcaggcacccagccaggtaaagcgcccatccctggaagggggtttttgccccattgctactggagttcatcattggtggtttattatgatggagcttggacaaactacaaatgggcactgggtgtatctaatgctgtatgtgaatactattcattttttaaaagtatataattcaaataaacattctttaataaaaatgaaaaaaagaaatagtgttaaaagcaccaaaattgtgtg

SEQ ID NO: 550445 - DNA, 1670 bp, Homo sapiens
atcttcccactttataaacatcagctttcattgtttctgcattaggtggaggaaatattgagcccagctttccctttgaatgcttacaaggttgcttgtaaaatattcttctgatgacacagactggagagaactgtgtctttaacctattgcatttaacccagggatgctcactgctagctgagggtggcccaaaatggaggccacaaatgaacctcttctctactcttctttccttttatcctctcctttcctttctcctttcccttcccttccctcccctcctcccctaccctctcctttttctttccttttctttccttttttaaaattttttctttctttctttcyttccttccttccttccttccttccttccttccttccttccttccttccttcctcctttcctcccttctaacatttatggacacattaccatgaacacagtggacgctgttgttaattccatcttaaaaatgaggaaaatgaggttttaagaagttaggcaactcatctgatgttacacatctgagaggtaagaaagctgtactgaaaccaggatcacctgaccctgtgatacagcctgtcactcattcacttcatgtctctcagagatctcttcacgtgccagtctcactgctcggaggagcacagaagtctcattggagaatatctgggtagtaccagatagggaacctgtcctcagaaagccacctttctcacccagataccccttcggctacttgatagatcacctgtcacgcccatcacctgtgcctatggtcagcgtctccccacacttgcagctgctctcagtgactagggcaaagtctgactttgaaagctcatttcaggtgctatgcacgtgacagtgtaccagcaatgtctggcttgttccttctcccattccttcaggggtggtcaaccaattctgagaaggaagccctgcccccattcctccatccccacatccccgtcgtcctcggctcccagctctgcccttccatttctggcatgccggtgggtcgagcattgtctgccttctggggaacacaaacccttttgagttgttgggaagtttctgatgcgtgagttgttgggaagtttctgatggggtcagctctggttctcatgggccattaaagttggattgttgagggctagaaaggaagacaaaagtgcatgtcctgagtggaggtatgaagggtgaatggggaccggaccctgaatggatgccctgagcaagcgaggggtctaccagatggaagcccagaggtccgagctgatgtggaggacaatggacagggaggggcagtgcccactgcttgtgcaatggtaagaaaatgtacagagggaaggacaaaccccaggagctttgctcaaatacccagccgccctgggactcccagacacgcaggcccagcctacagtcaggcacccagccaggtaaagcgcccatccctggaagggggtttttgccccattgctactggagttcatcattggtggtttattatgatggagcttggacaaactacaaatgggcactgggtgtatctaatgctgtatgtgaatactattcattttttaaaagtatataattcaaataaacattctttaataaaaatgaaaaaaagaaatagtgttaaaagcaccaaaattgtgtg

SEQ ID NO: 550446 - DNA, 609 bp, Homo sapiens
tggcttctcctytgtgaatgagtggagtcttagcatcacttctgcctgctctgatgctgagctgttttgcaacagttgacctgtttgctcaggtagtgttatgagcacaccttatgtccaatgtctcctcagcaaagatctgctcgcctcagctctgactctgcccattcactgacattctcctgtcaaattccctggtccctgagcaaaagacatggagggcaagggaatggtatggcagggccaaacacttcacacagcttttcagataaaaagctctataggacctccctgtttaagcacttcaggttaaaagttgtaaattaaaagagaacaatgactgcctgtgctctattatttttctaagtcaagtatggctgtgctttatttatattctaatttaagagatatatcttttcacctttttttttttttagacagagtatcactctgtcccccaggctggagtgcagtggcacaatcttggctcactgcaacctctgactcccgggttcaagtgattcttgtgctttagcctggatcctcacctctaaccttatataaaaaccaactcaagatggatcaaagacttaaaatctaagacctgaa

SEQ ID NO: 550447 - DNA, 674 bp, Homo sapiens
tacctaactataagacctggtcccatagagtgcttcttttgttttgttttgttttgagacagggtcttgctctgtcaccaaggctggagtgtaggggtgctatctcagctcactgcagcctctgcctcccgggttcaagcaattctcatgcctcaacctccagagtagctgggatcacaggcacatgtcactacacccagctaatttttgtatttttagtagagatggggtttcgccatgttggccaggctggtctcgaactcctgacctcaagcagtccacctgcctcagcctcccaaagtgctgggattacaagcatgggccaccgcgccaggcctagagtgcttcttttatggcaggcactgtaacagagtttagatattttaacactttccatccttacaacaatcccatatgatagttactattattatcmccattctatggatgaggaaatggaggcaaagagaaattcaacaatttgcctaaggtcccacagctgatgagtgcacagctggtgtctgaatacaggcagactgatgccagtgtccatgctttttgctactaacacactactgggtttgtcccttactcagaagttaaatcacctcttcccccagtacgggaagcaccgaggggaaagtcctctgcaacgttcaattgaaggcaattga

SEQ ID NO: 550448 - DNA, 929 bp, Homo sapiens
gaaaaccaataggattctaagatgtacaacacccctactaagaaaagtataagccattattgagaaaaattaagaatgatgtaataaatgaaaggataaaattgtaagactgaatatttaaaatatagtaatttccccaaaattgatctgtatattcaatattatctcaaccaaaatcctaacaagtatttgtgcacgtgtatgtgcaggcacaagtgtgtgtgtgaactgacaaattggttctaaaatgtatctggaaatacgaagtgacacaaatagccaaaacaatattttaaaagaagtacaactttaaaatgcatattactaagtgaaaaaagccaatatgaaaagcctacatactgtatgatgccaactatatgacattctggaaaaggcaaaactgtggagatggtaaaaaaatcagaggttgccaggggttagggaggagggatgaataggtagggggaaaaaagtaaattattttaaaatacayaatgacttagaacgtttactgcccaaatactctcactgaaaaattaccaaaggatagaaatgaataaggaagctgggcatggtggctcaacgtctgtaaccccagcactttgggagcccaagaccggcggattactggaggcccaggtgttcgagaccagcctggccaatatggcaaaagctcgtctctacaaaaaatacaaaaattagccagatgtggtggctcacgcctgtaatcccagctactcgggaagctgaggtgggagcattgcttgagcccaggaggtcaaggctgcaatgagccatgatcacaccactgcactccagcctgggtgacagagtaagactcagtctcaaaaaaaaaaaaaaaaaaaaaaaaaagaaagaaggaaggaagagaatatgaaaaataagaatgaacagaaatattggtaata

SEQ ID NO: 550449 - DNA, 929 bp, Homo sapiens
gaaaaccaataggattctaagatgtacaacacccctactaagaaaagtataagccattattgagaaaaattaagaatgatgtaataaatgaaaggataaaattgtaagactgaatatttaaaatatagtaatttccccaaaattgatctgtatattcaatattatctcaaccaaaatcctaacaagtatttgtgcacgtgtatgtgcaggcacaagtgtgtgtgtgaactgacaaattggttctaaaatgtatctggaaatacgaagtgacacaaatagccaaaacaatattttaaaagaagtacaactttaaaatgcatattactaagtgaaaaaagccaatatgaaaagcctacatactgtatgatgccaactatatgacattctggaaaaggcaaaactgtggagatggtaaaaaaatcagaggttgccaggggttagggaggagggatgaataggtagggggaaaaaagtaaattattttaaaatacataatgacttagaacgtttactrcccaaatactctcactgaaaaattaccaaaggatagaaatgaataaggaagctgggcatggtggctcaacgtctgtaaccccagcactttgggagcccaagaccggcggattactggaggcccaggtgttcgagaccagcctggccaatatggcaaaagctcgtctctacaaaaaatacaaaaattagccagatgtggtggctcacgcctgtaatcccagctactcgggaagctgaggtgggagcattgcttgagcccaggaggtcaaggctgcaatgagccatgatcacaccactgcactccagcctgggtgacagagtaagactcagtctcaaaaaaaaaaaaaaaaaaaaaaaaaagaaagaaggaaggaagagaatatgaaaaataagaatgaacagaaatattggtaata

SEQ ID NO: 550450 - DNA, 929 bp, Homo sapiens
gaaaaccaataggattctaagatgtacaacacccctactaagaaaagtataagccattattgagaaaaattaagaatgatgtaataaatgaaaggataaaattgtaagactgaatatttaaaatatagtaatttccccaaaattgatctgtatattcaatattatctcaaccaaaatcctaacaagtatttgtgcacgtgtatgtgcaggcacaagtgtgtgtgtgaactgacaaattggttctaaaatgtatctggaaatacgaagtgacacaaatagccaaaacaatattttaaaagaagtacaactttaaaatgcatattactaagtgaaaaaagccaatatgaaaagcctacatactgtatgatgccaactatatgacattctggaaaaggcaaaactgtggagatggtaaaaaaatcagaggttgccaggggttagggaggagggatgaataggtagggggaaaaaagtaaattattttaaaatacataatgacttagaacgtttactgcccaaatactctcactgaaaaattaccaaaggatagaaatgaataaggaagctgggcatggtggctcaaygtctgtaaccccagcactttgggagcccaagaccggcggattactggaggcccaggtgttcgagaccagcctggccaatatggcaaaagctcgtctctacaaaaaatacaaaaattagccagatgtggtggctcacgcctgtaatcccagctactcgggaagctgaggtgggagcattgcttgagcccaggaggtcaaggctgcaatgagccatgatcacaccactgcactccagcctgggtgacagagtaagactcagtctcaaaaaaaaaaaaaaaaaaaaaaaaaagaaagaaggaaggaagagaatatgaaaaataagaatgaacagaaatattggtaata

SEQ ID NO: 550451 - DNA, 606 bp, Homo sapiens
ctataaacacaggactcttaaaataaatctatgacccattgtttttaaatgaaaattatctgtgactttgaatttttggaagggcacatcttcatctagatatgactgacatgaattactatgcagtgtgcctgtaggtggcctggcacaacttaacacagtgttttttttttttttttatctttccttcgactttccttctcttgagatagatgactataggaggtagaaacaagttgtaatcacatttaccatttttaatgaaatattttcatgttcttttatcccagtttgtattaactatrcttttaaattatacattattataaaaatattttactgttgagattttaaaaatttaaaagtgatagctatacttgcctctggtgtcgctgattttctgtgtatttcatacaggtcagtatatatatatatatatatatatatatatatatatatttttttttttttttagatggtacatatgtgtgtgcatgtgtacacacagacacacatatttttacttttttttttttttttgggagacagcgtcttgctctgtcgcccaagctggagtgtagtggcatgatcatagctcactataac

SEQ ID NO: 550452 - DNA, 832 bp, Homo sapiens
tgcaacttatgtagactatgcctgagaatatgggtttctagcttagattttaaagaagcttcattatatgcttgaatttaaacatccctgaaaacaattgggtaagtatatttagttgttttaaaattaaaagaaacaatttcaaggttttactatttattttttctttaaaaattcaccttttcagtgtctaagtagattttaaaagtcatttggattcaggaattaaatccagtattaattcatatgatgtggacatccatgaaacttcctcagtataattgaacacagatttttgaagatcatggatatagaatacctgtgaattacgtcaactcatccaacttttccatcttttgattgacccagaataatgttgaaatatatacagttgaataattgtgtatgtgtgtctgtgtgaacatactcaagtaaatgctttataaatataactgtgtgatcttacacagttcttacacacacacagctgtatttataaggtatttgcttatgttcatggtatataggtatgtaaatatgcacatacatgaaatattgttcatgagggaatcataagtaaaaattattgagagcaatttactagtaacagagaagctattctaaaatttcagaaagagcatttttaaaaatttaccaaggtaaaacataattaataattaaatttgagttcagaaccagccatgggcagagctggtttccaaaccgagcttacagaagattatgtcctagaagcacaggcaatacaaaggcagctggcacatcgccaatattgtattgcagaatrtagaaagctctgttccttgttatattg

SEQ ID NO: 550453 - DNA, 1280 bp, Homo sapiens
aaatcatggaggcacaggagaagacaattaacaggtttaatagagtaagaactttggtaatgaatgttttatttagaggtaaacaaatcaattttatatgtaagaaaggctattgcttgtttttcatttatttgtttgcctccttaattttatgctcaacctcacctataaaaggcaccaaattaatgtttttaccaataggacctcatcagtgtcataaagacattgtactgtatttactgtgattatttggctctcatataatttactctggtataaatcacaaaatgcagtctcttcagaagcaatcatttgcctaaatggtactatttctttacaatattttttatttacaagtaataatcttatttaaatttgatttactagttttagtaaaagaaaaaaaggagaggagtaatactgagtttcattaactttctttttttcttttgagacagagtctcactgttgcccaggctggaatatagtggtacgatctcagctccctgcaacctccacctgctgggttcaagcgatttctctgcctcagcctcctgagtagctgggactatgggcctgcaccccaacgcctggctaattttggtatttttagtagagacagggttttgccacgttggccaggctggtctcaaacccctgacttgaggtgatctgcctgccttggcctttcaaagtgctgggattacaggcatgagccaccacacctgtttcatcaactctaaagtatagaagtggtgtttgtataagaaacaccaggatttagggacttaaaagtacgctagcttctatctagcccctctccatttctgtcccttcttcactgggcattggcaatagtatcttctccacacagctttataccataagtttagaacatggctgtaggctgtgctaggtctgcatcatcctagataaacatcgatatactttctactctccctacaggtatcagaggggtggcttacaggataggttccattacagagttagtatggaaaatctagagaaggattctgattggcctggatccaatcatactatacactcttgtattgagaggagcaggatattcttgagtcctaagttagtggtggtggtgaaatgctataatttgcatacagagctacaaaggagttttgtagggatggataggtgtgctggcggagcgggctgcaggaacagagcaaataacatattgtctgtaatgcaatttgaaaatattagagtatctatgcttttaacrttattgaataaattca

SEQ ID NO: 550454 - DNA, 686 bp, Homo sapiens
tcaggaagcagttagtgaagactatgaggaactgggaaattgtgttgagtagaccaaaagtgctgatcggagaaaagttaggacagttttgttgggagaaataaaagaaggtttcatggaggcagtgaaatcaacctcatggttgaacggtggtttggattgggatgctgtaggttgttgggrtgggttttgttggtgagaggattggtgtgagtaaaagtacagaggagagaatgccctctgccctgagcatggtgtaggtggttttatctggtagggcagagggcatctttgaggaatagtgaagggtagggtgggtccagttatagggggccctgatactcagaccaaggaatatagtcaggagattgtaggcctagggcaagatatgaattgacagaagcgttgttgaagaagtctggtctggaaatgatattcaggagagagcagaggagctgggggctggatacagggagcccagctccaaggcagctggaataaggaaatcttgattgctagcttcaaagaaccattttgaaggagaaaagataggatttatttgactgcatgaaagtgaggaagaagggttagataaatatggttatgtagtttcacacctggttgacgtgcataatggctccatgtcagagatgaagaaggaaatagttttgatgaaagaggctgat

SEQ ID NO: 550455 - DNA, 2002 bp, Homo sapiens
atggttaagtcagaagtttctgttttttagctgctgatgagatcttgccccagccttagaggcactgaataaaatggtcagattttccacatgctcaatccagkccagtaggagaagtttcactcttgcccggaccaaaaagtcttagaattacaatgatggatgggcttatggaatggctcttcctcttctaggagcaaatgtctataataatttaggtcccattgggttgtgtctcaaccatgcaactggatttattaatttgaccttttaattactaacaatctgctgacctgaaatttcttcagatcctcagagcaaggaaataaacttctccaggagagagaataaaaataaaataaaacaaaagcaagtctggcacctagctatgttggtgtcttccaaagtatgaacaccataataaaggctttctgcttctgtttcattatgtgacagtcagagactgtaaacactgtcggtggcagagaaaacagtgtctagaaacaaataagagaaactaaagatgaaactgggaatatgtgcacagcttatgctttggtattctgtggtcatgacagcttttgctcttatgaaagtactgagtgtggtgttctttttccctgtaatgatttctgaaactgtgtgacttgtggaatttgccttaaaaaatgcagtgagtgtttaatcgctcagggtgtgagtaaccacattctgttcgactatgcttccagccctcactttcctccttatcagtgacagtactccaaacacttgtctcaattttcagatcaaagctgatgaaaaacagacctctaaagggttgaattgccttctgcatttttgttcatcggaagaaaatacctataccacttgaaagggctgagcttttttagtgcctcatctgtagattgtaaattctgttttgccttcctgctttgcttatttcttactctgtcaatgtcatctgcttcaagaaatgtatcttttaattaattattcttgtctcaagttgtctgctgtggctcactgtcagggcaataattcatatcggtaaaataggatatgttgctaaatggaaatatcttggcttatttcaacatgagattaacttcatttacccaataatcaccttaaatgatttttcagataaatctttttgttgtttatattttatttgaagttgcatacaacattgcttttctaaaagagcagaaatttggaagcatgagaacattaaactatagaagaccctagaagtctgattgaaaaaacatttagaaggaattctaaagctagaagccaagtccaacgacacaacaataacaattccattcatattctgatctatgggaaatctccaaaaaaggcctcccagaaatgcataataaaatatggatagttttgaataggttacacatggtttgcctgagtttattaaaacaatggaatcagttataaatagtgcagaaaagattaataaagtaattgaaggtaaataaatttaaaacaaatagaaacaagatgggtgacaaaataaacaaacctctatgacttttccaaaggcaacctttaaaaacaatggtaggcacgttctcactcataggcgggaattgaacaatgagaacacttggacacaggaaggggaacatcacacaccggggcttgtcgtgggtgggaggagcggggagggatagcattagcagatatacctaatgtaaatgacgagttaatgggtgcagcacaccaacatggcacatccatacatatgtaacaaacctgcacattgtgcacatgtaccctagaacttaaagtattaaaaaaaaaggtagattttcaaagctatttactaaagtgaacagaaacaaactttgtattatttggagaaccataatttactccagttaaaaagaaattaaagttcaaggatttacatgtactaatagactattttttgaaatgataagatcaaaaatattattgaatttacaatcttttttacttt

SEQ ID NO: 550456 - DNA, 1066 bp, Homo sapiens
acacctacccacagttccataagaattgaaaatgaattttccgtgcctaatcacttattaaaaataattaactagtgattttttaaaaaaattgacaaaaaatcatatatttttatgttagctcatgatttgtgatacatggcaagctaatgcaatatgcacataagcattaccccacatatcttttttgtgatgagaacatttaaaatatactctcaggaaatttcaagtacacaatatattgttattaattataattactatgctgaacaatagatctcctaaacttatttttcctaactaattttatatttgattatcaatatcttcccaatctcccaatgagttctttttaattacacatttttgtggatacagagagaagaagttgaataagagtgtgaaatgttgggctgagcacagtggctgaagcctgtaattccagcacttaggaaggctgaagcagaaggattgctagaggccacaagcctgagaccagcctgggtaatgaagggaaaccctgtctctacaagctttttwaaaaatattttatgtatttatgcatttatttatttatttattcatttatttatttattttaacgttagctcggcatggtggcacatgcctgtatttccaattgcttgggaggctgaggtgggaggattgcctgagcttagaaggttgagcctacagtgagccatgattgttgccaatgcactccagcctgggagtcagaccctccctcaaaaaaataaaaaataaaaaaggtgaaaagtttaaatccacccatgtctcttaatgtgtatgaagatatgcaatctatccttatggaaaagatgtgaaaagctttacccagacaactgtcttacagaaaagatgtgtgcataaagaaggactctggataggagatgctaaggctgtgcttgaagaaactctaagactttaaaacactgatcttcaagtaagaatcttcaaatgagcactgagataactgaggtgccagtgagccctaaggggattgtcagcatatttttacctcttcatcaaatatctaaattcaagg

SEQ ID NO: 550457 - DNA, 958 bp, Homo sapiens
tgtccctgaaggtrtccaagaatatgcaggctgaaggaaaccctgcttagggctggttctatgagaatgttgagaaatagttttgctggttgtaatcttccagagattggtctattgatcagtattttggaatccgggtgagtcagaaccaggctaggtgtcgcccttgtgtagctgttgaagatagtgtgggagagtggggtgtgtgttttaagcaagtgcttggttcaaagtgccaatttctcttcaccagctaagtctcgatcagcctttgtcagagctcaatctgcctgtgaatttgcctggaatccattcccagcagcaccatctgtttgcaattgtcctaccatctgaccatttaccctttgtcaacttcctcctccgggcactcccactgccagttggaatccgcccatggattccacccattgtccatcctggataaactgagtctggagaaagacagcacaggagagaagggaagaggtgggagacgttccaatgtgctagcgttcttggccaagaggtgtctgggaagccccattaagccttcacacagaacctggagagagagcatgtggcccagccagagccatattgtgccccaggcagtctgatggctccacaaataatattgatgccttttgtttgaaaactctttgtggaggtttcccattcccaacaaaccacgcttgatgctgggcttcccgcaagcctctttgccttttgcacagtcccgtggccaactgtgcaggcagatgagggcccccgaatgctaatgagggaaatggctggcattcctaaggcacgcccgactctgggaaccccgcctttgttgctaaggaacattggaactgtagctgaaaggctcttagaagagagaggagtgaagagagggagagaagaaaggagagcatttgttttcagagcttcacagttctctggccagctccaaagc

SEQ ID NO: 550458 - DNA, 958 bp, Homo sapiens
tgtccctgaaggtatccaagaatatgcaggctgaaggaaaccctgcttagggctggttctatgagaatgttgagaaatagttttgctggttgtaatcttccagagattggtctattgatcagtattttggaatcygggtgagtcagaaccaggctaggtgtcgcccttgtgtagctgttgaagatagtgtgggagagtggggtgtgtgttttaagcaagtgcttggttcaaagtgccaatttctcttcaccagctaagtctcgatcagcctttgtcagagctcaatctgcctgtgaatttgcctggaatccattcccagcagcaccatctgtttgcaattgtcctaccatctgaccatttaccctttgtcaacttcctcctccgggcactcccactgccagttggaatccgcccatggattccacccattgtccatcctggataaactgagtctggagaaagacagcacaggagagaagggaagaggtgggagacgttccaatgtgctagcgttcttggccaagaggtgtctgggaagccccattaagccttcacacagaacctggagagagagcatgtggcccagccagagccatattgtgccccaggcagtctgatggctccacaaataatattgatgccttttgtttgaaaactctttgtggaggtttcccattcccaacaaaccacgcttgatgctgggcttcccgcaagcctctttgccttttgcacagtcccgtggccaactgtgcaggcagatgagggcccccgaatgctaatgagggaaatggctggcattcctaaggcacgcccgactctgggaaccccgcctttgttgctaaggaacattggaactgtagctgaaaggctcttagaagagagaggagtgaagagagggagagaagaaaggagagcatttgttttcagagcttcacagttctctggccagctccaaagc

SEQ ID NO: 550459 - DNA, 958 bp, Homo sapiens
tgtccctgaaggtatccaagaatatgcaggctgaaggaaaccctgcttagggctggttctatgagaatgttgagaaatagttttgctggttgtaatcttccagagattggtctattgatcagtattttggaatccgggtgagtcagaaccaggctaggtgtcgcccttgtgtagctgttgaagatagtgtgggagagtggggtgtgtgttttaagcaagtgcttggttcaaagtgccaatttctcttcaccagctaagtctcgatcagcctttgtcagagcycaatctgcctgtgaatttgcctggaatccattcccagcagcaccatctgtttgcaattgtcctaccatctgaccatttaccctttgtcaacttcctcctccgggcactcccactgccagttggaatccgcccatggattccacccattgtccatcctggataaactgagtctggagaaagacagcacaggagagaagggaagaggtgggagacgttccaatgtgctagcgttcttggccaagaggtgtctgggaagccccattaagccttcacacagaacctggagagagagcatgtggcccagccagagccatattgtgccccaggcagtctgatggctccacaaataatattgatgccttttgtttgaaaactctttgtggaggtttcccattcccaacaaaccacgcttgatgctgggcttcccgcaagcctctttgccttttgcacagtcccgtggccaactgtgcaggcagatgagggcccccgaatgctaatgagggaaatggctggcattcctaaggcacgcccgactctgggaaccccgcctttgttgctaaggaacattggaactgtagctgaaaggctcttagaagagagaggagtgaagagagggagagaagaaaggagagcatttgttttcagagcttcacagttctctggccagctccaaagc

SEQ ID NO: 550460 - DNA, 958 bp, Homo sapiens
tgtccctgaaggtatccaagaatatgcaggctgaaggaaaccctgcttagggctggttctatgagaatgttgagaaatagttttgctggttgtaatcttccagagattggtctattgatcagtattttggaatccgggtgagtcagaaccaggctaggtgtcgcccttgtgtagctgttgaagatagtgtgggagagtggggtgtgtgttttaagcaagtgcttggttcaaagtgccaatttctcttcaccagctaagtctcgatcagcctttgtcagagctcaatctgcctgtgaatttgcctggaatccattcccagcagcaccatctgtttgcrattgtcctaccatctgaccatttaccctttgtcaacttcctcctccgggcactcccactgccagttggaatccgcccatggattccacccattgtccatcctggataaactgagtctggagaaagacagcacaggagagaagggaagaggtgggagacgttccaatgtgctagcgttcttggccaagaggtgtctgggaagccccattaagccttcacacagaacctggagagagagcatgtggcccagccagagccatattgtgccccaggcagtctgatggctccacaaataatattgatgccttttgtttgaaaactctttgtggaggtttcccattcccaacaaaccacgcttgatgctgggcttcccgcaagcctctttgccttttgcacagtcccgtggccaactgtgcaggcagatgagggcccccgaatgctaatgagggaaatggctggcattcctaaggcacgcccgactctgggaaccccgcctttgttgctaaggaacattggaactgtagctgaaaggctcttagaagagagaggagtgaagagagggagagaagaaaggagagcatttgttttcagagcttcacagttctctggccagctccaaagc

SEQ ID NO: 550461 - DNA, 1575 bp, Homo sapiens
taaaaatacaaaaaattatccaggcatggtggcggacacctgtaatcccagctactttggaggctgaggcatgagaattgcttgaacscaggaggcagaggttgcagtaagctgagatcacaccacagcactccagcccaggtgacagagcgagactgtatctcgaaaaaaaaaaatcagaaatagcttattttgggggaaacaaatgccatcctcttcagggctaccatgcagtgatgtggaggcagagcctatagaaggctttgtggatgctggctgtgaccagaagaagggttccattttctaatttgcacagagatataaaccattctccaagccacgtttgagcaaggctgcattcatccagagggtgattttctatgactttctgttaaggtactcactgtaggaaggaacaccaccttgataagaatataccaccttcttattgtagtcatctacaacactcttctcactcgtgggaggttttatctctgatttattacctttctaccactaccttggtcttcattcttggtgacatcagtatcaacgtagggaccaattacccataatgttaccacttccagaatgtcaattttgctgttgtgataaggtagctgagtggttaagttgatagactgcaaaatttcaatttcaagcatcttactaccaaactcctcctttctaccttttcagatcatacccctactatagagatttcagcaattcttcaagtccaccatgatttcacttcagcattcttaccttgaatgaaatccaacccctagttaagtctaattttctgcctcttctccttttatacccctgttgccaaaagtggctagagaaaaatgaatgaccatacagaccattggtactctataattatgtccaaaaatcctcacatatgcccccagtatgacttggcagagctatgtcaaggactgaatggtctgagattttaccacatatgtaagttaacaagttagcctaatagggtttcatgaatgctggcagaagacccaggactcctgggtcagagacaaataactatattattcattgcacagaaagcaacatgagcatcagcatatttaccaacctttcccactcctccatgtccctgacaaataagtcccaacggatccttgctgatgccataggctgtgttcagaagaagaaccctgagactagggactcacatcttttatgatgggcagagaacaggtctcctctttgctccagagggagacaggatctctatctgccaaggctatttattataccaacatctttaaagaggtacttggaaataaaaggagtcagtgcctttgttcacaagatatgcaaaaccctgagaggcccatggcgaattgtctgttaatatgacttgaatctggaccatgatcacagactttttaaagctcttatacaagtctttcacttgttcattgaatctccttgctttttgtccactcttgggttattttctttccaatattttatctctgttgggttgcccacattatcatcaacaacacttagatcctgtaataattttcattatttaaa

SEQ ID NO: 550462 - DNA, 1575 bp, Homo sapiens
taaaaatacaaaaaattatccaggcatggtggcggacacctgtaatcccagctactttggaggctgaggcatgagaattgcttgaacgcaggaggcagaggttgcagtaagctgagatcacaccacagcactccagcccrggtgacagagcgagactgtatctcgaaaaaaaaaaatcagaaatagcttattttgggggaaacaaatgccatcctcttcagggctaccatgcagtgatgtggaggcagagcctatagaaggctttgtggatgctggctgtgaccagaagaagggttccattttctaatttgcacagagatataaaccattctccaagccacgtttgagcaaggctgcattcatccagagggtgattttctatgactttctgttaaggtactcactgtaggaaggaacaccaccttgataagaatataccaccttcttattgtagtcatctacaacactcttctcactcgtgggaggttttatctctgatttattacctttctaccactaccttggtcttcattcttggtgacatcagtatcaacgtagggaccaattacccataatgttaccacttccagaatgtcaattttgctgttgtgataaggtagctgagtggttaagttgatagactgcaaaatttcaatttcaagcatcttactaccaaactcctcctttctaccttttcagatcatacccctactatagagatttcagcaattcttcaagtccaccatgatttcacttcagcattcttaccttgaatgaaatccaacccctagttaagtctaattttctgcctcttctccttttatacccctgttgccaaaagtggctagagaaaaatgaatgaccatacagaccattggtactctataattatgtccaaaaatcctcacatatgcccccagtatgacttggcagagctatgtcaaggactgaatggtctgagattttaccacatatgtaagttaacaagttagcctaatagggtttcatgaatgctggcagaagacccaggactcctgggtcagagacaaataactatattattcattgcacagaaagcaacatgagcatcagcatatttaccaacctttcccactcctccatgtccctgacaaataagtcccaacggatccttgctgatgccataggctgtgttcagaagaagaaccctgagactagggactcacatcttttatgatgggcagagaacaggtctcctctttgctccagagggagacaggatctctatctgccaaggctatttattataccaacatctttaaagaggtacttggaaataaaaggagtcagtgcctttgttcacaagatatgcaaaaccctgagaggcccatggcgaattgtctgttaatatgacttgaatctggaccatgatcacagactttttaaagctcttatacaagtctttcacttgttcattgaatctccttgctttttgtccactcttgggttattttctttccaatattttatctctgttgggttgcccacattatcatcaacaacacttagatcctgtaataattttcattatttaaa

SEQ ID NO: 550463 - DNA, 551 bp, Homo sapiens
cgccactgcactccagcctgggcaacagagcaagaccgtctcaaaaacaaacaaacaaacaaacaaacaaacaaaacttaaactctatgatcctaagtaaaagataagagaagcagttaactaacttccttttagttaggtactccagggtactactttttgtgatggcagacacacttaagctatttgtaaatgtgtcaccaccttttcaaataattttcmttgaaggttaacatgttttctctgagaaaaatttatttaattaaaaaccttgtgtatataagggctacaataaaattttcatggactctgagatgaaaagacatgtatatcttcttgaagttatatagttagcaaatgtaaaggctataggggtggattgtgtattatgcaactgctaaacactgtcttgcaatttgtgtgcgtgtgttttgtattaaaccatgtgctcctgtccttgctagtacagtggcttttataatttttgagatgatgcccatagtgagaaccacatttttcatagtgttccagggtatgcacatatcatatac

SEQ ID NO: 550464 - DNA, 551 bp, Homo sapiens
cgccactgcactccagcctgggcaacagagcaagaccgtctcaaaaacaaacaaacaaacaaacaaacaaacaaaacttaaactctatgatcctaagtaaaagataagagaagcagttaactaacttccttttagttaggtactccagggtactactttttgtgatggcagacacacttaagctatttgtaaatgtgtcaccaccttttcaaataattttcattgaaggttaacatgttttctctgagaaaaatttatttaattaaaaaccttrtgtatataagggctacaataaaattttcatggactctgagatgaaaagacatgtatatcttcttgaagttatatagttagcaaatgtaaaggctataggggtggattgtgtattatgcaactgctaaacactgtcttgcaatttgtgtgcgtgtgttttgtattaaaccatgtgctcctgtccttgctagtacagtggcttttataatttttgagatgatgcccatagtgagaaccacatttttcatagtgttccagggtatgcacatatcatatac

SEQ ID NO: 550465 - DNA, 622 bp, Homo sapiens
ggcttgaagtagaaaatgccatgatgagaaaaacgattaaaaaacaggatgaccaaattgagcggcttgagaaaatcctgcagcgttcaagtttggtaagctgatctcttaatttctgtcatactgaaaaggaattttatttttccagtaggacgggttaaatgtcccttgtccaaaatgcttgggaccaaaagtagatttttttcagattttggaatatttgtatatacctaatgaaatatcttggggatggtacctgagtctaaacatgaaattcatttatgtttcatatataccttatgcacatagcctgaagstaattctctacaatgttttacagtaattttttgcaggtaacaaagtttttactgttttccccagagcctgtcacatgaggtcaggtgtggaacgttgtgttgcagttgtggtgtcatgtccgtgctcaaaaagtttcaggttgtagagcattttggatttcagatttttagattagggatgatcaatctacagtacagatgctccttgacttgcagtgggtttacatgataatgtctcttgtttgactgaaacattataagtaatatttgatttatttcagatgctgccaggtgttcaagagcta

SEQ ID NO: 550466 - DNA, 466 bp, Homo sapiens
aagtgctgggattacaggcgtcagccaccgtgcccggccctatagttatcctttcatcaattgatggacatttgtgttacttccacttttttgctgttatgaaataggctgctaggtcaggtgcagtggctagtgcctgtaatgccagcactttggaaggctgagacaggcagattacttgagaccaaggagatggaggttgcggtgagccgagatcacaccattgcactcaagcctgggcaacaagagtgaaactccatctcaaaaaaaaaaaaaaaatcatacaaagtggcttcaattctgttaaaacttgtgtgataggaaaaggtggatgggtggtaataagaagattggtggtaacaagaagattgggctctaggcygggcgcggtggctcacgcctgtaatcccagcactttcggaggccaaggtgggcggatcatgaggtcaagagatcgagaccatcc

SEQ ID NO: 550467 - DNA, 466 bp, Homo sapiens
aagtgctgggattacaggcgtcagccaccgtgcccggccctatagttatcctttcatcaattgatggacatttgtgttacttccacttttttgctgttatgaaataggctgctaggtcaggtgcagtggctagtgcctgtaatgccagcactttggaaggctgagacaggcagattacttgagaccaaggagatggaggttgcggtgagccgagatcacaccattgcactcaagcctgggcaacaagagtgaaactccatctcaaaaaaaaaaaaaaaatcatacaaagtggcttcaattctgttaaaacttgtgtgataggaaaaggtggatgggtggtaataagaagattggtggtaacaagaagattgggctctaggccgggcgcggtggctcacrcctgtaatcccagcactttcggaggccaaggtgggcggatcatgaggtcaagagatcgagaccatcc

SEQ ID NO: 550468 - DNA, 609 bp, Homo sapiens
tttttttgagacagagtttcgctcttgtttcccaggccggagtgcaatggcgccatctcggctcaccgcaacctctgcctcccaggttcaagcaattctcctgcytcagcctcccgaatagctgggattacaggcgcccaccacaatgcctggctacttttcatattttaatggagatggggttttaccatgttggccaggctggtctcgaactcctgacctcaggtgatccgcctgccttggcctcccgaagtgctggaattacaggcatgagccactgctcctggcctaagatgttttttaaataatgtttttaactaaattttaagaatgtttttaactaaagttatttatatttggaataattcgttaatgatttgtgtcatttccccaacccctttttaaatttgtgaatttgaggactggattaaaagataaaaagttgttggatcttatttattttaaagtcttctggtaattgagcaagttggttatatttctgggacaatgtaataaacatagttcatttcccaggaggtttttgttttgttttgttttgtttcgttttgtttgagacagagtctcactctgttgcccaggctggaatgc

SEQ ID NO: 550469 - DNA, 652 bp, Homo sapiens
ccttttcttactgtgtatctaatcataggtataatttggtgaccatggttatgttttgcacattgatttccatttgtttcatgttagaaacagtactaaactgttctgtgaccataatttgtaaataaagtggtgttctgtttaaaaacaagccctgttatctaaaaaacagttttttgtgttttacaacattctttcamatggagtatctcatttaattctcacaacagttgtatgtagctaaggcaggtatcatggtccgcattttacagatgaggacactgaggttaaaagagattaagagactaatagggtcacttggctagcacatcttgagaccaccctaaatcttgtggtttttatccttaatctcacaaatcttttcctttgctacatttagaaggtaaaagaatatttgttcacctttgaggaagctggtttccatcagtattttattgtaattctgagggttttttattttttatatttttttgagatggggtcttattctgttgcttagggtagagtgcagtggcgtgataatagctcactgtagccttggactcctgggctcaagtgatcctcctgcctcagcttccccagtagttgggactacacttatgtgccaccatgcctggctaatttttttttt

SEQ ID NO: 550470 - DNA, 623 bp, Homo sapiens
ggcacagtggcagacatccagatgcaggctgaagtgggaaggtttggaactgtaggcatgcatgtggatctctgcctgatttggagccccactggtggaacctcatctttctcttcacctgatggctctcagtatggcaggaaggaggcctggctactactttactaatctgggagaggtagaaggcgtttggggagggagcaaaacccatgttggggtcttatttcctgcttgtcttctgatgtggtctggttcatgtgtcagcattcttgcwgcataatgtgaattaatgtgtagtatgaatttaaaacagcgaagaatcccaaggttttaagcccatataggtcacatgcctggaataaaattttgtttaaaaaagttggataaggctaagtgctctgaaagtgagaccgatgcaggtaccagcctctagaaatggcaattttagttagaaaaccctggacagtatgtgaggggtatacagggtaaatctcggagacgctttcatctccctcaacatgacagacctgtgcttttctgcacctgtcctttgccagtgtctgggattggaatcagattcctcttttctgtctgttgggatactgattcctgcttatgtcttt

SEQ ID NO: 550471 - DNA, 623 bp, Homo sapiens
ggcacagtggcagacatccagatgcaggctgaagtgggaaggtttggaactgtaggcatgcatgtggatctctgcctgatttggagccccactggtggaacctcatctttctcttcacctgatggctctcagtatggcaggaaggaggcctggctactactttactaatctgggagaggtagaaggcgtttggggagggagcaaaacccatgttggggtcttatttcctgcttgtcttctgatgtggtctggttcatgtgtcagcattcttgctgcataatgtgaattaatgtgtagtatgaatttaaaacagcgaagaatcccaaggttttaagcccatataggtcacatgcctggaataaaattttgtttaaaaaagttggataaggctaagtgctctgaaagtgagaccgatgcaggtaccagcctctagaaatggcaattttagttagaaaaccctggacagtatgtgaggggtatacagggtaaatctcggagacgctttcatctccctcaacrtgacagacctgtgcttttctgcacctgtcctttgccagtgtctgggattggaatcagattcctcttttctgtctgttgggatactgattcctgcttatgtcttt

SEQ ID NO: 550472 - DNA, 532 bp, Homo sapiens
gggcaagacttaccctaagcaacactttttaaaaatgcaaatttctgggccgggtgyggtggctcaagcttgtaatcccagcactttgggaggcccaggcgagtggaccacaaggtcaggagtttgagaccagcctggccaacaccgtgaaaccccatctctgctaaaaatacagaaattagctgggcatggtggtgggcacctgtaatcccagctactcaggaggctgaggtaggagaatcacttgaacctgggaggtggaggttgcagtgagctgagatagcaccactgcactccagcctgggcaacagagcgagactccatctcaaaaaaaaaaaaaaatgcacatttctggatgctatcctcaaaattcttataaacgtttctgcattttatagtgatagtggaccccgggaattttgtatttgtattttattaagttctcaaagcatgtctgatataaataaactgtggactggactttgagcaaagctgtcctagcttttggtgtcagtgttcaaaagtgcatgac

SEQ ID NO: 550473 - DNA, 532 bp, Homo sapiens
gggcaagacttaccctaagcaacactttttaaaaatgcaaatttctgggccgggtgcggtggctcaagcttgtaawcccagcactttgggaggcccaggcgagtggaccacaaggtcaggagtttgagaccagcctggccaacaccgtgaaaccccatctctgctaaaaatacagaaattagctgggcatggtggtgggcacctgtaatcccagctactcaggaggctgaggtaggagaatcacttgaacctgggaggtggaggttgcagtgagctgagatagcaccactgcactccagcctgggcaacagagcgagactccatctcaaaaaaaaaaaaaaatgcacatttctggatgctatcctcaaaattcttataaacgtttctgcattttatagtgatagtggaccccgggaattttgtatttgtattttattaagttctcaaagcatgtctgatataaataaactgtggactggactttgagcaaagctgtcctagcttttggtgtcagtgttcaaaagtgcatgac

SEQ ID NO: 550474 - DNA, 539 bp, Homo sapiens
catgagctgagagccctagagcatgtgccttctctctcctcccatgcctctgaataaggatctcaaatgctggaagttctcagtcaaccctggcagcttttggtaacatttttcccatgttatttcagacaatggatttgtcctttttaaagacaaaatagaatttactttccaactttatattttgctatattttacaatatttcaagtttttcttgttcattagcaaatgaaataacagcatatggctaaaaggcctaaggataagacttcaccccaaagaaagacagctaatcctcaaaaaaaaaaaaaagaatattatcccctactaacagatctctattccaattttaagttatctccttgaccttaaagayaatactctgtgggagtgagaaacctaagaccaccgctcttcatagccagttgagttatgaatttaaaatttcccacaaaatagcaataaatccagatccaaagacagtttaagaaagctacagaaaatgttactctctcatcccaaaagcttttcagtcctt

SEQ ID NO: 550475 - DNA, 562 bp, Homo sapiens
gattcaaatatacatctaaaaatttgatgataaacattagaagccaaattttctggcaggagaatcacctactctgatagcatatttaaataatgacttagggaaattcattataattctgcatagacctagctcctatactagaaacatgcctctaggctcatttgtacaagaatttcttattcagcatctcagctgcacaggtttccacacagaaatgagcaggtaaaaatggttagagcttcataatgagtcaacattaacataattactttccatttcatctattacrgtacactgtttgactctctcatttcttttcatttcaatcattcctttagaacacccacaaggccctgttaaagaaatgagactttagaggctgcattatagaaactgaggtgaactaaacagttttgtaattttcccttagaaataaaatgatcaaacattccacactaacataaatggtgtaattttgtactaatacagtatttctttacatttcttaaaacaatgtatacaattagataatgacatgaaagtatttattttggcatca

SEQ ID NO: 550476 - DNA, 641 bp, Homo sapiens
ttatttatatcctttaattgcttccctttgcacttaaagccccaaggccttatgttgcccataaagtcctaaatcatctggtcccacctgctctcatgtgtcctcacttattctctaccatacttcactcttctgcagccaaatgcactctcttgctgctccacaaacayggtaggttcagactaaccacagggtcattcattacactggctctttcctgtgcagaatttgcatatctctatagctggctccttatcacggaggtcgctgctcagatatcaccaacccagagaggctttctttatcctgttgacaacaactacatacttccttcactgttttgtcttcataacatctattactatttaaaatatctttttttgtttattacctctccctcactccagaatacaatctcaagagggcaaggaaaatatgaatcttgtttattatatcttaaatagctcctataattgtaccgaaagagaacaattatacctaaagagttaacataataggcccacctcagaaaggcctgcttgcaaggataatccttggcaggtgcctggaaacttaaatagtaaacgatttcctatattgacataaactttctctaatgataagagtgactcattgtgcct

SEQ ID NO: 550477 - DNA, 1124 bp, Homo sapiens
aaaaaagaaaaagaaaaaaaaaactctggcaatttgtatcatattctctaaaatagaaataaaaccarcctcttaattgcacacatgtgcatgtaaccatttagttctttaaagtgaagctaggcagatgcagtggctttcacctgtcatcccagcatcttgggaggagaattcgagaccaccctgggtaatggagggagttcttgtctctaaagaaaaatttaaaaaatttagctggtaccagctagttgggaggccgaaatgagaggatcacttgagcccaggagtttggggctgcagtgagccgttttctcaccactgcactccagtctgggagacagagcaagatcctgcctcagaaaaaaaaaaaaaaggaaagctgcaggcagttcctaagaggacgatggcctttcagttcttgtggaaatgacaaggtcttccctagagccagtgacttcacagtggagtttgttagagccatgtccatttccatcgctaatgtcagctgtgttttcttaataatttaaatgtatgtgatatatgtgggtttttttatagaaaaggtttgtactcattttgctttctattttactgaagcatgggcctaaagaaagttctcaaggaattatttatttatttaccaagctttgaaaaaatactgctttaaggtcatcctccaaagatgtatgtttgtttctcttagtcatcacaatcttccatagtctttataaaattacctttattaataaaattgggtattttctccataatagctgattttagcctcataccttcaatgtaaaattggtcctttaggatggaaactaaacacagggtttttgaatatgcccctttacttttcccttaacttttatgattttggtgttagtatatacccatatataacataaaaataacaattcatatcttctcaagattactttgaaaatgcttttaaaatattgaattttagaagacaagtatttatggattgctcatcatgtaccaaacactgtgctttacttactacctctgccattttctagatgagaaaacaggctcagaaaaatgtaatgtcatctctaatgtcatggagcgagatgtggtaaacatagagtgggaac

SEQ ID NO: 550478 - DNA, 427 bp, Homo sapiens
agaaccatcagaaggggaggtttcctggacagtgtgtagaatcttattagtattctttgttttatgcccttgctcctaagcttgaattatcttcttgccttttagatcatatagggttttaacctctaaaacaagcatgagtagttaagaaggtagggtrtgcagtcatattcgctgggacctaattcctacttatcactcactagtccataacctcactcaacttgcttcacctttttgagcctcaatttcattactggcaaaaatgagatataatagtatctacctctgaatgctatgagattaaatgacctggtaggagttactttgcacaaagtgaagtgttcaataaacatgagatctattatcactgtgatcagcattattatatagcattggcatctgaaatggcatgtgatatttttag

SEQ ID NO: 550479 - DNA, 473 bp, Homo sapiens
attttcaacttgcttctgtaatcctcaagttggagattggaagacctcccccacaccctttttttttgaataatggaagaataccaactagagaaaagacttgcagacactgattctttggggacattcaaccaaaaatgaggttatgtcgttgttcaacaaaaatgaggttaaactgagcacagtggtgcatgcctatagtcccagctacttgggaggctgaggcaggagggtcacttgagcccaggggttcraggctgtggtgcactattattgcacctatgaatagccactgcacttcagcctggagaacatagggagactctatctcttaaaaaaaaaaaaaaagagagagcttatattcactcatcctacagtcaacaaaccttgtacctatacccaagaactttctctcagcatttcactgccttacactaaaattgaaatgaattgttgagaatcaccaaatattt

SEQ ID NO: 550480 - DNA, 473 bp, Homo sapiens
attttcaacttgcttctgtaatcctcaagttggagattggaagacctcccccacaccctttttttttgaataatggaagaataccaactagagaaaagacttgcagacactgattctttggggacattcaaccaaaaatgaggttatgtcgttgttcaacaaaaatgaggttaaactgagcacagtggtgcatgcctatagtcccagctacttgggaggctgaggcaggagggtcacttgagcccaggggttcaaggctgtrgtgcactattattgcacctatgaatagccactgcacttcagcctggagaacatagggagactctatctcttaaaaaaaaaaaaaaagagagagcttatattcactcatcctacagtcaacaaaccttgtacctatacccaagaactttctctcagcatttcactgccttacactaaaattgaaatgaattgttgagaatcaccaaatattt

SEQ ID NO: 550481 - DNA, 689 bp, Homo sapiens
aagtcacatagaaagatgaaaacacaaagcagcagtgaaaattaagaaagacaacccactgacagtttgggggaagaattcctactaattgagtcctgaacaaaatgatcagtaccacatcaatgttccacctcctgcaacagaaagatgagaagggccgggcgcggtggctgacgcctgtaatcccagcactttggaaggccgaggcagttggatatcctgaggtgaggagttcaagaccatccagcctgatcaacctggtgaaacgctgtctctactaaaaatacaaaaattagccgggcatggtggcgcatgcctgtaatcccagctacttgggaggctgaggcaggacaatctcttgaacctgggaggtggaagttgcagtgagccgagatcgtgccattgcaatccagcctgggcaacgagcgaaactccgtcttaaaaaaaaaagaaagaaagaaaaagaaagagaaagaaaaagaaagatgagaagacatatttttgtcagtttactacctgtactttagcacagaaaacccagaatctgtatagacytgaaaattgggcaagcattcatctattttaagattcctgtactttcaagtaaccaaaatactgtcctaataccagacctcattatttaataaataaaataatttctatttcctttttctgccataaaagaaatg

SEQ ID NO: 550482 - DNA, 657 bp, Homo sapiens
gagttcgagaccagcccggccaacatggtgaaaccttgtctctactaaaaatacaaaaattagctgggcatggtggcacgcacctatataatcccagtactcgggaggctgagtcaggagaatcgcttgaatctgggaggcagaggtcgcagtgagttcatgccacggcactccagcctgggtgacagagtgagacagtctcaaaaaaaaaaaaaaaatagaaaaggacttacmcttttctccttcttagtttgcttgagagaggaggaccacctgtgacaaccccattggaagacaaaaatctagcaggtccatttgggtgtttgatctgcaactttagcaagcatggtactaatatagattcagggacacacttgtccttgcaaatactgatctaaacagaaaatctcaacagtgatccagcatgattggaagagttgtaataatatgtatgaggatgatgtctatttagtaaatgtgagcagaaagaacatcctagtcttttttgacaacctgtcgtttcctctctccacaccccatccccagtccattctccttttgttctttttagtgatagaatgccctgagttttatacgacttcctggctaccttgctatggactacatttcccagtgtccttggcattcagatggtac

SEQ ID NO: 550483 - DNA, 657 bp, Homo sapiens
gagttcgagaccagcccggccaacatggtgaaaccttgtctctactaaaaatacaaaaattagctgggcatggtggcacgcacctatataatcccagtactcgggaggctgagtcaggagaatcgcttgaatctgggaggcagaggtcgcagtgagttcatgccacggcactccagcctgggtgacagagtgagacagtctcaaaaaaaaaaaaaaaatagaaaaggacttacacttttctccttcttagtttgcttgagagaggaggaccacctgtgacaacmccattggaagacaaaaatctagcaggtccatttgggtgtttgatctgcaactttagcaagcatggtactaatatagattcagggacacacttgtccttgcaaatactgatctaaacagaaaatctcaacagtgatccagcatgattggaagagttgtaataatatgtatgaggatgatgtctatttagtaaatgtgagcagaaagaacatcctagtcttttttgacaacctgtcgtttcctctctccacaccccatccccagtccattctccttttgttctttttagtgatagaatgccctgagttttatacgacttcctggctaccttgctatggactacatttcccagtgtccttggcattcagatggtac

SEQ ID NO: 550484 - DNA, 657 bp, Homo sapiens
gagttcgagaccagcccggccaacatggtgaaaccttgtctctactaaaaatacaaaaattagctgggcatggtggcacgcacctatataatcccagtactcgggaggctgagtcaggagaatcgcttgaatctgggaggcagaggtcgcagtgagttcatgccacggcactccagcctgggtgacagagtgagacagtctcaaaaaaaaaaaaaaaatagaaaaggacttacacttttctccttcttagtttgcttgagagaggaggaccacctgtgacaaccccattggaagacaaaaatctagcaggtccatttgggtgtttgatctgcaactttagcaagcatggtactaatatagattcagggacacacttgtccttgcaaatactgatctaaacagaaaatctcaacagtgatccagcatgaytggaagagttgtaataatatgtatgaggatgatgtctatttagtaaatgtgagcagaaagaacatcctagtcttttttgacaacctgtcgtttcctctctccacaccccatccccagtccattctccttttgttctttttagtgatagaatgccctgagttttatacgacttcctggctaccttgctatggactacatttcccagtgtccttggcattcagatggtac

SEQ ID NO: 550485 - DNA, 638 bp, Homo sapiens
tttgctaacctcattcatctataatctgcttcacttcaaaatttagagagaaaagattcaaaatgagcttagttcaactgacaattacagtagcaaattctgaatcttgcatacaagactgaaaaatatgtgggaagtcattaataaaatattatttaagagcctactatgtgccaagaatagcactgaaagaaacattctactacatttggagaattaatacatgatgattctggcttcacatctggtcttgagcaaaaaaaaaaaaaaaaaaaggaagcaaagtctattgtttgatttactgatgatattgaaaagccactgactttgataattaccatgtaaccacttgctaataatkaaaagtaggatccaagtgttttaaattaatatataaactcactggggtactaattaatttacaaaaagaaaaaaatgatgaattcatgaagattaaaagggaatcatttatttgttgttttatgccctatgtccatatttttagggtacaatgtggaaatgtaaaattaatttaagagaaaagcacctaatattatatctcctatatagtatctttcagactgaggtaaaaatggggaaatcaaaaagccaatgattgctgaagaattctggcagca

SEQ ID NO: 550486 - DNA, 674 bp, Homo sapiens
tctgctactttgtagatattatgttcaccaacgaggacatttctggcagccagatctctgtgaatgtagttccgagactccagataggccattccagaggcaacctgtgccgccatgtctacctgttgagtcagatggatttttgatccagtgtcatctaagtaataagagaaaagtaagaaagttaccttagagaacatttgaactatgaaagtgaattctgagaattttgaatgtatgagctatcagtgagattaagtacaatggcactgatctgttgagcaaaatatatatatttatcattaatacaacttaatttgctgtgaaaggttaataaggcaaggccctctcttccttgaatgagtattacaagtaacaagtcatcacatgatccaaacgtggctgcaattatctgagagtctggctattytgccttttttcttttttaaaaaatttatttatcttttattttaagttcaggggtacatttccaggtttgttatataggtaaacttgtgtcatgggggggttattgcacagattatttcatcacctaggtattaagcctagtacccattagttatttttcctgatcctttccttcctccctaccttcaccctctcataggacccagtatatgttgttcccctctatgtgggtgaacatagctccc

SEQ ID NO: 550487 - DNA, 532 bp, Homo sapiens
ttttttctttttttttttttttttttgagacggggtctcactctgtcacccaggctggagtgcagtggcacaatctcagctcactgcaacctccgtctcctgggctcaagtgattcttgtgcctcagcttccctagtagctgggactacagacatgtgccactgcaactggctaatttttttgtatttttagtagagacatagtttcgctatgttggccaggctagtcttgaactcctggcgtgaagtgatccgcccaccttgccctcctgaagtgctgggattataggtgtgagccaccacgcctagccagtatttctgtctaggtgctgaaatagtttcttttggaattgaagaccatttgaattaatatttcaagtaggcaattgagtcatcataatggaagactggatctttagtattatgctgttagagtatgcagtgtccagtcttttggcttccctgggccacactggaagaagaattaycttgggccacacaaaaaatacactaacaatagctgatgagctaaa

SEQ ID NO: 550488 - DNA, 610 bp, Homo sapiens
gctgtgcccgaatgcagtggggatcacagacactggtgagcactggcaactcctgacacatttgaaaagtattcaaggagtgacaaaatgaccatctctcagggactcgaactgttgctgagactcaaaatgatggcattatgagagatgaaaaagcacttaaggaacaccaagtccaatcagctccctacatgaacttgcccaaggtcacccagataaatgttggcagagctgtaactagaacctacttctaactcccatgccattcctttgtccacccactcacctcctcgcttagttgtcctttccaaatctaatacattattgccttttttgctccctggtttagctagttttttgcctttggaagataacttattactcctttcacacagattacttatccaagaatcttcwttaccttatgccatctgcctcctttcacaaaatgtgggtttgaaggtaaggagacaacaaggcagaatggtatgtgcctctactcttaccaaattatcatgattatataaatcactcaagtaaggtaaaatgctgactgcagcactaaaaacacttggcatatctggaaggtgtaattcaattgatttttttt

SEQ ID NO: 550489 - DNA, 873 bp, Homo sapiens
aggttagagatccactattttcagccctcagagagctcattttgctatcttgagaacttcacaataagaaaagggaggctgagattcaatttttgcatcaaaatctcttctcaccagtcatcaccacccagcagagtcaaatcgttcaaacttcctgcagatctcaagaattttcaagctgagcctctgcccttgatgctctgtcagctttgtgtttcttagagaaatgtattcttatcattgtaggtgaactctgatgcctctttattgtattgacaggtccttgatagagtataaagataagaaactagattttgatgcaggatgtgcagaattagtttaggtggtggcaagagtaaaagtagatgcagagaagtgaggaggaaaaatggcccagattgggatggaattagttcccttgcttagggatggtgaagtgaatktactttcaaggtcagtgcaaggctggttttgaggtgggtggctgcacctccctaggatggagagaagtaatgctgtcatttctgggggcgtctaggctactggagtagagtgaccgtgggtggaggatcatgatgaagaccattactgacaaggtacctcaggaaggacagcaaggagtctggacagaggtggctgccctaggaagatgaaggcagcagctgcaggggtgaaaggaatagagagggcatttgcaaagagaacagcagcacctatgagaagagagggcaaggcttgctctactgcttctgctgaaggttatatcaaagagcaatcaccaagcctgcagctttgtgttaagtgttctgttggggtctggtgtaacataagtgggcaggaggggtctctgtggaggaaaaaggggaggtgcca

SEQ ID NO: 550490 - DNA, 873 bp, Homo sapiens
aggttagagatccactattttcagccctcagagagctcattttgctatcttgagaacttcacaataagaaaagggaggctgagattcaatttttgcatcaaaatctcttctcaccagtcatcaccacccagcagagtcaaatcgttcaaacttcctgcagatctcaagaattttcaagctgagcctctgcccttgatgctctgtcagctttgtgtttcttagagaaatgtattcttatcattgtaggtgaactctgatgcctctttattgtattgacaggtccttgatagagtataaagataagaaactagattttgatgcaggatgtgcagaattagtttaggtggtggcaagagtaaaagtagatgcagagaagtgaggaggaaaaatggcccagattgggatggaattagttcccttgcttagggatggtgaagtgaatgtacwttcaaggtcagtgcaaggctggttttgaggtgggtggctgcacctccctaggatggagagaagtaatgctgtcatttctgggggcgtctaggctactggagtagagtgaccgtgggtggaggatcatgatgaagaccattactgacaaggtacctcaggaaggacagcaaggagtctggacagaggtggctgccctaggaagatgaaggcagcagctgcaggggtgaaaggaatagagagggcatttgcaaagagaacagcagcacctatgagaagagagggcaaggcttgctctactgcttctgctgaaggttatatcaaagagcaatcaccaagcctgcagctttgtgttaagtgttctgttggggtctggtgtaacataagtgggcaggaggggtctctgtggaggaaaaaggggaggtgcca

SEQ ID NO: 550491 - DNA, 1611 bp, Homo sapiens
tttagccatatttcaaaagactgagatgctaatgcctgtgaacatgtgctatacactaactactcatggcctgaagcacagaccaaaaggtgaatgatatcccaaatgccacctcagttttggtcacaggtctggatacaactcattggttgatccaagcatctgatgttccaccttgacatgtgatgctatctctggaaaaagaaaatgtcgcaggtgttgagaaaaggtacaagtaccaactatcaaagaggagtaagatcccttcccaagacccctttatagtcagtctaatacctttcggtttattcgcctagaatgctggacttctataccacataacaagattccacacactgaaacggaaccaacatcattagcttcttaccagtgttctgccatcgagatgcagtctgtcaagagaagcagcacagagtctcatgtcaagagaagtctgcagcggcagaaagacaactaaaaagagagacttcagtggaatttgagtcacctgacattagtcttaaaaaagatatttaaaatacagagaatcccactgatggaggagagaaaaataaccctctttttttctttaaagacaggcattgatatgagcgaaaggaaaagaactggggaagtctttgtatattgagagctcagtttatttttactctctgccaatagaggcaaggtaattctataagcaccatttaactttctcactacaaacaaaatagagtaagtcgtattaacgacttacttgcgttctaaacttccagctccagaacacttttttccccctgaaaattaaattgattcttacagaatggtacccaaatgtgtgatttcaaaggcagatcccaaaactgatgggatcctcaatgagaggatgaggaggcattttcagtttcaacttcaacttattttcttcattaggggtaggcctagacgacttctaattaaaatccctctctttcccaaactctatgatttcaaagaaacaaaaggaaatgagtttcaactatagctgtcaaattttaagtcaggtatcagcaagaaattcctaattggaaagctgtcaatcaatgaaacaggtttcaaaataggttgtggaatcttcttccccagagacagttaaaaataggctaggcagccatctgtcttggtgggatacagcccttccaggaggccggcatcagaacaaaacccttcttccctccctcccagggagtccactaatgagaagtgattaagggctatgaagaataaaggaaggagacagcagcccaaccaggcccatgggctaggcggctgagatttcctgtagaaagggaagatacaagctgcaaagaggaatatacaaggggaaaaacacaggaaataaccacagggctgtgagcattttggggagggctgcaccaatctgcttcccagctgcaacagctcaatttggtcctggggactgggagctcagccacagctctttggggagggtattattccccttcctagctcccaaacccatgtatacatgaagcctaagtggaaaaygggaactgtcaaataaatccaagatttccccaggtgaccagcagcatccatgaaatagctcca

SEQ ID NO: 550492 - DNA, 661 bp, Homo sapiens
ccctgtgccctgtagggaaagagcacagctaaacaaggagagagaaaactggagttctgagctgccttgctccgagtttggttggaggccccttatgagggtcagctgggaatgaaagaaaagtcaagtcaagccctgccagcaccctccaccacctgacctcccatgggtgactgaagagccagctaatgaacaagttcttttaaaggcagcctggggagtgtgggagaggctgagttcagcaaaacatgactaggtggtgctggtgctgtttcrgggtgtggaggcagaagtggttgatctccttaatttgaataactttggaatggggagatggtgctttgatagaggatttgattggagattttgattgtaggatatgttgaaagaggggatcaggctaaagccatttataggaaattatatttcagatattggcagttgaacttaatgtattctattctcacttccaaaggctttgaatttttagtgttatttctattttgaggagagtggcctatgagtacttctcatccaatgtgttcaatccaaggagactataggagttattactctcctcctttataaattctttctgtgtaacagagattacccacagttggcttgagagttttacgccacagtttggtagaaaaaagac

SEQ ID NO: 550493 - DNA, 661 bp, Homo sapiens
ccctgtgccctgtagggaaagagcacagctaaacaaggagagagaaaactggagttctgagctgccttgctccgagtttggttggaggccccttatgagggtcagctgggaatgaaagaaaagtcaagtcaagccctgccagcaccctccaccacctgacctcccatgggtgactgaagagccagctaatgaacaagttcttttaaaggcagcctggggagtgtgggagaggctgagttcagcaaaacatgactaggtggtgctggtgctgtttcggggtgtggaggcagaagtggttgatctccttaatttgaataactttggaatggggagatggygctttgatagaggatttgattggagattttgattgtaggatatgttgaaagaggggatcaggctaaagccatttataggaaattatatttcagatattggcagttgaacttaatgtattctattctcacttccaaaggctttgaatttttagtgttatttctattttgaggagagtggcctatgagtacttctcatccaatgtgttcaatccaaggagactataggagttattactctcctcctttataaattctttctgtgtaacagagattacccacagttggcttgagagttttacgccacagtttggtagaaaaaagac

SEQ ID NO: 550494 - DNA, 661 bp, Homo sapiens
ccctgtgccctgtagggaaagagcacagctaaacaaggagagagaaaactggagttctgagctgccttgctccgagtttggttggaggccccttatgagggtcagctgggaatgaaagaaaagtcaagtcaagccctgccagcaccctccaccacctgacctcccatgggtgactgaagagccagctaatgaacaagttcttttaaaggcagcctggggagtgtgggagaggctgagttcagcaaaacatgactaggtggtgctggtgctgtttcggggtgtggaggcagaagtggttgatctccttaatttgaataactttggaatggggagatggtgctttgatagaggatttgattggagattttgattgtaggatatgttgaaagaggggatcaggctaaarccatttataggaaattatatttcagatattggcagttgaacttaatgtattctattctcacttccaaaggctttgaatttttagtgttatttctattttgaggagagtggcctatgagtacttctcatccaatgtgttcaatccaaggagactataggagttattactctcctcctttataaattctttctgtgtaacagagattacccacagttggcttgagagttttacgccacagtttggtagaaaaaagac

SEQ ID NO: 550495 - DNA, 893 bp, Homo sapiens
atgtaagaaaactaagctaaaataaattttgtcaccaaaccaaaatgaagctctccaggtggtgtagctactatactcaggagacttgaacttcccttaacccaaaaatggctatctggaagtcagcatcctcagagtacayttcagatgcaaactagaaatatgtcagtgtaaactatgaaagtgcagagcctttgcttcagtaaaactagatgcagcaaaaccacgggctttatgcatgactggtattgtaagagaggccacagggagtagaattaaatatgacacctccttgacatatgatcaaagctccttctaacctcaatttggggcaccatatatcacaaaccagacagcaagaaattaagtaaatgtaagtcttttttttatgccatcccaattacatcttgctcagttcacaaacatgttccagcaaatgctggaggagtttttctctctttaggagtcctccctcactttaccctgtttaacaaaagacctcacacacttagaaagaggatggaggcaggccagcttcaggacatgctgcacagggaggactgactgtcccaaagagggggctctacacccctctgacaactccacaatagaccagctacacacaaatgcctgaaataaggaagtccatcaagaaaatgaacagttggcgagatcaaggcttctggcccaaagggcctgcagctggtctggccattcatcaaaaaatctgaatttaaatggagacacattcgactgtgacatgtaataaaagaactggagcaacaaagggtcttgattttggtttcctttccaccctacacatctcctgccaatggaagagtgagcgtgcctgtggtgctcctgacacatctggggtagttcccattcacagt

SEQ ID NO: 550496 - DNA, 1049 bp, Homo sapiens
agctaatctaacaaggaggcaaacaagacaaaaggcaaagaaagtaccagactgaggtgaactcagtacaaggtgcagcattgcagatgtggtttttgataaaccgatacatttgggactcagaaaggtgtcacacttccattaatggtgacaaagaaatcgcctaaacagagataagctgctcaaagtaagagcgaacttacactcactcttctggagaacgaccaccacatttagccccaatgtatgaaaacggtcactaaatttggtgaaacagaggtggaatgaaagataccaaaataattagcagaaaacaaaatcacccatctacttggcttaaaaaaaaaagaggaactgtagattaaaagttaaggatcacacagcacttggggaggttgaggcgggaggatcacgaggtaaggagatcgagaccatcctggctaacacggtgaaaccccatctctactagaaatacaaaaaattagccgggcgtggtggcgggcgccagtagtcacagctacttgggaggctgaggcaggagaatggtgtgaacccrggaggcggagcttgcagtgagccgagatcgcgccactgcactccagcctgggcgacagagcgagactccgtctcaacaacaacaataaaaaagttagggatcacactaatcatcgaatagatgaatgaatgaatgaatgaatggaatggtgaagggtctagaacatccttggggaaacaccagcacttgaggggcatttcaaacactgttttcttagtttttaaagtgtttcatcacttggtgtgtacacctgaggaatcatggctcagaaaagctgaacgacttgctcttggtcacacagctactaacttcctgaacgagatctggaacccgatcttccacattcaatctgctacactttccactgcaccacattaagccccaatgtatgaaaatggtcactaaacttggtgaaacagaggtggaaatgaaagatgccaataggaatccatcttgaaacacaggagaaagccatcgcaaggaccaaaggttg

SEQ ID NO: 550497 - DNA, 526 bp, Homo sapiens
aaccactccttgacttgttattttaaattaaaaaattgtggactgccctttcttgaaactatctgttcccttaggctgtataacttggcctgattcttctcctcaattggtccagctctttcccctctccttcagtgttggggtgccacccacaccctccatcagcacctatattccgatgggccccacagctgcatgtcttgctcacacctcccactgagcatcaggcacagttataagtctgtgagataaacactgtgcttgctacttaagtgctatgggaactcagaatgcagtcacacaacagacatgtgctaagtgactacttcagtggttcccaaggtgtggtctagggaagcccgggggactccaakattttttcagggcatcttcaaggtaaaaactatttttaggccgggcacggggctcatgcctgtaatcacagcactttgggaggctgaggcgggcggatcacgaggtcaggagttcgagaccagcctggccaatatagagaaaccccctctct

SEQ ID NO: 550498 - DNA, 591 bp, Homo sapiens
caaatgggcttatattgcgccaatctgttcactccatcaaagtctttgagggttcatttgaaagattacattttctaactaagcataccttataaatttgcattatatgtccactaacagatgtatatatgtcctctgttgtatgtttaagatgttgcatggacttaacaatgcaaaacattatattactgcctttctaatgaaacaaattgaagcctcagatgtcttttaatcttctgaaggtgatttaaaaaaaaggtaaccatgtatgtaaacagatgtggatttcacaaaacrctcctataaaaaaaatacctagcacagtagcatgcacacagtgtgcaatttcgtggaaaaaggaaaaaagaaaataaataaggaagggagatttaaagtgagtattttgcatatatgacatttctaatattctttcagtgaaggacttattactatctttttttttttttttacatggcaaggtcattatacaaaatatgaagtaaaatcagtaatagagataggtatcctaagcctaagatgtgggtttcattactaggtgaatgttactgcttgatggtctgggtgtttgaa

SEQ ID NO: 550499 - DNA, 625 bp, Homo sapiens
ttctaggaaagaacccactgcatagttgaacataaatatttaatgaatatttgaattaaactagcagctctatgagactcctaactatggttttctatattttcctccaaatcttaatcattttgacatctttttaaatataaaaacttttttttggcttcatgctttctagagagtacattgataatgactcacaaaattrattcttagaaaccaccatgttttgtgatttaagccagtaaataagtaataccctgaaaaaaaaaaaaaaaaaacctggatcttcatgcagcagggttacctaagcaaatactataagactgtaacaatgaggaaaatattaaaaccaagcttcattttcttttatgtcaacaaatacttaagaagaatacgacttgcccttgccctttacccatagggaatacacacacatacacacacacacacacacacacacacacacccccttacttcctgggttttacaatggttagcaaacctgagccatttaaaattattcatataaaaatgatactgctaatatttttaaagactcaataaaaaaagaagtacttaagaaccaacagatataaactggctttctcatagtgtgcttacattattg

SEQ ID NO: 550500 - DNA, 625 bp, Homo sapiens
ttctaggaaagaacccactgcatagttgaacataaatatttaatgaatatttgaattaaactagcagctctatgagactcctaactatggttttctatattttcctccaaatcttaatcattttgacatctttttaaatataaaaacttttttttggcttcatgctttctagagagtacattgataatgactcacaaaattaattcttagaaaccaccatgttttgtgatttaagccagtaaataagtaatacccygaaaaaaaaaaaaaaaaaacctggatcttcatgcagcagggttacctaagcaaatactataagactgtaacaatgaggaaaatattaaaaccaagcttcattttcttttatgtcaacaaatacttaagaagaatacgacttgcccttgccctttacccatagggaatacacacacatacacacacacacacacacacacacacacacccccttacttcctgggttttacaatggttagcaaacctgagccatttaaaattattcatataaaaatgatactgctaatatttttaaagactcaataaaaaaagaagtacttaagaaccaacagatataaactggctttctcatagtgtgcttacattattg

SEQ ID NO: 550501 - DNA, 625 bp, Homo sapiens
ttctaggaaagaacccactgcatagttgaacataaatatttaatgaatatttgaattaaactagcagctctatgagactcctaactatggttttctatattttcctccaaatcttaatcattttgacatctttttaaatataaaaacttttttttggcttcatgctttctagagagtacattgataatgactcacaaaattaattcttagaaaccaccatgttttgtgatttaagccagtaaataagtaataccctgaaaaaaaaaaaaaaaaaacctggatcttcatgcagcagggttacctaagcaaatactataagactgtaacaatgaggaaaatattaaaaccaagcttcattttcttttatgtcaacaaatacttaagaagaatacgacttgcccttgccctttacccatagggaatacacacacatacacacacacacacacacacacacacacacmcccttacttcctgggttttacaatggttagcaaacctgagccatttaaaattattcatataaaaatgatactgctaatatttttaaagactcaataaaaaaagaagtacttaagaaccaacagatataaactggctttctcatagtgtgcttacattattg

SEQ ID NO: 550502 - DNA, 1200 bp, Homo sapiens
caaagccttctgaaggccctgcagctgctgtgtgtctagccctgcatcaaagattcctacctctgccatttcctaaccagacaggaggatgcatcaaaggaagcagtttgtctcatgtccggggttactagcatctcctctggaaatggtgatgaacctcatgctaacacaacgaatgtgcctctttcagatgattcctgaaccacagccaggccaatgtgatggacggaggtcttgccaggccacttggggggtgaggctgggatgttcctaakactgaaaggcaaaggcgtgcctcagagggttggactgttaaaaaggaggtcttggtgctgatgtttggagcgcctgggtacatcacgtgcttgtctctgtgccatggccgccgtcccagctcggcacagcaggagcttgtgcaagcctccgtcagctccattggggaagggaaaggagcacaatatacttcctacagaaagccctggccctcagccctcagaggctcgcagctgtgcacatctggaacaaactgtcccagtggagttgcacacgtgctcccagcatactctctgaatccgacaccaagtgcggagccaggagggcccggcatgcatgctgcctagccacgtgagccacctttcactcatctccaagcagaaaccatcggcctttgtgacttcaactccgagttgaaagtgtgcctttgttcatctgtcccgcagctcgttggacatgtcaataacctgacagacctttgagtctctctacctgacgcccagccccgtgattacctctcctctttccatccctccaaatttggagctactctgcattttgcttttgtttggactttgcaaaattgagatgccaatgcaataaacgtgtgttgaccatttaccatggagacagcaaggtgagcttctcttacttctattaaatcatttaatctctacatattcctgcgaggttgtagtcacctgcattccaggtgagattctaagaacaaaagcaacttgcacagaggcttgacagacaggtagcaggcagagctgggacttaaacacagcctggtctgatgacaaactcaccactgacatgaagtcaaacatttgagaaatgaatttaatattctgaagcaaagcagcttaactcgccaatgcatttggttctccctggtatagattctagattaaacgaatagca

SEQ ID NO: 550503 - DNA, 1200 bp, Homo sapiens
caaagccttctgaaggccctgcagctgctgtgtgtctagccctgcatcaaagattcctacctctgccatttcctaaccagacaggaggatgcatcaaaggaagcagtttgtctcatgtccggggttactagcatctcctctggaaatggtgatgaacctcatgctaacacaacgaatgtgcctctttcagatgattcctgaaccacagccaggccaatgtgatggacggaggtcttgccaggccacttggggggtgaggctgggatgttcctaagactgaaaggcaaaggcgtgcctcagagggttggactgttaaaaaggaggtcttggtgctgatgtttggagcgcctgggtacatcacgtgcttgtctctgtgccatggccgccgtcccagctcggcacagcaggagcttgtgcaagcctccgtcagctccattggggaagggaaaggagcacaatatacttcctacagaaagccctggccctcagccctcagaggctcgcagctgtgcacatctggaacaaactgtcccagtggagttgcacacgtgctcccagcatactctctgaatccgacaccaagtgcggagccaggagggcccggcatgcatgctgcctagccacgtgagccacctttcactcatctccaagcagaaaccatcggcctttgtgacttcaactccgagttgaaagtgtgcctttgttcatctgtcccgcagctcgttggacatgtcaataacctgacagacctttgagtctctctacctgacgcccagccccgtgattacctctcctctttccatccctccaaatttggagctactctgcattttgcttttgtttggactttgcaaaattgagatgccaatgcaataaacgtgtgttgaccatttaccatggagacagcaaggtgagcttctcttacttctattaaatcatttaatctctacatattcctgygaggttgtagtcacctgcattccaggtgagattctaagaacaaaagcaacttgcacagaggcttgacagacaggtagcaggcagagctgggacttaaacacagcctggtctgatgacaaactcaccactgacatgaagtcaaacatttgagaaatgaatttaatattctgaagcaaagcagcttaactcgccaatgcatttggttctccctggtatagattctagattaaacgaatagca

SEQ ID NO: 550504 - DNA, 646 bp, Homo sapiens
acttctactcatccttcagaacccagctacactatcattttctctgataagccttccttaacaccaattcaggtaactttgtaatatgctctataaaacctctttctttccttcagtttatgattagatattcataactattcttatttattatatgtctctatcactagaatgtaattcatttgttttagcttactattttattcccagatactagcagagtacataaaatcggtgctcgataaatacatgataaatgaatgaataaaaacagggatttggctgttgtaaacatctgaagtttccttgtgcataaataactcatattttcttagctccacatttatctgtcttcttccactgattactagtaaatgaaatacaaacagcagttatttctcctattaactactattaactgataagctggtactagttattgtgtggtgtgtgtgtgtgtgcatgtgtgtgkgtgtatgaattaaagccaattctcacactagacagacttgcagtttattagtcattatatactcttgctacttataagcaagaaatttattgtttgtatttctaaacttaaactcacaatagatactatcaaagcttttcaattatagtttaatcttgaagatttgtttagaaa

SEQ ID NO: 550505 - DNA, 597 bp, Homo sapiens
ggataatatttacagtttcctaattttaatattttattttgcatgataagggagcatacaatacatagactttattagtcttttgggtttttttccacaaacaaggacttgaactctcacagtatgttagtatgctatttatacaaatatttttattatcatacaggcatagattaatctgctgttcttaaaaacttgttaactatcccccaatggatatagaatcctttgaattaccctttgaaattactttttactgtaaattgcatggatttgtaatgayccatatacctgactcatacaacttccttctaaaagaatgtttgtttccaacgagggtctgtgaagttaaaggtagagtctaaaatcatgggaggaaatgagaaaataggactttgaatggcagcctgaagcccactgttttaagcatctaattcatccagccaaaaagtctactaaggtaccactgaaatatgatcaggccaccaaatctttatattgtttttctatttttttctcaatttttgtttcattttgcgggggaacatgtgtaggtttgttacttgggtatattgcatgatgctgaagtttggggta

SEQ ID NO: 550506 - DNA, 597 bp, Homo sapiens
ggataatatttacagtttcctaattttaatattttattttgcatgataagggagcatacaatacatagactttattagtcttttgggtttttttccacaaacaaggacttgaactctcacagtatgttagtatgctatttatacaaatatttttattatcatacaggcatagattaatctgctgttcttaaaaacttgttaactatcccccaatggatatagaatcctttgaattaccctttgaaattactttttactgtaaattgcatggatttgtaatgatccatatacctgactcatacaacttccttctaaaagaatgtttgtttccaacgaggstctgtgaagttaaaggtagagtctaaaatcatgggaggaaatgagaaaataggactttgaatggcagcctgaagcccactgttttaagcatctaattcatccagccaaaaagtctactaaggtaccactgaaatatgatcaggccaccaaatctttatattgtttttctatttttttctcaatttttgtttcattttgcgggggaacatgtgtaggtttgttacttgggtatattgcatgatgctgaagtttggggta

SEQ ID NO: 550507 - DNA, 629 bp, Homo sapiens
acacacagcaacctggaaggtaaacattggcacaaagtaaagactgaaactcaaacttctctatgcttcatgcgtttttgaaatcttgtctcccaagatccctgtaataatttctttttatacctacaacaaatgcttatyggctattttaataaagtgccccctacaatgccaatttttcgaattcctttatttaaggataaagcaaacttccttctctttcctgggcacaaacaggtaaatacatttaaaatgctaactggtacttgagtaaatctctgataaccaggttgtattttcctgtttgtttgtttgtttgtttgttcgactctcagtgatctctctagcaatctgttttgtctgtagtggctgacggtatctcagggaacctggcttagtaagattgattggaacctccaacttagccatttccttgcagaatggctacttccccacctcctcctctttttttttttctttttctaatgatgttacatttgtcctgcagatgatgtagagctcactgcagaggatgaacggctgggctcagatcactcctttcttggcaagctctcacacttcacaccagccctcctcggcaccattaatattatatatagatacccttg

SEQ ID NO: 550508 - DNA, 629 bp, Homo sapiens
acacacagcaacctggaaggtaaacattggcacaaagtaaagactgaaactcaaacttctctatgcttcatgcgtttttgaaatcttgtctcccaagatccctgtaataatttctttttatacctacaacaaatgcttatcggctattttaataaagtgccccctacaatgccaatttttcgaattcctttatttaaggataaagcaaacttccttctctttcctgggcacaaacaggtaaatacatttaaaatgctaactggtacttgagtaaatctctgataaccaggttgtattttcctgtttgtttgtttgtttgtttgttcgactctcagtgatctctctagcaatctgttttgtctgtagtggctgacggtatctcagggaacctggcttagtaagattgattggaacctccaacttagccatttccttgcagaatggctacttccccacctcctcctctttttttttttctttttctaatgatgttacatttgtcctgcagatgatgtagagctcactgcagaggatgaacggctgggctcagatcrctcctttcttggcaagctctcacacttcacaccagccctcctcggcaccattaatattatatatagatacccttg

SEQ ID NO: 550509 - DNA, 543 bp, Homo sapiens
gaagtgcctcctgtccccctcatttggggacagaggcaggcatcctctcttccacatcctgtcaggactgagtatcattcaccacccagcaaagcttgaggagctccactttgtagcataagggaagagccttatccattgccaatgtgcagagaaggaggacagggatgcctgattgtgagacttggaagatggaaagataaagggactcaggagaaggtgctggaaacatccactggaagccctctacttcaagtcctcataaccaaagagcctagctaaattaaacagggattcctaatctctgttttgctcagactgagacctgtcctaaccactttccatcaaagaacttcataatcctttatgttaaatttgtttaaaatgcttacagaaaataataaaattattattaaagtacgctttttttcccaagattatcaaaaacataggtatgacttaccttgtrgaaatagttacgaagctgtccaagaaggtagctggttgtcagatattatttttaaatgagtacgtattccagat

SEQ ID NO: 550510 - DNA, 558 bp, Homo sapiens
atggaatggcacttctgccattaggtcataaaacactttgagttctgtcttgctggactcttgctctacaaagtgagaaaattccaagctgtaaaatataatgtgaagggaagcattaaaaataagcaatgtactggcttctaaaccataataaaatatgactgacaagaatgtctgtttgrctgtccttccatcctcttttagtctgcaagtgaaaagatcacctcaacagcataagccagcatctacattttatcatactttaagattgccccttagggcagactgagtgaaaagcacacatttcccagtgtttccttctatcatcttcatttgtttgcctaccccttcccccaaagcatttgtgtcactctcttcccacatttggacgttcttagcttctgaactgaacttctgaaagagtttaaaggggagatgatctgacaaggagatttgcttgtcttaaagcccggctgtgcctgcctttaattaaaaatggtattgatttttctctgctctaatgataggcactagtctgccctccccatgttcgtaagt

SEQ ID NO: 550511 - DNA, 588 bp, Homo sapiens
cagccagttgtttattttttccaggatggattggtgagttgttagtgcagtaataattatgattaggggccattcctttccatagtcagaattagtggccatctgcgtcaaaatcaaatttctatttaaayagtttcccatgtttgcattgcctacttagagaatttctatacttctttgtatacttgagcatactgtgtacacccagtgcattattgttaaaaaaaaacaaagtattctgatttttttccataaccatcattttaaactaagtacatctcagtttaaattaagtacaaactatggccattcatagagggaaaaagaattattatttgacaagtttagtattctgtgagatactgataatgagatcctctaagagcttaaagagtggagtttgatgcaattaaacatgatcttgcactttcttagtttggttacattaagtaccaattcttttcactagcttaaatatggaactacccacaggtcatcttctccagtaaacagggcactaaattaaatggctggttggagcaatagttttgcttattataatttgaaaacaagactattgcaaaaggt

SEQ ID NO: 550512 - DNA, 588 bp, Homo sapiens
cagccagttgtttattttttccaggatggattggtgagttgttagtgcagtaataattatgattaggggccattcctttccatagtcagaattagtggccatctgcgtcaaaatcaaatttctatttaaacagtttcccatgtttgcattgcctacttagagaatttctatacttctttgtatacttgagcatactgtgtacacccagtgcattattgttaaaaaaaaacaaartattctgatttttttccataaccatcattttaaactaagtacatctcagtttaaattaagtacaaactatggccattcatagagggaaaaagaattattatttgacaagtttagtattctgtgagatactgataatgagatcctctaagagcttaaagagtggagtttgatgcaattaaacatgatcttgcactttcttagtttggttacattaagtaccaattcttttcactagcttaaatatggaactacccacaggtcatcttctccagtaaacagggcactaaattaaatggctggttggagcaatagttttgcttattataatttgaaaacaagactattgcaaaaggt

SEQ ID NO: 550513 - DNA, 588 bp, Homo sapiens
cagccagttgtttattttttccaggatggattggtgagttgttagtgcagtaataattatgattaggggccattcctttccatagtcagaattagtggccatctgcgtcaaaatcaaatttctatttaaacagtttcccatgtttgcattgcctacttagagaatttctatacttctttgtatacttgagcatactgtgtacacccagtgcattattgttaaaaaaaaacaaagtattctgatttttttccataaccatcattttaaaytaagtacatctcagtttaaattaagtacaaactatggccattcatagagggaaaaagaattattatttgacaagtttagtattctgtgagatactgataatgagatcctctaagagcttaaagagtggagtttgatgcaattaaacatgatcttgcactttcttagtttggttacattaagtaccaattcttttcactagcttaaatatggaactacccacaggtcatcttctccagtaaacagggcactaaattaaatggctggttggagcaatagttttgcttattataatttgaaaacaagactattgcaaaaggt

SEQ ID NO: 550514 - DNA, 588 bp, Homo sapiens
cagccagttgtttattttttccaggatggattggtgagttgttagtgcagtaataattatgattaggggccattcctttccatagtcagaattagtggccatctgcgtcaaaatcaaatttctatttaaacagtttcccatgtttgcattgcctacttagagaatttctatacttctttgtatacttgagcatactgtgtacacccagtgcattattgttaaaaaaaaacaaagtattctgatttttttccataaccatcattttaaactaagtacatctcagtttaaattaagtacaaactatggccattcatagagggaaaaagaattattatttgacaagttyagtattctgtgagatactgataatgagatcctctaagagcttaaagagtggagtttgatgcaattaaacatgatcttgcactttcttagtttggttacattaagtaccaattcttttcactagcttaaatatggaactacccacaggtcatcttctccagtaaacagggcactaaattaaatggctggttggagcaatagttttgcttattataatttgaaaacaagactattgcaaaaggt

SEQ ID NO: 550515 - DNA, 565 bp, Homo sapiens
actgaccaacatggtgaaaccccgtctctactaaaaatacaaaaattagccgagcatggtgatgtgtgcctgtaatcccagctactcaggaggctgaggcaggagaattgcttgaacctgggaggcggaggttgtggtgagccgagattgcaccactggactccagcctgggcaacagagtgagactccatctcaaaaaaaaataaataaataaaattagctggatgtataygcgtggctctattttttaattcctcattccattgatccatgtgtccatctctctgccggtacccactatcttaatttagtgagataacaaatcttaacatctgatgagtgatttctcctattttattctttttcaaaatctttttatctgccttcttctgaattaactgagcatttttattattttattttatcaccttgttgccttattacccatgcctctttatctacttattttgttatttcagtcttgcgttattcttgcttttaggggtttgtagtatacacatctgtaacttatcacataatacattgtgattagttctgtttaaca

SEQ ID NO: 550516 - DNA, 611 bp, Homo sapiens
ggacagggggtgccctccttacccctaagctccctggctagtctcccccagcagcgaggtctctgccagtttcagtccatcataaccaagaactctttgttgccagaggcaacctggttgactgtgttaccactcagctggtaaagaagaaatttgtttccagttttctatcactggaaaactagacttcagcttccagtcagaatggccacaagaggctgggtacagtggttcacacctgtaatcctagcactttgggaggccgaggcgggcggaggtcaggagtttgagaccagcctggccaacayggtgaaaccctgtctctattaaaaatacaaaaactagctggatatggtggcacacacctgtaatcccagctacccgggaggctgaggcacgagaatcgcttgaacctgagagacggaggttgcagtgagctgagattgcaccagtgcacttcagcctgggcgacagtcactctgtctccaaaaaaaacaaaagaatggccacaagaaaatgtgacttttttttttctattctcggaagcaggaagcaatccagtataaaacttcaacaggaagacactgtgaacattcctactgtttgtgtgg

SEQ ID NO: 550517 - DNA, 652 bp, Homo sapiens
atttaatacactccatttcctgatcagtttccaaaggtggtccacaaataccattctgacaaggaatgtaatacagcagggcaaacagccactggccaggcttcctgagccctacctcccttcctatactagtctattaggaatgtcaggaagccaaaaaggaatagggaaagtgctgggagggctgtgattgctggaggtaagatcagacctggaataattttgttctagaggagatcagcatcttggagaagatctcagaacaattcaggctttgggactcgaagagtgggcttctgaggtcactgctgcactgagggtacatgagccggcccaggtgagacccatgtccagctgaggaatgagactggggtggggagcgaggagagcactgcttcacgctaacagccacttttccttcacacttccagtcttgcccggcttgcaaattttcgctgatgtattttatgaggtcacttattattacttagtacctatcayatttactacttctgatggctcacacaatcaattatggctttcttctcatctaaattattgagttaggctgggcgcagtggctcacgcctgtaatcccagcactgtgggaggccgaagtgggtggatcacctgaggccaggagttcgagacc

SEQ ID NO: 550518 - DNA, 621 bp, Homo sapiens
tttttcagaggggcttcaatccacctttggaaataggtggtagttaagttggcacagacacgaatcattaaagaggaagtagtgcatccagctggagagtcaagagaaaaatacagaaataattatgcatgtgtgcagggaaggctatcccagcagagcagtggattcttgctgggttgggaaaaaacacggtataaacaaggtgaatcatttattcattccacacaaacttgctgaacaactattaggtaccaggcactgtacaaggtgtgggcgttgaaaaaaagtgagccttgagaagaagacattacaatttgccttgacatggtggaaaacagggcaagagccagacacggtggcttatgcctgtaatcccagcactttgggaggctgaggctggtgaatcaccygaggtcaggagctcaggaccagcctcgccaacatggcaaaacaccatctgtactggaaatacaaaaaattagctgggtgtggtggcatgcacctgtactcccagctatttggtagttagaggcagaagaattgcgtgaacctgggaggcggagcttgaagtgagctgagattgggccactgcactccagcttgggcaacagagcgagactc

SEQ ID NO: 550519 - DNA, 616 bp, Homo sapiens
caggcagggagtcggggaggagaatcgcattccttgaggaaagagcagcatgtgggaaaacataaatgcacgcaataacctggctcacatgttaagagaactttctgactataatgagggatgtgttgctgccccaagcttcattatctaaggagtttgttgaacactctctagaggcttttaataataggattgtttagctggtctgtctggactggttagatataacactatttaartgacccaatctcattacattgtgaagatttccattttttaggttacgtaagaaattttggacctaaaaatcttgcattttaagacagtctttgtcagaattactttttggctctaaatgaattctgtaacatttgtattctaaattgacctttagtaaaagcaggaatggccatattcaaactggtaacctcgcaaatcctgcccaccctttcactttctgtctcaatacattgatgtcctctaacccatttcctgtcttatgtggctttagtgccacttatcaaaattgtgtgcaaatttccttggctaacagtaacagtttttgtctgggcttgtctagcagtggaattctgcctgagttcatcatttttgtgac

SEQ ID NO: 550520 - DNA, 626 bp, Homo sapiens
actagagtaatgcaatcctccaaaaccaacaatttagaaaaaacgttcatagaacgctaagtagaaactcacaaatttttatctaatttgattcagtacaaccaacagaactcagtggaaatggacaaccgtgatcattccaaagaccatatgccaaatgaagtgtccaactgcaagactagactaaactgaatgaaaaatactacataaaaattaccttctccatttcacttgcaagagaaaatactccaaaagaggaaaccatagcaaaacctttctgcaagttcaaggactaactacagatacaaagaaatgcaggtgaagcgctcaaacaactttgaaggatcttgactgataaggaagaagccaggatyaggcttttttaattttgtaattttaattacaaacttaccatttatatttgggcagattcatttctacatgatcgtgttgcccttttatttctacacacccacaaaaatattctttacatttagaaaaaagtaaaaggaaaatttgcatgtcatcatcctacagatagcttcacagatggcattaatggattcatatcaacaatgagaaaacatttttgcttatcaagctacactcttccatgaattagccca

SEQ ID NO: 550521 - DNA, 626 bp, Homo sapiens
actagagtaatgcaatcctccaaaaccaacaatttagaaaaaacgttcatagaacgctaagtagaaactcacaaatttttatctaatttgattcagtacaaccaacagaactcagtggaaatggacaaccgtgatcattccaaagaccatatgccaaatgaagtgtccaactgcaagactagactaaactgaatgaaaaatactacataaaaattaccttctccatttcacttgcaagagaaaatactccaaaagaggaaaccatagcaaaacctttctgcaagttcaaggactaactacagatacaaagaaatgcaggtgaagcgctcaaacaactttgaaggatcttgactgataaggaagaagccaggattaggcttttttaattttgtaattttaattacaaamttaccatttatatttgggcagattcatttctacatgatcgtgttgcccttttatttctacacacccacaaaaatattctttacatttagaaaaaagtaaaaggaaaatttgcatgtcatcatcctacagatagcttcacagatggcattaatggattcatatcaacaatgagaaaacatttttgcttatcaagctacactcttccatgaattagccca

SEQ ID NO: 550522 - DNA, 548 bp, Homo sapiens
aataattttatcatagctgccttattatcactacttaaattttattgagggtgtattatatgcaagacactttagcaggaaaagtatatcctctcattatccagaaatgctatctgctggccttccactatttttaaaaactattcttgttctttagctttgaaaaagttaaattgtcaatatttgaaaactctcagtggactatgtgagatcattcaaagataattgccacaggttgatatttaatggcatgagtttagttttaattctcaaatcttaaattcttagagagtcaagtatctaaaaactgctggttattaacaaaaagatggatgtttaccataatcattttctatagcattttctatagcacctgcctataaaagaacattctgcaatgctaaaacaatacatagattcatttaatcttgttgtcttcctcattttgataatgtacctgtaaacagagttgatttgctatatttggaataattcagataagttttgcccaaatataaggagtgaatktgatgacctttaggtttttt

SEQ ID NO: 550523 - DNA, 1612 bp, Homo sapiens
gcattagttatttgtcctaatgctctccctcccgttaccctccaccccttgacaggccccagtgtgtgatgttcccctccctgtgtccatgtgttctcattgttcaactcccacttacgagtgggaacatgtggtgtttggaacatgaggtgtttggttttctgttcctgtgttagtttactgagaatgatggcttcaaggatgaagctggataaaatgattttgaagtataaatagaagactaaatgattgaaaatattatagaaaattgtggaagaataatgaggtggtactttctgtagtatgtaaacttactttaaagccattgagttataataatatggtattggcatgaaaaagacaaatggtcattggaaccaactagagagtttaggtatagataacgagtatttgttgaaatgacttattgtaggtagaatctgcattttatttcattggtaaagaatggtttgctttaaaaaatgataccagcccgaccaactatcaatgtgtacggaaaaaacagatccctttatcatatcatattataaataaattcccataaattaaaaatgttaatgttaaaaaagtaaaaatcttagaaaaaaaggagaatttcatgtaatctaaatgtaggggagcactttctaaagaaaaaaagaaactcagtagcttaaaaaaaaaagatagctatatgtagctagaaacaatctgattgattttctaaggcataaacttcccccccacccaccaaaaaaagttaacatccaaaagatagatctggaaagtacatctgtaacacatactacagacaaatcaatttcaccttaatatgcataggccttctaataatttataatacaagatactttaatagaaaataatttaggtaagaggatatattaggttggtgcaaaagtaattacggtttttaccattaaaaataatgacaaaaaccacaattaatttttcattcatacctcacataaagtcaagggagtgaaaattaattaaagaaacaagtaatattagcaaaaacgaatatcagtaatttcaagagtttgtggaggcacagatcacggataatttcattgtttatgataaagtgaatttccccaactttttaagaaagtagtatatcaataatgattaaaattaaacatgcattttccttttggcatggcaatacttggtaatctttccaatatgaaataaacacaagagcacatattgcatacattttcaaatwttatttttagcataaaataatgtcagtaggattaacaaataatttgttttcaaccatgaaaggaatattatgcaaccataaaaaataatagggtgtgtccataatcaattaagtctgaaaagcaagttccagcataagtggtagagaactttttttctgtgaaaagtttttaaaaaataaaagagaaagagagagagacctaggatatgcaggagtatatttgctttgcttgtacgagcatacaaaaagtatggaagaataaacttcagactattaagttttcacctgagtgaaataaaacagagccacaattaatgtttcttgtatttatatatttgtactctttctctgtctgattgaaaa

SEQ ID NO: 550524 - DNA, 1612 bp, Homo sapiens
gcattagttatttgtcctaatgctctccctcccgttaccctccaccccttgacaggccccagtgtgtgatgttcccctccctgtgtccatgtgttctcattgttcaactcccacttacgagtgggaacatgtggtgtttggaacatgaggtgtttggttttctgttcctgtgttagtttactgagaatgatggcttcaaggatgaagctggataaaatgattttgaagtataaatagaagactaaatgattgaaaatattatagaaaattgtggaagaataatgaggtggtactttctgtagtatgtaaacttactttaaagccattgagttataataatatggtattggcatgaaaaagacaaatggtcattggaaccaactagagagtttaggtatagataacgagtatttgttgaaatgacttattgtaggtagaatctgcattttatttcattggtaaagaatggtttgctttaaaaaatgataccagcccgaccaactatcaatgtgtacggaaaaaacagatccctttatcatatcatattataaataaattcccataaattaaaaatgttaatgttaaaaaagtaaaaatcttagaaaaaaaggagaatttcatgtaatctaaatgtaggggagcactttctaaagaaaaaaagaaactcagtagcttaaaaaaaaaagatagctatatgtagctagaaacaatctgattgattttctaaggcataaacttcccccccacccaccaaaaaaagttaacatccaaaagatagatctggaaagtacatctgtaacacatactacagacaaatcaatttcaccttaatatgcataggccttctaataatttataatacaagatactttaatagaaaataatttaggtaagaggatatattaggttggtgcaaaagtaattacggtttttaccattaaaaataatgacaaaaaccacaattaatttttcattcatacctcacataaagtcaagggagtgaaaattaattaaagaaacaagtaatattagcaaaaacgaatatcagtaatttcaagagtttgtggaggcacagatcacggataatttcattgtttatgataaagtgaatttccccaactttttaagaaagtagtatatcaataatgattaaaattaaacatgcattttccttttggcatggcaatacttggtaatctttccaatatgaaataaacacaagagcacatattgcatacattttcaaattttatttttagcataaaataatgtcagtaggattaacaaataatttgttttcaaccatgaaaggaatattatgcaaccataaaaaataatagggtgtgtccataatcaattaagtctgaaaagcaagttccagcataagkggtagagaactttttttctgtgaaaagtttttaaaaaataaaagagaaagagagagagacctaggatatgcaggagtatatttgctttgcttgtacgagcatacaaaaagtatggaagaataaacttcagactattaagttttcacctgagtgaaataaaacagagccacaattaatgtttcttgtatttatatatttgtactctttctctgtctgattgaaaa

SEQ ID NO: 550525 - DNA, 1679 bp, Homo sapiens
  misc_feature 553, 554, 555, 556, 557, 558, 559, 560, 561, 562, 563, 564,565, 566, 567, 568, 569, 570, 571, 572, 573, 574, 575, 576,577, 578, 579, 580, 581, 582, 583, 584, 585, 586, 587, 588,589, 590, 591, 592, 593, 594, 595, 596, 597, 598, 599: n = A,T,C or G
  misc_feature 600, 601, 602, 603, 604, 605, 606, 607, 608, 609, 610, 611,612, 613, 614, 615, 616, 617, 618, 619, 620, 621, 622, 623,624, 625, 626, 627, 628, 629, 630, 631, 632, 633, 634, 635,636, 637, 638, 639, 640, 641, 642, 643, 644, 645, 646: n = A,T,C or G
  misc_feature 647, 648, 649, 650, 651, 652: n = A,T,C or G
tgaataaaattctaataaattaaatttgacagcacattaaagtgagcatactcatggccaggtaggatttatacctgaaatgcaagaatgattcttttgcaggacaggtgagccccaaaattggggctgagcccaggagggttcttggctttgcctaggaaaaaattcaagggtgagccggtggtgttacacagtaatctataattgaatgatactgccccttttggagcagggcttactcataggcagtgtgcccagggtgggcaatgtataggctcttggcaactgcatactcaagtaaacccacttccaattacatgcaaattaaggtatggatcaatgcaaactgagaagtgggttatttagcactttctaggaaagaagagataaacttcaagctgtttctatagaaaggggtggtgacttctgggtctagtggaagtaacttatgctaatgagcaacaacagcagctagggatccccttcattgtccaatgctggttcctgctggtttcttcacttaaatacctgtactggacacgaggatggtaannnnnnnnnnnnnnnnnnnnnnnnnnnnnnnnnnnnnnnnnnnnnnnnnnnnnnnnnnnnnnnnnnnnnnnnnnnnnnnnnnnnnnnnnnnnnnnnnnnntgcaccaataggatatggcatccacatgcctagctgagggcggcttttacaccctcttactggagagaaaaacactgagctgagtgctgctcttatctgatggggacaggactactgagtactcaccgtgaagaatactcttgactaaacgtacctgcaacacattattagggatcccctataggggacaatgactagtttctgctgttttctttactgagatggtagtctggaccttatcggccagctgctggagtttgtggccagaaaataagccctgctggtctcccacctcattcatcccttagagattagatacttatccttaaggaggctgcagaaaggtggaggtctgtcttcygtaactgcttcttgctgattttatgggcataaggcctgcctaacactgggtgagtaaaaacatttgaatgtttgatttaagggggccaacagtaggatgttttcattttctgggtcagaacacaggttgagttggaagccatcctttttacatggaatctataagatataaactttactaggaggttgaacaacaaacttacaattagaaggaagagaaaaattaatgcttctttcccactcacagcatcatgttatttatctatgcatttgtgaaataaaagctttacctcttttatgggtctacaagtgtaagttgtggtgttctccttctctgcctacagggacttaaaagaaacaggtttaatccttgaaaggtgtacccagctagtgattctctgaagtttaacagcagtgaagatacttaacaatacacaatgacagctctttcattttggttgtaattgatccttcgggaattttttaaaagagtttttagtaagactatgtcttctggaggaggcaacactttatttctctattctttaagggacctgtaaacctagcctaaattttaaagagggcatagtgaggtgtgttttaccccatttcccatcatgagctaaacttgctttcttagatttctttcagatttcttttggccaaa

SEQ ID NO: 550526 - DNA, 519 bp, Homo sapiens
tgtccattttctttgcttctgccttggtttaggatttatcacaggaacttcttttgttggggtctactttttcaatcttaccccataacttccttgccccactagggctgggacaaacctctctaagacccaaatgtccttttgtccttctgctagggaattctggaaaaagtcagatgcttgcagtgtctaagatctcttgtgacccagctcatgcataccatactggcccctcttctttttgctggtcttcacaatccacgctccagctagtgagaagctgcctctgttcctctgatgttcttctacttttgtgaagagggctccaaccaaagcactttcccatttgtaaagctcatttgtaagctgcaaacaaactcggcatcttttgggaagcttcttttytcactcaaggtactctttgaccctgtttagtgatttgtatgtggctcagtcatgccttgtctttcatttctcatgcccatccctcacacggtatagggtagtgattagcagaga

SEQ ID NO: 550527 - DNA, 523 bp, Homo sapiens
ggggtatggtagttttcaagacagcataagattaaaatttattctcgaaatcatatgcatttttaacattttttggtaagcataatacaaaacacttttaaaaggcttttgatttccaaggtgacaaagcattatcttaaattatttttatgttttaacgacacgaaaagcaaagggatatactactttcatttttaggaaaaaacacacaaatggattaacatttttgcctatatgaagcagatatttaatttgaaaactagaagatctaggtctggcccccatggcactctcattatataatttccggcaaggttgttagaccctcagtcacctacttgcctcttgaatgatgtgrtcattctaacatgatatgatctgctgtctattacatctctgtagcacaaggaaaagttacgaatttatttgatgtctaacacagtaaatcctatgagcatttgagttgctgctgtttgaaaattttaaattacttttacataaacaaaaaaatctgtatttgtct

SEQ ID NO: 550528 - DNA, 512 bp, Homo sapiens
cataaccttagcaaggtggtttcagttctctgagtctcatatactgtgtggcccctgtgcttctgcacattaatacatttatatgcctcttcccctgttaatcagtctaatgtcaggtcatttcagcactttcaaatttcagagccagagggggaggaaaaattatcttcacacctatactctctaagaccaaaaagcaacagacattctgccacatgctacaagacggataaaccgacaaatattatatggttccacttataagaaacatgaagagaaagtagagtaaaggttcccttgtccccctctgccacagagggagtggcttgcttcttcagcgccctgctgctcaaacctctagggggagcatacagatgggcasgttgtggggctcggaccccatggcagtgtctagaggtgtatgtttacagctcctgaagccccagtgggcatgtgttacaaggtgctcttttaatctagccgtctgtaggcagcttgtgttagtcagctca

SEQ ID NO: 550529 - DNA, 981 bp, Homo sapiens
tcaccaagcaaacaaatggagatgcataaactacctgacaaagcatttgaaataacagtcttagggaagctcagcaaacttcaagaaaatacacagaaactattcaaacaaacgataaaaataatatgaccacaatgataaacttagcaaatattggaataacttaaaaatcaaacaaattctaaagctgcaaaatataatgaacaaaatgtaaastgcagttgagaccatcaacagcagaatggatcaagccaatgaatctgtgaactcaaatacaggttatatgaaaatagagaagagaaaagaatgaaaaataataaaggaaacatgagatttactggacagcaacaaaacagcaaatttttgagtcattggagataagggagttgaaatgataaaggagtagaaagcttatatgaagaaataatagaaaacttttcaaacctggaaaaagatataaataaccaggtacagtgaggtaaaaagtaaccaatcagattcaatccaaacaaaactacccctaagacatattataatcaaaccaccaaaaattgaagggaagcttctctgtattggtggaaggtaggtagggcttttctagcccctacttccactctatcccctgagttccacctgcactgactcgaggaagagtaagcatctagagctagtgagaatgggaggaacttacaaagtcaagagagaagcctattgttccttgctcacccacagattacgtactattactcaaggcttgctgtatttattatagaagagaaaatcttcttgtattatatatcagctgagttattgcttatctgagaatcaccagaagtttccacccgagacaggataagagaatagagccaacatgttgggatttccagagcaatcaagagaaaagaaaatctattgtgttattattgcccctgagaaatcacacttttgtctttcctaggaagctgatgcttacaacaatgg

SEQ ID NO: 550530 - DNA, 656 bp, Homo sapiens
agaattttggatggacaaagactataaaatagagtttccacacagtgaaagaattcctcaaaatgagatgaatatgagatgaggcatcattgtatgagagtctaaggaataacagggataaaatcctaagtatctgatgggtagagaaaaggaaaataaatctttatatccaaatttcctactttataatttcctaaaggacgaatctcacagttaacattttcttcagagcccccatgacatccttattcctaagactatagattaaagggttcagcaccggagtgaggatggtatagaagacagataccatcatgtccttctcaggggtgtggtaggagctggggagcatgtaggtgtagacggcagccccatagaagaggatgaccacagtcaggtgggaggagcaggtggcaaaggcctttttccggccckctgctgagttcatcctgtggacggtgaggaggatgagtaaataggagcttgaaatgatcgtcacagggatgaggagcatgaggacacagcataggtacatgagggtctcatagagtgaggtgtctgagcaggacaggatcgttacagcagggacttcacagaagaaatgatgaatctcccaggatctgcagaaggggaagctcatggtgatgggagtgagc

SEQ ID NO: 550531 - DNA, 656 bp, Homo sapiens
agaattttggatggacaaagactataaaatagagtttccacacagtgaaagaattcctcaaaatgagatgaatatgagatgaggcatcattgtatgagagtctaaggaataacagggataaaatcctaagtatctgatgggtagagaaaaggaaaataaatctttatatccaaatttcctactttataatttcctaaaggacgaatctcacagttaacattttcttcagagcccccatgacatccttattcctaagactatagattaaagggttcagcaccggagtgaggatggtatagaagacagataccatcatgtccttctcaggggtgtggtaggagctggggagcatgtaggtgtagacggcagccccatagaagaggatgaccacagtcaggtgggaggagcaggtggcaaaggcctttttccggccctctgctgagttcatcctgtggayggtgaggaggatgagtaaataggagcttgaaatgatcgtcacagggatgaggagcatgaggacacagcataggtacatgagggtctcatagagtgaggtgtctgagcaggacaggatcgttacagcagggacttcacagaagaaatgatgaatctcccaggatctgcagaaggggaagctcatggtgatgggagtgagc

SEQ ID NO: 550532 - DNA, 551 bp, Homo sapiens
aggcagagcaggacaaacatgccaggccctccaggggctcttctccctcaagggattgagagcagccattgccagccactctcatggatggagaacagctccagaatccagctggagagagtgaggaaggaaggggaagcctacctagcattcaggccacatttgcccagcacacaccacagtgggccaggggtggggagagtggggggtctactgctggycccaaggacgggtgcctggttggaccctggcctctcttctcacttgctcaaggtctggttacacgaggcacacacaaacacagtctccctgtgggcttcaggggctgaaaaggaggaagaacttggtgagacatttccttgcgccctttggttcatggccccaactactagaagcaccctcccaaatgccccacacagaccccccacccagcccacaccctccctgcccagcttgctagcctgcccgcagagattcttctttccatgggaactggggatcctgggggtgatgatgccaacagcaggccactcctgtgctatgaattagac

SEQ ID NO: 550533 - DNA, 551 bp, Homo sapiens
aggcagagcaggacaaacatgccaggccctccaggggctcttctccctcaagggattgagagcagccattgccagccactctcatggatggagaacagctccagaatccagctggagagagtgaggaaggaaggggaagcctacctagcattcaggccacatttgcccagcacacaccacagtgggccaggggtggggagagtggggggtctactgctggtcccaaggacgggtgcctggttggaccctggcctctcttctcacttgctcaaggtctggttacacgaggcacacacaaacacagtctccctgtgggcttcaggggctgaaaaggaggaagaacttggtgagacatttccttgcgccctttggttcatggccccaactactagaagcaccctcccaaatgccccacacagaccccccacccagcccacaccctccctgcccagcttgctagcctgcccgcagagattcttctttccatgggaactggggatcctggggrtgatgatgccaacagcaggccactcctgtgctatgaattagac

SEQ ID NO: 550534 - DNA, 529 bp, Homo sapiens
aattcagaattgttgtgagttaagatgcggtactgtatacaataatatgatctgttgattttccaaaccttggaatatattatttataaaatattgtgaacatgtttttaaaactttctggtttgcactgtaactcacaaacacattctggttgatcaacatttagaagatttcaacaagctttcatttgtttttatttatcttataaggcatagaattacataataacttcttttgttttttgcttgtttgttagtttgtttttggtggggattttttgttttttggttttgttttgttttgagatggagtctcgctctgtcgyccaggctggagtgtagcggcacaatctcggctcaccacagcctctgcctcccgggtttaagtgattctcctgcctcgatctcctcccaagtagctggaattacatgcaagcaccacaatgcccggctaatttttgtatttttagttagagacagggtttcactgtgttgccaaggctggtctcgaacgcctgaccttggcctcc

SEQ ID NO: 550535 - DNA, 529 bp, Homo sapiens
aattcagaattgttgtgagttaagatgcggtactgtatacaataatatgatctgttgattttccaaaccttggaatatattatttataaaatattgtgaacatgtttttaaaactttctggtttgcactgtaactcacaaacacattctggttgatcaacatttagaagatttcaacaagctttcatttgtttttatttatcttataaggcatagaattacataataacttcttttgttttttgcttgtttgttagtttgtttttggtggggattttttgttttttggttttgttttgttttgagatggagtctcgctctgtcgtccaggctggagtgtagcggcacaatctcggctcaccacagcctctgcctcccgggtttaagtgattctcctgcctcgatctcctcccaagtagctggaattacatgcaagcaccacaatgcccggctaatttttgtatttttagttagagacagggtttcactgtgttgccaaggctggtctcgaacgcctgacctyggcctcc

SEQ ID NO: 550536 - DNA, 549 bp, Homo sapiens
ttagctttttgacacgagttaaacattcttgttttgaaactgagtatgagtctagaggctaagtagctatccccagatcataaggcaatagggactacttgttcctgaaaagatacagcctcatttctgcactgtgtgttatgcgatgactcatttgttattccggttaatcatgtacaaagctattcaaaagaattccrgatcaacatgaatagtattataaatccaggcaggagttcagaggtttttataagagatatctataattattgcttagactgccaaaagcacaataaaagaaactacaactctgaatagcaggcataaaattcatattagccttatggaatacacacagattacattctaacattcaattaattcaaggttaaggctacatccacatttgaagagctagcaaagtgaggatctccattattttgtaagtcattgagcaatatattggactgttggctgctatatttagtataatatgatatagcctttgaatggttattaaaagtatgatttttgtaaagcttttatttt

SEQ ID NO: 550537 - DNA, 619 bp, Homo sapiens
aagaaaggagcagtagctaaagggagcatgtagaatgggtgatatttatttcatacactcaggaatgatccaaaagggagtgtgaaattggagctacatagaaacaagtaatatttaagataaaaacatacagatagtaagatgtaaagtgagtaaatacagaaaaaaatgtaagatctctgaagcatagctaacctatagaaaggaggtgggatacccttgtagtgacatcaattggaaagaagtaagacgcccaccagagcagatgtgtttataagcatttaggcagaaagttatggtatttaggcagaaagttatggtagtttctgactgaaggcctcaaattctctctctctctctctctctstgtgtgtgtgtgtgtgtgtgtgtgtgtgtgtgtgtgtgaaaatgtgtgtgtcgtcaaagagtgtgtgttttaagagaagagatacatgctgtaatgcccaggttggagtgcagtggcacgatcacagctcgctgcagcctcgaattcctggccttaaaggatcctcccgaatagctgggcctacaggtataagtcccaccatctttatggcagaagttctgccttcttattaagagtgagaagaatttttat

SEQ ID NO: 550538 - DNA, 1391 bp, Homo sapiens
ggtagaataaacctccatatcaccacaattcctgatgggaattattctgtgatgaactctgaaggccaacattcctgttccatagggacaaaagagccaagtatgtctgaattccatttgttcttgttgcatttagtcccattgtgcctcaatgggacccatcaatatctcactccctaaagaaatttagaagttgtctctagtcccagaaataataggaatcttattcatccattccatgagcattccttaaaatgctataaacattttctgtagggatattacactggtaaatcagcaaattctttgtataccactcatctggatttttgcaaggtatttgacagtcactcttgacctctctggggtaacgacaggatgataatagagttgggtgcctgtgtaactgaactgctattcccaacatatgtagtttagtaatgtgtaattctggtagaaaatatctatctgtaagttgttaaattttaataaattcatttatttaaaacaataggttgaaaataaagattgaaatgctaatgaaattatttgaagacataacaaacacttcagaaggtcaagtcaacttttgagatcatctgaatggtagaaaatgcagttctgttcaattaagtattaaatagaagattgataaatgaaaacagcacttaggcataaagaaagactaaaacaaaaatatcaactgaggaaatacaagctaaagaattaaaaactttaaggattatatgcaattttctaaatagagtacaatctggaagttttgaagttggggaaagatttgttgttgatgagtacctgactggtttgcgtgaccccacaatttgtagaactttatgtttcttagcttcctcttcaaagcttattaatttgtatcttcaccggaaacccacttttataagttccccttgaataatatctgagttttcatatatttaattttctacattttttagatcttaaggccctagcgatatttctctgtggctgggattttttttattgaaagatttttgttggtaatgttttatatattccttatatatacatactgagtacatataagattacatttgttttacttttctacattttttatttcacttttaaagtttaggatacatayagtaaataaaaaagaacatatgagaaagcccaagttttttaaactttcattaactcctaagataaacaaattatattttgataaatttctttattctaaactcattaatcccatgtaagtatggagtttctgccatatacagattgagtatccctaatatgacatgtaaaatgctctaaaatctgacatgttttgagtattgacatgatgccacaaatgaaaaattccacacctgacctcatgtgat

SEQ ID NO: 550539 - DNA, 2323 bp, Homo sapiens
  misc_feature 1070, 1071, 1072, 1073, 1074, 1075, 1076, 1077, 1078, 1079,1080, 1081, 1082, 1083, 1084, 1085, 1086, 1087, 1088, 1089,1090, 1091, 1092, 1093, 1094, 1095, 1096, 1097, 1098, 1099,1100, 1101, 1102, 1103, 1104, 1105, 1106, 1107, 1108: n = A,T,C or G
  misc_feature 1109, 1110, 1111, 1112, 1113, 1114, 1115, 1116, 1117, 1118,1119, 1120, 1121, 1122, 1123, 1124, 1125, 1126, 1127, 1128,1129, 1130, 1131, 1132, 1133, 1134, 1135, 1136, 1137, 1138,1139, 1140, 1141, 1142, 1143, 1144, 1145, 1146, 1147: n = A,T,C or G
  misc_feature 1148, 1149, 1150, 1151, 1152, 1153, 1154, 1155, 1156, 1157,1158, 1159, 1160, 1161, 1162, 1163, 1164, 1165, 1166, 1167,1168, 1169: n = A,T,C or G
attatcgattacatctcttcaaccaagcctgaattattcctactaacattgctgttggttttcattgcagtagatatttaggtttccatttcttcctccccttatcatttactaacctactgtaggtggaccagacttcaaaaactgtattctcatggtgactgcatggaaacttgagcacattttatggaaaattattgagcacagtcttttcatgatccctgtatgctgtgtgtcctgagggcactaactcagagtgtcctgttactccctcatcagtgcgtcacctggacaattcactgagctcgttctctctctctctgtgtgtgtgtgtgtgtgtgtgtgtgtgtgtgtgtgtgtctatctgtctttctctttcattcttttccatttggccctgttctgtcccaacatgaaggcaataatttgttacctcattaatggatctatccttttagttttttaaccacttccctatgctacccatgaaacctagttggggctctgttgtgtctgatttcccctggcttattctttactttttcctccttttccaggctcagcagggagctgctggaggtagtagagcctgaagtcttgcaggactcactggatagatgttattcaactccttccagttgtcttgaacagcctgactcctgccagccctatggaagttccttttatgcattggaggaaaaccatgttggcttttctcttgacgtgggaggtgagtacctttctatgaaggtgataaggatccactgagtcttccatataaagatcatattcctgctccaagtggccattactgagctgagagatgtcattgccacagggaggacctataggcacatgtaggttgaatgaaactctagttctacctggaagcccagacaagggatgggtcagtgagcaagactctcttcctagtctcaggccatacctgtggcgccctgatcctattctcatgacattggacctgggcagatgtgacaaattcagagaactatgattttgactcaagggtttgtagatttcctttttcactctaattcagtgtacaaagnnnnnnnnnnnnnnnnnnnnnnnnnnnnnnnnnnnnnnnnnnnnnnnnnnnnnnnnnnnnnnnnnnnnnnnnnnnnnnnnnnnnnnnnnnnnnnnnnnnncgcgcagcgaatacgaactttatatgggagactcagtggatccttatcacctgcatagacagggactcacctcccacgtgaagtagtaaaagccaacatggttatcctccaatgcataaaaggaacctccatagggctggcaggagtacaggctaggtcaagacaacggcaaggagccgtacatcatcgatccagagagtcctgcaggacttcaggctctactacctccagcagctccctgctgagcctggaaaaggaggaaaaagtaaagaataagccaggggaaatcagacacaacagagccccaactaggtttcatgggtagcatagggaagtggttaaaaaactaaaaggatagatccattaatgaggtaacaaattattgccttcatgttgggacagaacagggccaaatggaaaagaatgaaagagaaagacagatagacacacacacacacacacacacacacacacacacacacacacacacacagagagagagagaacgagctcagtgaattgtccaggtgacgcactgatgagggagtaacaggacactctgagttagtgccctcaggacacacagcatacagggatcatgaaaagactgtgctcaataattttccataaaatgtgctcaagtttccatgcagtcgccatgagaatacagtttttgaagtctggtccacctacagtaggttagtaaatgataaggggaggaagaaatggaaacctaaatatctactgcaatgaaaaccaacagcaatgttagtaggaataattcaggcttggttgaaaagatgtaatcgataatgtcagcccgctctgttttccctgaacctggagtctccagatgtcaacacagaagtagctgttcacaattgctcagttacctggggcatggtgggtcttggtcttcttcctcttcttcgtcctttttaattcctgcaatacattcagacagggacagacaaaataagccaattcacctacacccataacagtccactgtctaatccccacacagggatctcagrctcctcagcatgagaacaggacaatgtgagagatatacttcaggaggcctgaaagctggtcatgatattctttggtttgcatctcagaaccaagggtgaaatatccccattctggta

SEQ ID NO: 550540 - DNA, 2323 bp, Homo sapiens
  misc_feature 1070, 1071, 1072, 1073, 1074, 1075, 1076, 1077, 1078, 1079,1080, 1081, 1082, 1083, 1084, 1085, 1086, 1087, 1088, 1089,1090, 1091, 1092, 1093, 1094, 1095, 1096, 1097, 1098, 1099,1100, 1101, 1102, 1103, 1104, 1105, 1106, 1107, 1108: n = A,T,C or G
  misc_feature 1109, 1110, 1111, 1112, 1113, 1114, 1115, 1116, 1117, 1118,1119, 1120, 1121, 1122, 1123, 1124, 1125, 1126, 1127, 1128,1129, 1130, 1131, 1132, 1133, 1134, 1135, 1136, 1137, 1138,1139, 1140, 1141, 1142, 1143, 1144, 1145, 1146, 1147: n = A,T,C or G
  misc_feature 1148, 1149, 1150, 1151, 1152, 1153, 1154, 1155, 1156, 1157,1158, 1159, 1160, 1161, 1162, 1163, 1164, 1165, 1166, 1167,1168, 1169: n = A,T,C or G
attatcgattacatctcttcaaccaagcctgaattattcctactaacattgctgttggttttcattgcagtagatatttaggtttccatttcttcctccccttatcatttactaacctactgtaggtggaccagacttcaaaaactgtattctcatggtgactgcatggaaacttgagcacattttatggaaaattattgagcacagtcttttcatgatccctgtatgctgtgtgtcctgagggcactaactcagagtgtcctgttactccctcatcagtgcgtcacctggacaattcactgagctcgttctctctctctctgtgtgtgtgtgtgtgtgtgtgtgtgtgtgtgtgtgtgtctatctgtctttctctttcattcttttccatttggccctgttctgtcccaacatgaaggcaataatttgttacctcattaatggatctatccttttagttttttaaccacttccctatgctacccatgaaacctagttggggctctgttgtgtctgatttcccctggcttattctttactttttcctccttttccaggctcagcagggagctgctggaggtagtagagcctgaagtcttgcaggactcactggatagatgttattcaactccttccagttgtcttgaacagcctgactcctgccagccctatggaagttccttttatgcattggaggaaaaccatgttggcttttctcttgacgtgggaggtgagtacctttctatgaaggtgataaggatccactgagtcttccatataaagatcatattcctgctccaagtggccattactgagctgagagatgtcattgccacagggaggacctataggcacatgtaggttgaatgaaactctagttctacctggaagcccagacaagggatgggtcagtgagcaagactctcttcctagtctcaggccatacctgtggcgccctgatcctattctcatgacattggacctgggcagatgtgacaaattcagagaactatgattttgactcaagggtttgtagatttcctttttcactctaattcagtgtacaaagnnnnnnnnnnnnnnnnnnnnnnnnnnnnnnnnnnnnnnnnnnnnnnnnnnnnnnnnnnnnnnnnnnnnnnnnnnnnnnnnnnnnnnnnnnnnnnnnnnnncgcgcagcgaatacgaactttatatgggagactcagtggatccttatcacctgcatagacagggactcacctcccacgtgaagtagtaaaagccaacatggttatcctccaatgcataaaaggaacctccatagggctggcaggagtacaggctaggtcaagacaacggcaaggagccgtacatcatcgatccagagagtcctgcaggacttcaggctctactacctccagcagctccctgctgagcctggaaaaggaggaaaaagtaaagaataagccaggggaaatcagacacaacagagccccaactaggtttcatgggtagcatagggaagtggttaaaaaactaaaaggatagatccattaatgaggtaacaaattattgccttcatgttgggacagaacagggccaaatggaaaagaatgaaagagaaagacagatagacacacacacacacacacacacacacacacacacacacacacacacacagagagagagagaacgagctcagtgaattgtccaggtgacgcactgatgagggagtaacaggacactctgagttagtgccctcaggacacacagcatacagggatcatgaaaagactgtgctcaataattttccataaaatgtgctcaagtttccatgcagtcgccatgagaatacagtttttgaagtctggtccacctacagtaggttagtaaatgataaggggaggaagaaatggaaacctaaatatctactgcaatgaaaaccaacagcaatgttagtaggaataattcaggcttggttgaaaagatgtaatcgataatgtcagcccgctctgttttccctgaacctggagtctccagatgtcaacacagaagtagctgttcacaattgctcagttacctggggcatggtgggtcttggtcttcttcctcttcttcgtcctttttaattcctgcaatacattcagacagggacagacaaaataagccaattcacctacacccataacagtccactgtctaatccccacacagggatctcaggctcctcagcatgagaacaggacaatgtgagagatatacttcaggaggcctgaaagctggtcatgatattcyttggtttgcatctcagaaccaagggtgaaatatccccattctggta

SEQ ID NO: 550541 - DNA, 2323 bp, Homo sapiens
  misc_feature 1070, 1071, 1072, 1073, 1074, 1075, 1076, 1077, 1078, 1079,1080, 1081, 1082, 1083, 1084, 1085, 1086, 1087, 1088, 1089,1090, 1091, 1092, 1093, 1094, 1095, 1096, 1097, 1098, 1099,1100, 1101, 1102, 1103, 1104, 1105, 1106, 1107, 1108: n = A,T,C or G
  misc_feature 1109, 1110, 1111, 1112, 1113, 1114, 1115, 1116, 1117, 1118,1119, 1120, 1121, 1122, 1123, 1124, 1125, 1126, 1127, 1128,1129, 1130, 1131, 1132, 1133, 1134, 1135, 1136, 1137, 1138,1139, 1140, 1141, 1142, 1143, 1144, 1145, 1146, 1147: n = A,T,C or G
  misc_feature 1148, 1149, 1150, 1151, 1152, 1153, 1154, 1155, 1156, 1157,1158, 1159, 1160, 1161, 1162, 1163, 1164, 1165, 1166, 1167,1168, 1169: n = A,T,C or G
attatcgattacatctcttcaaccaagcctgaattattcctactaacattgctgttggttttcattgcagtagatatttaggtttccatttcttcctccccttatcatttactaacctactgtaggtggaccagacttcaaaaactgtattctcatggtgactgcatggaaacttgagcacattttatggaaaattattgagcacagtcttttcatgatccctgtatgctgtgtgtcctgagggcactaactcagagtgtcctgttactccctcatcagtgcgtcacctggacaattcactgagctcgttctctctctctctgtgtgtgtgtgtgtgtgtgtgtgtgtgtgtgtgtgtgtctatctgtctttctctttcattcttttccatttggccctgttctgtcccaacatgaaggcaataatttgttacctcattaatggatctatccttttagttttttaaccacttccctatgctacccatgaaacctagttggggctctgttgtgtctgatttcccctggcttattctttactttttcctccttttccaggctcagcagggagctgctggaggtagtagagcctgaagtcttgcaggactcactggatagatgttattcaactccttccagttgtcttgaacagcctgactcctgccagccctatggaagttccttttatgcattggaggaaaaccatgttggcttttctcttgacgtgggaggtgagtacctttctatgaaggtgataaggatccactgagtcttccatataaagatcatattcctgctccaagtggccattactgagctgagagatgtcattgccacagggaggacctataggcacatgtaggttgaatgaaactctagttctacctggaagcccagacaagggatgggtcagtgagcaagactctcttcctagtctcaggccatacctgtggcgccctgatcctattctcatgacattggacctgggcagatgtgacaaattcagagaactatgattttgactcaagggtttgtagatttcctttttcactctaattcagtgtacaaagnnnnnnnnnnnnnnnnnnnnnnnnnnnnnnnnnnnnnnnnnnnnnnnnnnnnnnnnnnnnnnnnnnnnnnnnnnnnnnnnnnnnnnnnnnnnnnnnnnnncgcgcagcgaatacgaactttatatgggagactcagtggatccttatcacctgcatagacagggactcacctcccacgtgaagtagtaaaagccaacatggttatcctccaatgcataaaaggaacctccatagggctggcaggagtacaggctaggtcaagacaacggcaaggagccgtacatcatcgatccagagagtcctgcaggacttcaggctctactacctccagcagctccctgctgagcctggaaaaggaggaaaaagtaaagaataagccaggggaaatcagacacaacagagccccaactaggtttcatgggtagcatagggaagtggttaaaaaactaaaaggatagatccattaatgaggtaacaaattattgccttcatgttgggacagaacagggccaaatggaaaagaatgaaagagaaagacagatagacacacacacacacacacacacacacacacacacacacacacacacacagagagagagagaacgagctcagtgaattgtccaggtgacgcactgatgagggagtaacaggacactctgagttagtgccctcaggacacacagcatacagggatcatgaaaagactgtgctcaataattttccataaaatgtgctcaagtttccatgcagtcgccatgagaatacagtttttgaagtctggtccacctacagtaggttagtaaatgataaggggaggaagaaatggaaacctaaatatctactgcaatgaaaaccaacagcaatgttagtaggaataattcaggcttggttgaaaagatgtaatcgataatgtcagcccgctctgttttccctgaacctggagtctccagatgtcaacacagaagtagctgttcacaattgctcagttacctggggcatggtgggtcttggtcttcttcctcttcttsgtcctttttaattcctgcaatacattcagacagggacagacaaaataagccaattcacctacacccataacagtccactgtctaatccccacacagggatctcaggctcctcagcatgagaacaggacaatgtgagagatatacttcaggaggcctgaaagctggtcatgatattctttggtttgcatctcagaaccaagggtgaaatatccccattctggta

SEQ ID NO: 550542 - DNA, 687 bp, Homo sapiens
cattgtctctgcagtgttcccagcaaaaagtttaggctgaatttaatcatgaagacattttcagacaacttcagaatgtagatcattgagccagagagctgacctgtcctctataaacaagtccatgtcaccaccatcaatgacaacaacaaaaagatgaggaaatatttggggttcaaaataactaaagaaatgcagctacattayctttttactttttttcaacccaaaatatctcttctcctttttgttgtgtgatttgtggtgatatggactatgtgaaggagacaggtcagttgtcctgctcagtgttctacattctgcagttgtctggtgattacctcctatgaaactcaggctaagcgttttctgcaagaacatggcattgctcatattctgcaccggcagagtcctgggtgacatgctgtctcctgccagcggctcctgactcctgttctctacaggatggaattgagaggagcagggctaaggcctcccaatgctgtttgtccatctagctgtggtcttcctaagtactgacaccaattggaggctgaaggactgtggcttctctaaccaaaggagcctagcgggttaacaattgtcaagagcagttggtggttctgaaatacaatcctcagccaaggatccctcctgtgttacagatggatcagctaaaacaagcca

SEQ ID NO: 550543 - DNA, 687 bp, Homo sapiens
cattgtctctgcagtgttcccagcaaaaagtttaggctgaatttaatcatgaagacattttcagacaacttcagaatgtagatcattgagccagagagctgacctgtcctctataaacaagtccatgtcaccaccatcaatgacaacaacaaaaagatgaggaaatatttggggttcaaaataactaaagaaatgcagctacattatmtttttactttttttcaacccaaaatatctcttctcctttttgttgtgtgatttgtggtgatatggactatgtgaaggagacaggtcagttgtcctgctcagtgttctacattctgcagttgtctggtgattacctcctatgaaactcaggctaagcgttttctgcaagaacatggcattgctcatattctgcaccggcagagtcctgggtgacatgctgtctcctgccagcggctcctgactcctgttctctacaggatggaattgagaggagcagggctaaggcctcccaatgctgtttgtccatctagctgtggtcttcctaagtactgacaccaattggaggctgaaggactgtggcttctctaaccaaaggagcctagcgggttaacaattgtcaagagcagttggtggttctgaaatacaatcctcagccaaggatccctcctgtgttacagatggatcagctaaaacaagcca

SEQ ID NO: 550544 - DNA, 687 bp, Homo sapiens
cattgtctctgcagtgttcccagcaaaaagtttaggctgaatttaatcatgaagacattttcagacaacttcagaatgtagatcattgagccagagagctgacctgtcctctataaacaagtccatgtcaccaccatcaatgacaacaacaaaaagatgaggaaatatttggggttcaaaataactaaagaaatgcagctacattatctttttactttttttsaacccaaaatatctcttctcctttttgttgtgtgatttgtggtgatatggactatgtgaaggagacaggtcagttgtcctgctcagtgttctacattctgcagttgtctggtgattacctcctatgaaactcaggctaagcgttttctgcaagaacatggcattgctcatattctgcaccggcagagtcctgggtgacatgctgtctcctgccagcggctcctgactcctgttctctacaggatggaattgagaggagcagggctaaggcctcccaatgctgtttgtccatctagctgtggtcttcctaagtactgacaccaattggaggctgaaggactgtggcttctctaaccaaaggagcctagcgggttaacaattgtcaagagcagttggtggttctgaaatacaatcctcagccaaggatccctcctgtgttacagatggatcagctaaaacaagcca

SEQ ID NO: 550545 - DNA, 687 bp, Homo sapiens
cattgtctctgcagtgttcccagcaaaaagtttaggctgaatttaatcatgaagacattttcagacaacttcagaatgtagatcattgagccagagagctgacctgtcctctataaacaagtccatgtcaccaccatcaatgacaacaacaaaaagatgaggaaatatttggggttcaaaataactaaagaaatgcagctacattatctttttactttttttcaacccaaaatatctcttctcctttttgttgtgtgatttgtggtgatatggactatgtgaaggagacaggtcagttgtcctgctcagtgttctacattctgcagttgtctggtgattacctcctatgaaactcaggctaagcgttttctgcaagaacatggcattgctcatattctgcacyggcagagtcctgggtgacatgctgtctcctgccagcggctcctgactcctgttctctacaggatggaattgagaggagcagggctaaggcctcccaatgctgtttgtccatctagctgtggtcttcctaagtactgacaccaattggaggctgaaggactgtggcttctctaaccaaaggagcctagcgggttaacaattgtcaagagcagttggtggttctgaaatacaatcctcagccaaggatccctcctgtgttacagatggatcagctaaaacaagcca

SEQ ID NO: 550546 - DNA, 687 bp, Homo sapiens
cattgtctctgcagtgttcccagcaaaaagtttaggctgaatttaatcatgaagacattttcagacaacttcagaatgtagatcattgagccagagagctgacctgtcctctataaacaagtccatgtcaccaccatcaatgacaacaacaaaaagatgaggaaatatttggggttcaaaataactaaagaaatgcagctacattatctttttactttttttcaacccaaaatatctcttctcctttttgttgtgtgatttgtggtgatatggactatgtgaaggagacaggtcagttgtcctgctcagtgttctacattctgcagttgtctggtgattacctcctatgaaactcaggctaagcgttttctgcaagaacatggcattgctcatattctgcaccggcagagtcctgggtgacatgctgtctcctgccagcggctcctgactcctgttctctacaggatggaattgagaggagcagggctaaggcctcccaatgckgtttgtccatctagctgtggtcttcctaagtactgacaccaattggaggctgaaggactgtggcttctctaaccaaaggagcctagcgggttaacaattgtcaagagcagttggtggttctgaaatacaatcctcagccaaggatccctcctgtgttacagatggatcagctaaaacaagcca

SEQ ID NO: 550547 - DNA, 1373 bp, Homo sapiens
ggaagaaacagagaatagaaaagtgttggaggccgaaagaatgagagtcgtgaccaactcagtgtaccactggaggctatatgagtaaacagcaaactgttctcatgaaagcaggttgttagcaaactgacaaactgcgtctgccacccagagggaatgctgagggcagtcgcgccccaggcgcagtgtttcttgtgattaggcacatctgaagcctgttagcaataatgtgagcctgtgatcaatcaagcagctgaccagttgttagctcctcctccctgctctttctgcccaataaatacaaagggctgtggaagctcaaggcccttgctccctagaaggaaggagccccctgaccctttctttaaaacagtttcttttgtcttaagttttcatttctgcattcatcctccttcattcagtctcatagtaactgttgcagaaaagtatgagtggatgtccctcaattgaagaaaagaaagaaagtgacagaaaaggcacagattagaaatcggtgaataaaaagtcacaaattactggattacagtcacaaaacctaaagggaagtgtgttctgtcaaacacatgggtgaacaaccaaaatcatagaggtcatgaagccccacatggatttatttaatttataaatttaagatgaccattccttcttctccctcataaactaatattatgttggggctaataaggtgaagctgtggggtgatttactataactataaaaatttcactttcttaaaacacctcttttttttccatttcctgatacctgcaactcatttgcctgaaaacaagataatagagctactgacattcatattcatgaaaatgactcacaccaggtctgtttytgggagctgttttgataaggaaggaggcagaggagagagcaagagggcatcaagctacaaggaaaatgacctaagggatgtggcagaggtgggggacgaagtgatctggagtcaccttcatatctattgggaacaacatttctgaatttctgttgagactgctgagaaacatgagaatggtaaaaaaaaaaaaaaaaaaaaaaaaaaaaaagacatgtaaatctagaaaaaacagcttctagacaatgtggaaactgttggcagtttttaaaaatgctaggattattatttctattatgaagagaaaattgagtataatgaataaattcctggtttccatagcaagttcaacttcttcatgctgggtataaataataaatatattgttgttactgaaaatgttttcagttatgccacatacattaaagactgataattacattaatgcaatattgaagttattaatacgaactttcaaagagattatttttcatgaaggccagga

SEQ ID NO: 550548 - DNA, 1373 bp, Homo sapiens
ggaagaaacagagaatagaaaagtgttggaggccgaaagaatgagagtcgtgaccaactcagtgtaccactggaggctatatgagtaaacagcaaactgttctcatgaaagcaggttgttagcaaactgacaaactgcgtctgccacccagagggaatgctgagggcagtcgcgccccaggcgcagtgtttcttgtgattaggcacatctgaagcctgttagcaataatgtgagcctgtgatcaatcaagcagctgaccagttgttagctcctcctccctgctctttctgcccaataaatacaaagggctgtggaagctcaaggcccttgctccctagaaggaaggagccccctgaccctttctttaaaacagtttcttttgtcttaagttttcatttctgcattcatcctccttcattcagtctcatagtaactgttgcagaaaagtatgagtggatgtccctcaattgaagaaaagaaagaaagtgacagaaaaggcacagattagaaatcggtgaataaaaagtcacaaattactggattacagtcacaaaacctaaagggaagtgtgttctgtcaaacacatgggtgaacaaccaaaatcatagaggtcatgaagccccacatggatttatttaatttataaatttaagatgaccattccttcttctccctcataaactaatattatgttggggctaataaggtgaagctgtggggtgatttactataactataaaaatttcactttcttaaaacacctcttttttttccatttcctgatacctgcaactcatttgcctgaaaacaagataatagagctactgacattcatattcatgaaaatgactcacaccaggtctgtttctgggagctgttttgataaggaaggaggcagaggagagagcaagagggcatcaagctacaaggaaaatgacctaagggatgtggcagaggtgggggacgaagtgatctggagtcmccttcatatctattgggaacaacatttctgaatttctgttgagactgctgagaaacatgagaatggtaaaaaaaaaaaaaaaaaaaaaaaaaaaaaagacatgtaaatctagaaaaaacagcttctagacaatgtggaaactgttggcagtttttaaaaatgctaggattattatttctattatgaagagaaaattgagtataatgaataaattcctggtttccatagcaagttcaacttcttcatgctgggtataaataataaatatattgttgttactgaaaatgttttcagttatgccacatacattaaagactgataattacattaatgcaatattgaagttattaatacgaactttcaaagagattatttttcatgaaggccagga

SEQ ID NO: 550549 - DNA, 543 bp, Homo sapiens
ttttctttattacggtaaaccctgtgagagatggtggtggcttttattaggatgataggacatatgtaaggacatggtcagagtccatatgtgtttgaacatactaaaatatattttctgattaaataagtttgggagtgtgtgattgagaaaagtgaagtatcaagggcagcacaattaaattaggtttgacagttgctgctagtgtttccttaaacattttaatgctagcgctgccttttacaaaactgagaaacaggtggaggtttaatttaagtgatggcagaatcaatatttctgttttggctttttcagttttgagatgtttttcttgttgagccgtcaagtaagtaattattgataggagactagtgtttgaacgggaagtccccgtagaaaatacagcttttggaactgtctacatattaatgcaatttatgctctagaaacaaacctataagccttcttaaaacattttcaatcactgtttttatgtgacatgaaamagagaaaattctaatttctatttaatattttcctata

SEQ ID NO: 550550 - DNA, 1815 bp, Homo sapiens
tgctccgtatgtgtttcacatggccacccacacatctcttcattcggatggagactgaattaaaactccaactctaccttttccttgctctacgaccttgaccaagtcactaatctctttaagcctccagttctcctctttaagaggatagtaatgctttccttacagaactgatgtaaggctggcagataatgtatgtaaagcacttagcatggtacaaggcagatcatgagcatgtggtcattggtagttacagtcttaactattacaacaattaactattataacaattaagttaatagttataaccatttagtacctagccactgagtactaagcatgagctaggtcctatgcttggttcttcacatgaaagagaaattagtccaatataatccctgccctaaagaagcctctaatccaataaaagagcaaatcatatactaaataattacacaagtctgattggcatcatgctccaggagaggaatcacagtcctaaaataatccaaggcaggagcatttgctgtggatgtaggaaaggagaattaggctggacttttggatcttacacaggcaggagatggaggggtagaggtcaagcccatggactcaggatggtgcaaagagaagaggaccctactacccagagttccatttactagtaaattggagcacagcctacagcccagtaggaagatccatgcaatatccttatgccttttgtaagggtatgtccgtcttcaagacttgcagtggccaataatgggtcatgaaggtacctccctgaggtctcagacttcctgtgaaaacagaatttgtggaatcttatcagagaactttccaggatgccccagaggaagccaaagcacctatgtcaggtcttgtggcctcctgcattccatgaccacccacaagagcacattcaacaaacccatccttagcagtttcctcacaattacattattacccagacatgtacaaatcaatctccacacagatactttctagcggagaaggtcagtgaagcctttaaaaagaggttggcattgagctggatctcagtaggatttggggaagattctccaggaaaggggaagagcaaagcaaggcagagacagaggctggaacaayagaccacctctagatctgataagtgagcctattctgctggagcagagggcatctctgccagtgacaatggctcaagtttccaagtgctttaaaagtgtatcaggttctagactaagatctggaaggcattaactcatcaaaccctcacagactggatactgttatcttcccatttttctttttcttttttttttttttagacagagtctcactctgtcacccaggctgaagtgcagtggtgcaatctcggctcactgcaagctctgcctcccgggttcacgtctttctcctgcctcagcctcccgagtagctgggactacatgcgcccgccaccacgcctggctaatttttttttttttttttttgtatttttagtagagatggggtttcaccgtgttagccaggatggtctcaatctcctgacctcgtgatccacccacctcggcctcccaaagtgctgggattacaggagtgagccaccgcgccccgccatctccccgtttttcttaaaagaaagctgaggctcagtaagatcaatgattacctaaggctacggagataaagcctaaagcagaattcaaccctgactgaagtccaagctttaaccactaagcaatgttagtttccaatgagaaacgataggaaaaggagattagggtcagggcaggtcaccttgagtaa

SEQ ID NO: 550551 - DNA, 1815 bp, Homo sapiens
tgctccgtatgtgtttcacatggccacccacacatctcttcattcggatggagactgaattaaaactccaactctaccttttccttgctctacgaccttgaccaagtcactaatctctttaagcctccagttctcctctttaagaggatagtaatgctttccttacagaactgatgtaaggctggcagataatgtatgtaaagcacttagcatggtacaaggcagatcatgagcatgtggtcattggtagttacagtcttaactattacaacaattaactattataacaattaagttaatagttataaccatttagtacctagccactgagtactaagcatgagctaggtcctatgcttggttcttcacatgaaagagaaattagtccaatataatccctgccctaaagaagcctctaatccaataaaagagcaaatcatatactaaataattacacaagtctgattggcatcatgctccaggagaggaatcacagtcctaaaataatccaaggcaggagcatttgctgtggatgtaggaaaggagaattaggctggacttttggatcttacacaggcaggagatggaggggtagaggtcaagcccatggactcaggatggtgcaaagagaagaggaccctactacccagagttccatttactagtaaattggagcacagcctacagcccagtaggaagatccatgcaatatccttatgccttttgtaagggtatgtccgtcttcaagacttgcagtggccaataatgggtcatgaaggtacctccctgaggtctcagacttcctgtgaaaacagaatttgtggaatcttatcagagaactttccaggatgccccagaggaagccaaagcacctatgtcaggtcttgtggcctcctgcattccatgaccacccacaagagcacattcaacaaacccatccttagcagtttcctcacaattacattattacccagacatgtacaaatcaatctccacacagatactttctagcggagaaggtcagtgaagcctttaaaaagaggttggcattgagctggatctcagtaggatttggggaagattctccaggaaaggggaagagcaaagcaaggcagagacagaggctggaacaacagaccacctctagatctgataagtgagcctattctgctggagcagagggcatctctgccrgtgacaatggctcaagtttccaagtgctttaaaagtgtatcaggttctagactaagatctggaaggcattaactcatcaaaccctcacagactggatactgttatcttcccatttttctttttcttttttttttttttagacagagtctcactctgtcacccaggctgaagtgcagtggtgcaatctcggctcactgcaagctctgcctcccgggttcacgtctttctcctgcctcagcctcccgagtagctgggactacatgcgcccgccaccacgcctggctaatttttttttttttttttttgtatttttagtagagatggggtttcaccgtgttagccaggatggtctcaatctcctgacctcgtgatccacccacctcggcctcccaaagtgctgggattacaggagtgagccaccgcgccccgccatctccccgtttttcttaaaagaaagctgaggctcagtaagatcaatgattacctaaggctacggagataaagcctaaagcagaattcaaccctgactgaagtccaagctttaaccactaagcaatgttagtttccaatgagaaacgataggaaaaggagattagggtcagggcaggtcaccttgagtaa

SEQ ID NO: 550552 - DNA, 651 bp, Homo sapiens
tgatttgttatttttgcttttttgcatttgttaatgattttatagttggaagacttagaaatagatacaaaaactggctaagatgtattaccaaccttttggaactttaaaaatacatacacacatgcacgtaacaccccaaagtagaaggtgccatctgaattacaattgattgatgggtgtttaagtcagaaattactgtggggatatttaaaaaacaaaacaaaacaaaagaacccatgcatcttcttgcttcagaatgtgggtagtttttattytgatacattttcgcttttaaaaaaataaatgctaagaagaagtgccagcaaaatgctcgggtggcaattctcaaagagcagctaaaaaaccctgtcaagacctatagcaatgtatatttcacatgtggcttttatctgctcgctcattctaggaatacagagacaattagagttttggatcatttaatataacactttcttttggatttttaagatccattccttgtcttctggcatattagtaataggctaagttttgcatatgtgtatatatggtggtaatggggttggtgggatagaagaaaaggagaaaaagtcaagcatattacatttctttaaaaaaaccttgaatatatttttaaacatttcctga

SEQ ID NO: 550553 - DNA, 400 bp, Homo sapiens
aagccggggagtgtggagagatgggaaaccaagggatgggatattggagacagcaaagaggttcaaacgctggagatttaccagaggagtgtccagtctcaaagccccattatatcaagaaacaacayacaaagtagtttaaagctcaatgctaggagtaatggaaactagggttagatccgcagctcctctgcttactagctggccaggtggctggacttcatgagcctttgtttccttatctgtaaaatgggtataaaaaaaccaaccacctactaaggtgactgtgaggactaaatgacaaatatgtgctcaagacagcctggcagattaatactcaagaaacagaaccgttggctgggtgtggtggctcccctgtattcccagcaccttgggagac

SEQ ID NO: 550554 - DNA, 400 bp, Homo sapiens
aagccggggagtgtggagagatgggaaaccaagggatgggatattggagacagcaaagaggttcaaacgctggagatttaccagaggagtgtccagtctcaaagccccattatatcaagaaacaacatacaaagtagtttaaagctcaaygctaggagtaatggaaactagggttagatccgcagctcctctgcttactagctggccaggtggctggacttcatgagcctttgtttccttatctgtaaaatgggtataaaaaaaccaaccacctactaaggtgactgtgaggactaaatgacaaatatgtgctcaagacagcctggcagattaatactcaagaaacagaaccgttggctgggtgtggtggctcccctgtattcccagcaccttgggagac

SEQ ID NO: 550555 - DNA, 400 bp, Homo sapiens
aagccggggagtgtggagagatgggaaaccaagggatgggatattggagacagcaaagaggttcaaacgctggagatttaccagaggagtgtccagtctcaaagccccattatatcaagaaacaacatacaaagtagtttaaagctcaatgctrggagtaatggaaactagggttagatccgcagctcctctgcttactagctggccaggtggctggacttcatgagcctttgtttccttatctgtaaaatgggtataaaaaaaccaaccacctactaaggtgactgtgaggactaaatgacaaatatgtgctcaagacagcctggcagattaatactcaagaaacagaaccgttggctgggtgtggtggctcccctgtattcccagcaccttgggagac

SEQ ID NO: 550556 - DNA, 886 bp, Homo sapiens
agttgcaaaaccaaaaagtatttaagatgtccagacagcagcaattggaggtttccaggtttgggtcagagtgggaagtggtaactgagaactgatgggtcattagtgtgatcaagagaaagcaggtgcaaagaaaaggcagaagcaagtggccctggtacagccttaaagcaaataccacattaaagaaggcaaaattggcgtggaaactatcttcatggggtgataaccactcccaaacacatgcatgacccccctgccttttgtttctgaacacatggaaagattgatttgtccaactgagctgtgagttatgaacacatcctcatgcaagttgcttaactgctccctttttgcccataaagtacatcagcaccaatatgtgccatctcccctacagatctgctgtcagcaagttggaaaagttgccttagaaaccatcaggggacttacttatcttataaaatccatcaggagytgtggggaagaggaagatcaatcaacttgactgtaacttccaccgcggtaaagagtttatcatattaaatggatatatgcaacatatccaaaacacacacaagttatttggggggaggggtccttctcactttcacttcctcccccaacagctggcagtgataacttctccccacacttgctgtgtgtaaactttgaagactaaaatcttgtacagctctttagttgggtggaatttaaacagtgaccacccatggagccagtcaaactatcagctcaccaacaatacccccgtggtggtgttgcaaaccaaattcacattcctgattcaaaaacatgtcttcttaattaggatcagaatctgccagtctactcactggtgggaacatgcagtattaggcatccagga

SEQ ID NO: 550557 - DNA, 886 bp, Homo sapiens
agttgcaaaaccaaaaagtatttaagatgtccagacagcagcaattggaggtttccaggtttgggtcagagtgggaagtggtaactgagaactgatgggtcattagtgtgatcaagagaaagcaggtgcaaagaaaaggcagaagcaagtggccctggtacagccttaaagcaaataccacattaaagaaggcaaaattggcgtggaaactatcttcatggggtgataaccactcccaaacacatgcatgacccccctgccttttgtttctgaacacatggaaagattgatttgtccaactgagctgtgagttatgaacacatcctcatgcaagttgcttaactgctccctttttgcccataaagtacatcagcaccaatatgtgccatctcccctacagatctgctgtcagcaagttggaaaagttgccttagaaaccatcaggggacttacttatcttataaaatccatcaggagctgtggggaagaggaagatcaatcaacttgactgtaacttccaccgcggtaaagagtttatcatattaratggatatatgcaacatatccaaaacacacacaagttatttggggggaggggtccttctcactttcacttcctcccccaacagctggcagtgataacttctccccacacttgctgtgtgtaaactttgaagactaaaatcttgtacagctctttagttgggtggaatttaaacagtgaccacccatggagccagtcaaactatcagctcaccaacaatacccccgtggtggtgttgcaaaccaaattcacattcctgattcaaaaacatgtcttcttaattaggatcagaatctgccagtctactcactggtgggaacatgcagtattaggcatccagga

SEQ ID NO: 550558 - DNA, 886 bp, Homo sapiens
agttgcaaaaccaaaaagtatttaagatgtccagacagcagcaattggaggtttccaggtttgggtcagagtgggaagtggtaactgagaactgatgggtcattagtgtgatcaagagaaagcaggtgcaaagaaaaggcagaagcaagtggccctggtacagccttaaagcaaataccacattaaagaaggcaaaattggcgtggaaactatcttcatggggtgataaccactcccaaacacatgcatgacccccctgccttttgtttctgaacacatggaaagattgatttgtccaactgagctgtgagttatgaacacatcctcatgcaagttgcttaactgctccctttttgcccataaagtacatcagcaccaatatgtgccatctcccctacagatctgctgtcagcaagttggaaaagttgccttagaaaccatcaggggacttacttatcttataaaatccatcaggagctgtggggaagaggaagatcaatcaacttgactgtaacttccaccgcggtaaagagtttatcatattaaatggatatatgcaacatatccaaaacacacacaagttatttggggggaggggtcctyctcactttcacttcctcccccaacagctggcagtgataacttctccccacacttgctgtgtgtaaactttgaagactaaaatcttgtacagctctttagttgggtggaatttaaacagtgaccacccatggagccagtcaaactatcagctcaccaacaatacccccgtggtggtgttgcaaaccaaattcacattcctgattcaaaaacatgtcttcttaattaggatcagaatctgccagtctactcactggtgggaacatgcagtattaggcatccagga

SEQ ID NO: 550559 - DNA, 928 bp, Homo sapiens
ttttatgtaatatatgaccatctgagttcaagcaaatagaaatttctaaatgtcaatttataaagtattttataaacaaaagacacagccagaaagtctgctgaatttcaggaaatgttctctagactctaaaattgataaggcagtgtactattatagcattaattacagccatcagaatagaagaatatttctttaagactttctgaattaaaagaagtatggtcaacacaagcttctctgcttttatggtaagctgttatgtgatcatgaaatcaaatttcatgatcatataacagaagcatttttacaaccatttttctaatagtgttgcattgtttgcctcaaaatacttctaccgtgtggatcttccttttccttgtaggaaagggaagacctggggtccctgccagagcattggtgccagtaatggggtaggggggtctctaaagggcatgcagcaaaagacaaccaaaaccaactcctgtgtgactaggcaattctggactttaggtcccatctgaagcaaaaggctttcagttgaggatggatttaaaggcataggcaatttaactcacagacaagctaagaaagattcatggaaacaacagcgggcaagaaccagagtgcctttctatggttactactgcggctatgttcagaagctatatgggggtctatacagtcacaggctcgcataaaaatattcttcaattaataaatacactgggaagaatgkgtattacagtaaccataatttgtggttgcatgagtgctagaggcttgtaaagcttagaagaacagacacagagaaggctgaaatgagtatcatctttgctttcccaaagccagccaagtgtcagctagagcttttcacagctatgacaagctttctccagcccttgctggtgagacctaagactagtgc

SEQ ID NO: 550560 - DNA, 594 bp, Homo sapiens
aagagaataaattacaacagcagtgcaatttcattgtatactccacgtgttgcaataatgaaatacaagtagccctgtatcctagaattgtgtatctcactgcattgttcagtttattacaaccttgcctctgaaatttatttatcaagaagagcacattarctaaaagaagggaagagaaaatctctaggggcaatacatgatgctatacactagtgcatgtacacacacacacacacacacactttccaagaaaaagaacaaaagtattgtctggctaccatgagatccaaatgacggagcttcacatttcatgcaacggcacatagtcatggagaaggtacgtatgtggggagtatttgacttgatctcctatcaccccacagaggctgatagataccaaggcaaacattgcttctccaaactcagtgcggggggtgtactgagctgtttggctttattcatgatgtttattgattgttcttactaactttacatgtattgatcatctacgccctacacaaagggagtatacaccacacaaagttaaggtataatcatgatggattggcagcaattttttagcataagtgg

SEQ ID NO: 550561 - DNA, 993 bp, Homo sapiens
taaccacaatccaggatcaggcagctgccattgtcagtgctggttctgmattggccagacctacactagcaacacaggtgacctgggtgactccacctttattcccatttaactcgactctaactttgactcttccgcaaatacatctggatgatgggttctaatcatacccagaaacagtaaaggaggctgagaaaggtggattttaccttcctagcctctgcagttcaggaaggcaccaggaggaaggagggagagatgctaagcaagtcattctactgtatctgtcatagtctgcattcccacgggccatccatctgctggagctgagaagccctcttcagaagaagccaaggatcaagtcttccaactctcattagcactttgtatgttgttaatctgttacttctgtctgccagacagtatcccattgtgtgaatgtcccactttttaacctatccactctgccagcaatggaacccaaactgctctttgggcctcctgggaaaaacatatgcttggattctatgggattttgaggttgcatcacctgacttcagttgcatccactgtagaatggagataataacagtaataagcaacatgtatgaagcagttaccattaattcaggctctcttttaaatgctgtccgtatactacttcatgtaacacactcctcatggaattatcatgaggattaaattaagtaaagtagttagataatggtgactgcctgatcctggattggggttaagttcgtaggagtctggagtcagcagttgagatacccttttggctagctgatctgggtgctgttctggtgccatttgtaggggcccagcctagagcccgctcctccagcatttccattaattttttataaaagtgcaatatcctgtcatcttttatagcttatatagctagtatttttatttttattttttaattctttgttttgttttgttttgttttttgtttttttgagacggagt

SEQ ID NO: 550562 - DNA, 993 bp, Homo sapiens
taaccacaatccaggatcaggcagctgccattgtcagtgctggttctgcattggccagacctacactagcaacacaggtgacctgggtgactccacctttattcccatttaactcgactctaactttgactcttccgcaaatacatctggatgatgggttctaatcatacccagaaacagtaaaggaggctgagaaaggtggattttaccttcctagcctctgcagttcaggaaggcaccaggaggaaggagggagagatgctaagcaagtcattctactgtatctgtcatagtctgcattcccacgggccatccatctgctggagctgagaagccctcttcagaagaagccaaggatcaagtcttccaactctcattagcactttgtatgttgttaatctgttacttctgtctgccagacagtatcccattgtgtgaatgtcccactttttaacctatccactctgccagcaatggaacccaaactgctctttgggcctcctgggaaaaacatatgcttggattctatgggattttgaggttgcatcacctgacttcagttgcatccactgtagaatggagataataacagtaataagcaacatgtatgaagcagttaccattaattcaggctctcttttaaatgctgtccgtatactacttcatgtaacacactcctcatggaattatcatgaggattaaattaagtaaagtagttagataatggtgactgcctgatcctggattggggttaagttcgtaggagtctggagtcagcagttgagatacccttttggctagctgatctgggtgctgttctggtgccatttgtaggggcccagcctagagcccgctcctccagcatttccattaattttttataaamgtgcaatatcctgtcatcttttatagcttatatagctagtatttttatttttattttttaattctttgttttgttttgttttgttttttgtttttttgagacggagt

SEQ ID NO: 550563 - DNA, 1506 bp, Homo sapiens
tatttattcagtcagaggctgctgtacaaagagtaaaggggtattgattcagatattcagagaggttgcactttttttttytgtagacagagagatagggacagagagacactagttgtccaggctggcctcaaactcctgggcttcaacaatcctcttgcctaagcctccagggagtagctggaactacaggtgggtgccactatgcctggctcagacagatggcttttcaagttcattcccatggcccttgaccatgggataggggagccaagaccatctatttgaaatcttccaactacatatttgctttgcaatattaatgtcaagtgaggatatctagtcttggttgactgtgcctcaaaaggctgctgactagaagcttctgattctaattccagggtcagaataggacatacttttccaatgagcctccaagtgccctgaaattaccccagttaacagaggggagaagggaaaaggagaagacagaaaagaacgaccctacctgaattgttcatgaagcatgctcgatgtaacttgccactgtagaactccaaaccaatgatagcaaacatcaggatggcaaagaagagcagaaggccaatctgcagaagaggtaccatggccttcatgatggacttcaacacaatctgcaggcctagaaggaaggacagagaatgaccaatgcagctgtccctcagcaccatctgataggggaggattagtttcattccctcattggtttcatccatgctgccgtctgcctctgatagattaaatttattagaatgtgctcctttcctaaaggaaattaggcccagctctgctaggctgtaaatccttcaagagctgggataaagttcatcttcccattcactctatctcagacccagttctcagtctctgttggggaagcacaattagtacaagcactattcagaaaatgccatatcctttgacccacacattgcatttctaggattctagccaagaaaacagtcagagatttgaataaagatttaagtaaaaaggtgtttgttgcagcacatttatagttggagaaaaactggaaatagcctatttttattttttatgccatccagcaacataaaacataaaaatggctaaataaatcataacacatataagaatttttttgttttgagacagagtgtcggtctgtcgccaaggctggagtgcagtggcgtgatcttggctcactgcagccttggcctcccaggcccaagtgatcctcccacctcagcttcctgagtagctgggactacaggagtgagctgccatgctcagctacattttttttacttttttctattttttgtggagatggggtttcaccatgttgcccagactggtctcaaactcttcctgaactcaagcaatccacccacctcagcctcccaagtgctaggattacaggtgtgagccactgcactcagccaagaatttttaaggttaggaaaataaaatacttatttcaggata

SEQ ID NO: 550564 - DNA, 666 bp, Homo sapiens
taagatttggctgtttgaaaattgactcatatttggccttaccagaggaaatccaatatcacacagtaaatttcaccactttttttaagcaggaaaatatcaagttggaaaggtgaagtgacactgaaaaatggattgcagaaaaatcctctcataatgggaggaagggagagcagataatgagggatcctgattaaacacaacgctactacccagcagtgaagtgaagcacaaagtgtgcagagaaaatcagatcctgacagccagttctgcactgtgcctataatatcaatggaaaaaacctcagatgtaatccttggttggttgttcctacttcatttcctgaacaaataattcagtactcctttattatacactggttgcttaatcagaaacttggttccaraacaaccaagagaaataggaacattgccctcacacacagatcacaatgcacagggctcctgtcacatgagtaaaaatcatgcacagttaaaaatggactttctttcccctgtctttcatgtcacaggcttcatattgatggggaagctgcctattaggggaatagatgacttctcatgtgtattaatgaaagcaatgtattgcaggctgggtagctggtagaaatgttgtgggcgtttgtaagtggaagatttacgccat

SEQ ID NO: 550565 - DNA, 1490 bp, Homo sapiens
ctaaatctaattgtaaaacaacactaacaaaaacaaatggagggatgttttcagggtccaggaagtcgtgtaaacaagtgtaaggcaattgagagcaagagggaagcaacaaactgggcagtgaataacttgcctaaaggaattcaaattcaattaaagaaatttgacgggtgaaattaatcctctgatgaaaacaagactagcaatagccaatgtttatcatgaacttactctgtgtcaggcaacacagtggagaggttctagtgtggactctggaaatagatttctgggcctgagtcctggctttactccctgttaggggtgagactgatcacaacattacacctctctgagcctcagttgcctcacttgaaaaatggaaataataataacatctgccttataggatttttctgaggattcaaaggctgagtacatggaaaatacataaaatagtgcctggcacatggaatataactcctccccccgaaaaaacaagttaattggaccaaaacaagttaagactaaatcttaatttctactgctttttaaatgctgctgtcttccatagataccaaaactttatgaaaaacactatattataacacaaaaattattcaaaaatatgctctgttctcagtgagtttgtagtcccctggaagggataagatacacctatgaacaaggacactaatagtcacataataaaggaagagatgcttcatgtatagaaatgataggaggtcaatttgagttgaaggtaaagaatctattcatgaagaagtgggattggagctggcccttgacatgttcgcgcgtgtgtgtgtgtgtgtaacctactcatatgtgtaacctactcatatatatatatatgagtatatgtatgtatatatgtatatacatatatatgcatatatatacacacatatatgagtaggttatgtatttctaattcattggctatttctaatatatttctaattcattggctattaacaagagatggttattaacaattcactggttattaacaagagatgcttctggtatggaaatgataggaggccaatttgagttgaagataaagaatctattcatgaaggaatggcattggatctggcccttgacatatgtttgtgtgtgtgtgggkgtgtgtgtgtgtgtgtgtgcatatatatgtaggttgtaatgaatgagtgttgtagaattcatctgttccaatgcgcatatttctcagggcaagattggttaataattaaagaatctattatttatcaatttgccctgaatgccaaattcaagatctatattggtgcttagatttcaaaacttcacctcattgtctaaattctgcgagtttggccagtctagtatacagtcacaagttgatactcctgggaaggaattcaatttttttaaattatgaaagtgaaatacgtttattgtataaaaatgaacagtagttaattgcactgactgcaattaaaaat

SEQ ID NO: 550566 - DNA, 1490 bp, Homo sapiens
ctaaatctaattgtaaaacaacactaacaaaaacaaatggagggatgttttcagggtccaggaagtcgtgtaaacaagtgtaaggcaattgagagcaagagggaagcaacaaactgggcagtgaataacttgcctaaaggaattcaaattcaattaaagaaatttgacgggtgaaattaatcctctgatgaaaacaagactagcaatagccaatgtttatcatgaacttactctgtgtcaggcaacacagtggagaggttctagtgtggactctggaaatagatttctgggcctgagtcctggctttactccctgttaggggtgagactgatcacaacattacacctctctgagcctcagttgcctcacttgaaaaatggaaataataataacatctgccttataggatttttctgaggattcaaaggctgagtacatggaaaatacataaaatagtgcctggcacatggaatataactcctccccccgaaaaaacaagttaattggaccaaaacaagttaagactaaatcttaatttctactgctttttaaatgctgctgtcttccatagataccaaaactttatgaaaaacactatattataacacaaaaattattcaaaaatatgctctgttctcagtgagtttgtagtcccctggaagggataagatacacctatgaacaaggacactaatagtcacataataaaggaagagatgcttcatgtatagaaatgataggaggtcaatttgagttgaaggtaaagaatctattcatgaagaagtgggattggagctggcccttgacatgttcgcgcgtgtgtgtgtgtgtgtaacctactcatatgtgtaacctactcatatatatatatatgagtatatgtatgtatatatgtatatacatatatatgcatatatatacacacatatatgagtaggttatgtatttctaattcattggctatttctaatatatttctaattcattggctattaacaagagatggttattaacaattcactggttattaacaagagatgcttctggtatggaaatgataggaggccaatttgagttgaagataaagaatctattcatgaaggaatggcattggatctggcccttgacatatgtttgtgtgtgtgtgggtgtgtgtgtgtgygtgtgtgcatatatatgtaggttgtaatgaatgagtgttgtagaattcatctgttccaatgcgcatatttctcagggcaagattggttaataattaaagaatctattatttatcaatttgccctgaatgccaaattcaagatctatattggtgcttagatttcaaaacttcacctcattgtctaaattctgcgagtttggccagtctagtatacagtcacaagttgatactcctgggaaggaattcaatttttttaaattatgaaagtgaaatacgtttattgtataaaaatgaacagtagttaattgcactgactgcaattaaaaat

SEQ ID NO: 550567 - DNA, 527 bp, Homo sapiens
tgacaaaaaaaagagcatctaacatgtttcagactaactctcttactggtgatggacttttagctgaatcactggcttctgcacgtggtcttgaccattccccttcttccttgggatgactgcgttattagttgattccctggggtgtggcctaggccatggagctttgctgggggaggttgcagggtatcgtaggacaggcactggactggggaaagcaagaactgggttttggtcttatctgcacaaatgggctgcaggaatctgttagttaggactctctgggcaccaataacataaaattcagcctaaactggcttaagtaggaatagaaaatttaataacttatgtaagtgaagaagatcagggggtgaagcaggctycaggagctgccggagggaagcattccgtgatgtggaggtggctggccggtcaccgagagctcaggctccttctgttatggtgtaggctgttgcttagaagcagctggcctgccagccaggaactacatttcctagcacctcttg

SEQ ID NO: 550568 - DNA, 1098 bp, Homo sapiens
caaggttcatccatattgcagcatgtgtgagaatctccatgctttttaaggctgattcatattccattctgyggataggccacattttgtctatttattcagctgatgatagacacttgggttgcttccaccttttagctattgatgatgttaacataggggtacaaagatttcttcaccacccggctttcaattctttgggtatatacctagaaatagaaccgctgcatcatgtggtcattttaattttttgaagctatatttaatagtttcctaaattatctagaatgtgtttaattagtaattataataaaactattggaaaagattaaaatcatggactgtgattacttctatttccttgttaaatgtcttcactttagttctcctgggatggagaaacagggatacaaggaggtaaaatcctttacatgttggagagaggttagtaactctaacctgaaaactcgaagaatttttttgaataatgctccaaaagctgaaacttttcaccaatgtaacactcaacggaaatgctcatcgtggatttctgatttgagatgctcaactggtaagtataatgcaaatattccaaaatctgacaaatgtgaaatctgaaacacttctggtcccaagcatttcagacagggttatttaacctgtattatcaatgataaattgtgcaagaatctctagccaattttgaggctatcttagcttagagacaataccttcacaaactcttacttctttttttttttatatcctggaactgctgtatgccagccagccttgcagttttaatgtatacacacaggccacacatgtacccagtgtaggatccaggcctcatcaagcttgtgcctctggttctgtgcaggagcctcactcttaaagacactcattttgctgaatgactgacagtaggataacgaaaagaacttgaacttgttttgttccggtcttctggaacaaaacactctaattagcaatatcaccataaactatgcaaaactatacagttagcgcaggtttcaactagagacagtcaagtgtctttgcccacgtctgaaggttctgtagtataaaggcccatac

SEQ ID NO: 550569 - DNA, 1098 bp, Homo sapiens
caaggttcatccatattgcagcatgtgtgagaatctccatgctttttaaggctgattcatattccattctgcggataggccacattttgtytatttattcagctgatgatagacacttgggttgcttccaccttttagctattgatgatgttaacataggggtacaaagatttcttcaccacccggctttcaattctttgggtatatacctagaaatagaaccgctgcatcatgtggtcattttaattttttgaagctatatttaatagtttcctaaattatctagaatgtgtttaattagtaattataataaaactattggaaaagattaaaatcatggactgtgattacttctatttccttgttaaatgtcttcactttagttctcctgggatggagaaacagggatacaaggaggtaaaatcctttacatgttggagagaggttagtaactctaacctgaaaactcgaagaatttttttgaataatgctccaaaagctgaaacttttcaccaatgtaacactcaacggaaatgctcatcgtggatttctgatttgagatgctcaactggtaagtataatgcaaatattccaaaatctgacaaatgtgaaatctgaaacacttctggtcccaagcatttcagacagggttatttaacctgtattatcaatgataaattgtgcaagaatctctagccaattttgaggctatcttagcttagagacaataccttcacaaactcttacttctttttttttttatatcctggaactgctgtatgccagccagccttgcagttttaatgtatacacacaggccacacatgtacccagtgtaggatccaggcctcatcaagcttgtgcctctggttctgtgcaggagcctcactcttaaagacactcattttgctgaatgactgacagtaggataacgaaaagaacttgaacttgttttgttccggtcttctggaacaaaacactctaattagcaatatcaccataaactatgcaaaactatacagttagcgcaggtttcaactagagacagtcaagtgtctttgcccacgtctgaaggttctgtagtataaaggcccatac

SEQ ID NO: 550570 - DNA, 1098 bp, Homo sapiens
caaggttcatccatattgcagcatgtgtgagaatctccatgctttttaaggctgattcatattccattctgcggataggccacattttgtctatttattcagctgatgatagacacttgggttgcttccaccttttagctattgatgatgttaacataggggtacaaagatttcttcaccacccggctttcaattctttgggtatatacctagaaawagaaccgctgcatcatgtggtcattttaattttttgaagctatatttaatagtttcctaaattatctagaatgtgtttaattagtaattataataaaactattggaaaagattaaaatcatggactgtgattacttctatttccttgttaaatgtcttcactttagttctcctgggatggagaaacagggatacaaggaggtaaaatcctttacatgttggagagaggttagtaactctaacctgaaaactcgaagaatttttttgaataatgctccaaaagctgaaacttttcaccaatgtaacactcaacggaaatgctcatcgtggatttctgatttgagatgctcaactggtaagtataatgcaaatattccaaaatctgacaaatgtgaaatctgaaacacttctggtcccaagcatttcagacagggttatttaacctgtattatcaatgataaattgtgcaagaatctctagccaattttgaggctatcttagcttagagacaataccttcacaaactcttacttctttttttttttatatcctggaactgctgtatgccagccagccttgcagttttaatgtatacacacaggccacacatgtacccagtgtaggatccaggcctcatcaagcttgtgcctctggttctgtgcaggagcctcactcttaaagacactcattttgctgaatgactgacagtaggataacgaaaagaacttgaacttgttttgttccggtcttctggaacaaaacactctaattagcaatatcaccataaactatgcaaaactatacagttagcgcaggtttcaactagagacagtcaagtgtctttgcccacgtctgaaggttctgtagtataaaggcccatac

SEQ ID NO: 550571 - DNA, 1098 bp, Homo sapiens
caaggttcatccatattgcagcatgtgtgagaatctccatgctttttaaggctgattcatattccattctgcggataggccacattttgtctatttattcagctgatgatagacacttgggttgcttccaccttttagctattgatgatgttaacataggggtacaaagatttcttcaccacccggctttcaattctttgggtatatacctagaaatagaaccgctgcatcatgtggtcattttaattttttgaagctatatttaatagtttcctaaattatctagaatgtgtttaattagtaattataataaaactattggaaaagattaaaatcatggactgtgattacttctatttccttgttaaatgtcttcactttagttctcctgggatggagaaacagggatacaaggaggtaaaatcctttacatgttggagagaggttagtaactctaacctgaaaactcgaagaatttttttgaataatgctccaaaagctgaaacttttcaccaatgtaacactcaacggaaatgctcatcgtggatttctgatttgagatgctcaactggtaagtataatgcaaatattccaaaatctgacaaatgtgaaatctgaaacacttctggtcccaagcatttcagacagggttatttaacctgtattatcaatgataaattgtgcaagaatctctagccaattttgaggctatcttagcttagagacaataccttcacaaactcttacttctttttttttttatatcctggaactgctgtatgccagccagccttgcagttttaatgtatacacacaggccacacatgtacccagtgtaggatccaggcctcatcaagcttgtgcctctggttctgtgcaggagcctcactcttaaagacactcattttgctgaatgactgacagtaggataacgaaaagaacttgaacttgttttgttccggtcttctggaacaaaacactctaattagcaatatcaccataaactatgcaaaactatacagttagcgcaggtttcaactagagacagtcaagtgtctttgcccacgtctgaaggttctgtagtmtaaaggcccatac

SEQ ID NO: 550572 - DNA, 600 bp, Homo sapiens
tacaagaaaataccctattcctgtaatgcattctcagtactcacatatccaaaattctgtgctcctcttggaattccagcaaccaattctggggatgaaaatagccatttagaaggggaattactcacacacacaaacacacacacacacgccatatactaaaagtggtaaagacagtgcttgtaaaatgagtggctatcatacagagcaggggtccccaagccccaggccatcaaccagcacctgtctgtggcctgttgggagcccggccacacacacagtaggaggtgagcctcaggcgagccagaacgaagcttcatctgtatttacagacactccccttgcttacattacagcctgagcactgcctcctgtctgatcagcggtggcattaygttctcaccagagtgagaaccctattgtgaactgtgcacacaggggatctaggttgcacgcctcttgagaatctaactaatgcctgatgatctgaggtgaaacagtttcatcccaaaaccatccctcacccccacatctgtgaaaccagtccctggtaccaaaacggttgcggattgctgatgtagagggttggaagtttgaagc

SEQ ID NO: 550573 - DNA, 636 bp, Homo sapiens
agtgtagtggcatgatcatcatggctcactgcagcctcaacctcctgggctcaagccatccttctacctcagcttcctgaayagctgggaccacaggtacatgccactgtgcctggctagtttttgtatattttgtagagacagggtctcactatgttgcccaggctggtctcaaactcctgggttcaagccatccacctgcttcggcctcctagagtgctgggattacaggcctgagccactgtacatggccagaaggtttttaataatcaatataatcaggaaaaatttagatccttgacctaggaacacatgacttgagtagcatcctgactagtgagaagcaaaaatatttccttcatttgcagcttagaaaggttctatcaccattgaactcatagttggtgagtagtacaagtcaaaaattgacagcaaagtcaacattctttccaacacatcaaattacattcctggaattggttaggaacagattactttcttgggttttagctcactacacctcactctaaagtgacaacaaaggctcttaaccttttttgagtcatgaacgtgtatgaaaattggaagaaagctatggatcctctcacaagaaaaattatacacaattaaatattg

SEQ ID NO: 550574 - DNA, 681 bp, Homo sapiens
taaatatttaataaacctttagttaataaatgactgatgattaacattctgaaatgaaaagaacaaaaatatccatttagatctttgtagtgccttttcatattaactctttgaaatttcaaatctcagcatgtcttggaaaattgtataaagtactttcagttttcaaacttctttcatgtatgtaatattattttgagctgcgctaatattacccatggcaaacgaaggtgctagatccctgggggccttgacaatttcaagaaacatccccaggccatactttagttctataggattgctcaccaaaattartggagcagatctttacagaaatctaagactgtggtgtgaccttgccaaattggtgtcaggtgctcaagatggaaaactgaaggaaatttaaatcttgaacataaatttcttagtcttaaaaagggataaaacagcatacataagtctaccatactgaattttccagatattaatgtttaatgcttaatctctctgcatagctcaggaactattgaatgaattaatatttctaatgcacctaaaagtactttgattaaagatattagagaaatacaaaaatctgaacttctaataagatgatagaattgtctaaaatatgaaaagcattcatcaattgagagtatagaaattttaaaaagatagtac

SEQ ID NO: 550575 - DNA, 633 bp, Homo sapiens
tcgttttccttggtgatttccacttttcctgcatatattttgccccccagtccactctccacatgccacttccgtaatcacttgcgatggaaacccacacaaagccctgagctacactgacactttgggagaaccttgaaaataaagcagccacatcactcacgtctatcaataagttcctcarttggcaaatatttttataaaacatagacacacttgccatctcaatgatgcagctgagcacatgaacacttgggtgagtcaaaatgattattaattattattcatatgctcatcaattccaccagcattgatcagtgggccaatctagttatgacaccaaaatggagacccaagaaatagaaaggaggtgaagagcaaccttctcgcaatctagtaatagaaaaatcccatgtatacaaaacaatcaggaaaaaaatctcacggtaagaaataagtaactagggtgtcatttagaggtgccaggcagttgaaattaagtgaggaatctgagtgagcttacttaaccctaaaagaatcaagaataaaactagaagtggctagagttgttctgattttgttttctgaaaagcatgattatatatcttatctgttttcagtaaagaatagtca

SEQ ID NO: 550576 - DNA, 559 bp, Homo sapiens
agaaaggaaactcaagctaagcatattgcctaaggtcactggacaaagaggtgacagaggcaagaaaacccctcaggtcttctgaccccagtgcactgctctttctgttaggccaagctatggtctcagtaatgagactaaaatttaaaccttggataccctttgagaatgtacctctgaaaaagatgtggacatacttttcaactatctaaagacaataatgtttgattagtaaatctcctcccctccttgactttatctcattggaggttttatttaagaagcaggttgtcccaattcttgtgcatatcagagactgaagatgtactgattaccttcctgcccycttactgcctgccatgtgccctcacctcccccttcaccttactcacatcttgccgtatttggttccaattctatcctcacagaccttatgaaaatgcaatggcagcgaataaggaaagggaagaatagttagaatggagaagatgagagaggctgtgctttcttcctccttattgtttgagggatacaggagtgtaagtcatctcttcgtctt

SEQ ID NO: 550577 - DNA, 559 bp, Homo sapiens
agaaaggaaactcaagctaagcatattgcctaaggtcactggacaaagaggtgacagaggcaagaaaacccctcaggtcttctgaccccagtgcactgctctttctgttaggccaagctatggtctcagtaatgagactaaaatttaaaccttggataccctttgagaatgtacctctgaaaaagatgtggacatacttttcaactatctaaagacaataatgtttgattagtaaatctcctcccctccttgactttatctcattggaggttttatttaagaagcaggttgtcccaattcttgtgcatatcagagactgaagatgtactgattaccttcctgccctcttactgcctgccatgtgccctcacctcccccttcacyttactcacatcttgccgtatttggttccaattctatcctcacagaccttatgaaaatgcaatggcagcgaataaggaaagggaagaatagttagaatggagaagatgagagaggctgtgctttcttcctccttattgtttgagggatacaggagtgtaagtcatctcttcgtctt

SEQ ID NO: 550578 - DNA, 612 bp, Homo sapiens
ggctcactgcaagctccgcctcccgggttcacgccattctcctgcctcagcctcccgagtagccgggaccacaggcgcccgccaccacgcccggctaattttttgtatttttagtagaggcggggtttcaccgcgttagccaggatggtctcgatctcctgatctcatgatccgcccgcctctgcctcccaaagggctgggattacaggcgtgagccaccgcgcccggcctcatcaagcctatttctaactctcatcactctcactagatgaccttgcctttgtcactagatgacaaaaacagaggccaacaggcatgaactttaccttcaaacctttacatgcagttcatccatattcacagccatcctaacygcctttcctcctgtctgcaggaagaaaattgtctctctcttatttgttcaaagctatttgctcaaaccaccccatattactgtcctctcttattctttatagataacagaagagctacattcactctattttcttgacttcatttgctaaactgtaatacttggctttcacgtcctacctttttacaatgccctaaaatgttgctattttatcatcttgagtacctggctcccattta

SEQ ID NO: 550579 - DNA, 1263 bp, Homo sapiens
  misc_feature 708, 738, 750: n = A,T,C or G
gctactcaagggaaatttattgaataaaaatagatgacaaggaatagacaacctgaaaacatgtctctttcttggatcacataagccttttataaaggatgctaataaaatgtatccataatatgtcagaacaattatttaacttgactatcaaagaactagaaactgaagtagagtaattacaattaattcagtggctgtagtttttttttttaacagggacttaaatcattaagaaattaaagttggcaataatttgttttgtactgggagccctataagaaatatctgagaaaaatgaaatctgtgaaagattaataaaaaacaagaggaaggcagttggatttacatgacttaatgtcagtaaaatacattgtcctcattgacaccagtcagatattttctagcagtgaaaataggttgtatcaactatctattaacatatgaggtaggctttaaaacaattaaattagtttttaaccaaatatctggttctttcacattggatagacatgttgtttatttaatttgaaacttagagacttaatggtgagcattttaattttttaggggaaaacatactttattatgtagtcattaactattttattagacttttttattattttgaaggaaggatttattatattttactcaaagatagaacttttggtttttaaattagtaagaaaaaggacctgatttttncaagtataccagaaagttaaaatttaaatnaaactaataaanaaacaaacaaaaatttttttagaataatttgtaaatcttctaatgaaactcattagaaaaaaaggtggcatagtcaacagacttttttccatgttactactttaagtgagaatgtctgtgtawgcatatatttaatatgtatgcaatttaatacattaaatattagtatacagttttaatatattatgcatactttaaatacatataaaaattataattctaatttgaaaaattattatatgccttttcatgtgtcagagattcacaactggattatgaaataaaccaacgataatccaaattaatttgctcaagaagcagcattaagcacaaatatttctttttttttattattatactttaagttttagggtacacgtgcacaatgtgcaggttagttacatatgtatacatgtgacatgctggtgtgctgcacccattaactcgtcatctagcattaggtatatctcctaatgctatccctccccccaccgccaccccacaacagtcccc

SEQ ID NO: 550580 - DNA, 1263 bp, Homo sapiens
  misc_feature 708, 738, 750: n = A,T,C or G
gctactcaagggaaatttattgaataaaaatagatgacaaggaatagacaacctgaaaacatgtctctttcttggatcacataagccttttataaaggatgctaataaaatgtatccataatatgtcagaacaattatttaacttgactatcaaagaactagaaactgaagtagagtaattacaattaattcagtggctgtagtttttttttttaacagggacttaaatcattaagaaattaaagttggcaataatttgttttgtactgggagccctataagaaatatctgagaaaaatgaaatctgtgaaagattaataaaaaacaagaggaaggcagttggatttacatgacttaatgtcagtaaaatacattgtcctcattgacaccagtcagatattttctagcagtgaaaataggttgtatcaactatctattaacatatgaggtaggctttaaaacaattaaattagtttttaaccaaatatctggttctttcacattggatagacatgttgtttatttaatttgaaacttagagacttaatggtgagcattttaattttttaggggaaaacatactttattatgtagtcattaactattttattagacttttttattattttgaaggaaggatttattatattttactcaaagatagaacttttggtttttaaattagtaagaaaaaggacctgatttttncaagtataccagaaagttaaaatttaaatnaaactaataaanaaacaaacaaaaatttttttagaataatttgtaaatcttctaatgaaactcattagaaaaaaaggtggcatagtcaacagacttttttccatgttactactttaagtgagaatgtctgtgtaagcatatatttaatatgtatgcaatttaatayattaaatattagtatacagttttaatatattatgcatactttaaatacatataaaaattataattctaatttgaaaaattattatatgccttttcatgtgtcagagattcacaactggattatgaaataaaccaacgataatccaaattaatttgctcaagaagcagcattaagcacaaatatttctttttttttattattatactttaagttttagggtacacgtgcacaatgtgcaggttagttacatatgtatacatgtgacatgctggtgtgctgcacccattaactcgtcatctagcattaggtatatctcctaatgctatccctccccccaccgccaccccacaacagtcccc

SEQ ID NO: 550581 - DNA, 1263 bp, Homo sapiens
  misc_feature 708, 738, 750: n = A,T,C or G
gctactcaagggaaatttattgaataaaaatagatgacaaggaatagacaacctgaaaacatgtctctttcttggatcacataagccttttataaaggatgctaataaaatgtatccataatatgtcagaacaattatttaacttgactatcaaagaactagaaactgaagtagagtaattacaattaattcagtggctgtagtttttttttttaacagggacttaaatcattaagaaattaaagttggcaataatttgttttgtactgggagccctataagaaatatctgagaaaaatgaaatctgtgaaagattaataaaaaacaagaggaaggcagttggatttacatgacttaatgtcagtaaaatacattgtcctcattgacaccagtcagatattttctagcagtgaaaataggttgtatcaactatctattaacatatgaggtaggctttaaaacaattaaattagtttttaaccaaatatctggttctttcacattggatagacatgttgtttatttaatttgaaacttagagacttaatggtgagcattttaattttttaggggaaaacatactttattatgtagtcattaactattttattagacttttttattattttgaaggaaggatttattatattttactcaaagatagaacttttggtttttaaattagtaagaaaaaggacctgatttttncaagtataccagaaagttaaaatttaaatnaaactaataaanaaacaaacaaaaatttttttagaataatttgtaaatcttctaatgaaactcattagaaaaaaaggtggcatagtcaacagacttttttccatgttactactttaagtgagaatgtctgtgtaagcatatatttaatatgtatgcaatttaatacattaaatattagtatacagttttaatatattatgcatactttaaatacatataaaaattataattctaatttgaaaaattattatatgccttttcatgtgtcagagattcacaactggattatgaaataaaccaacgataatccaaattaatttgctcaagaagcagcattaagcacaaatatttctttttttttmttattatactttaagttttagggtacacgtgcacaatgtgcaggttagttacatatgtatacatgtgacatgctggtgtgctgcacccattaactcgtcatctagcattaggtatatctcctaatgctatccctccccccaccgccaccccacaacagtcccc

SEQ ID NO: 550582 - DNA, 2825 bp, Homo sapiens
tgcattaattcaaatgaaatagaacttctaatgctcaagaatattcttatcagctggtcagtatatcttcactttagcaataaagctttatgtggagcaatatcatcagaatattgcttcatgagcaagagcaaccaggaagatgatcataatagggttaaaagattgcaatggtctgaggtagccacaagagatatacgtccctctccttggatagccctgaaactactcttgtgtgttcttgctgttttattatccttttggtggactctatatagaatttctgccttcactcagcatattgttatttatcttccaaaatgctaaaacaaggtagattagattgtctttcttgtatatcagtagtattgtattaatgccttctaaagtttattcataagttccttgactacatttcagcaatgtgttttttattctaatttcatttaggaagggtttttctcatggcaatgaactgtgtattagcatggggatgttagttgctgtttttgcaaatagctgatttcatatgttacagttttaagtccaattatcttaaattattatgaaactgttaaatataatttaacatgaacctgtgtgtgtagtatgttttgtaataaagcaaaatggtttaaaatgtacaaaaatatatacagaaaaaaatgaatagaatacttcatgttttgagccataattttcaataagcataatctatataatctgtatttggtacaaacaactatctggtacaaatagttaaaaaatgagatatatattacaattttaaatacttgtactaaacactttgytattacatagacccaccaatttttatgcaaatacttaccaaaaaattaccatagctatttattatgatgtttaaaaattttacttactaacattaactcataaaaacagcagcctctgatgagtaatgtgctagttttgctgccttttaaaattatctttacatagaaatattaggtcttttaacaagatacgctcttctttttttggctctgaaaccaaagcattaacaaatttcgagattggacaaaaaataatttatcattaattactttttaaatagtaatttttaattagcaataattatttttctgtgaactaatactgatagattgtgcatatatctgttagaaatgtgtagaaatatataattttatcttgaattattactttagttattaattttatttattattgctattataattattatttattgttatcaagagagaagtgtgaattacaataacctttttaaaaaatgatttgacatacctattaaaatttaaaatatgcatttcttttgacctagcaatcccacttttagaaatatgtttttcagaaataaaagcttcagtatattagaatacgtgtacaaagaagttcagtgaatatatgatttattattttaaaaataacaatctgaaagttatctgatacatcaaaggatgggatatcatggaatcatttctttttaatttttaattgtaatttttaatggttcatagtaggtgtatatatttatgtggtacatgagatactttgatataggcacacaatgcgtagtaatcacatcatgtaaaatgtggtactcatctgctcaagcatctatcctttgtgttacaaacaatccagttatactcttttgattattttaaaatgtacaattaacttattaatgactatcatcaccctgttgtgctctcaaatactaggtcttattcattctttctttttttttgtacccattatccaaactcacttctccccctctaccctaccactacttttcccagcctctggtaatcatcgttctactctttatctctattagtttatttgctttaatttttagatcccacaagtaagtgagaacttgtaatatttgtctttctgtgcctgccttatttcacttagcataatgacctccagttctattcgtgttgttgcaaatgacaggatctaattttttgtatgtctgaatagtactccactatgtataagtaccacattttcattattcattcatctactgatggatacttaggttgcttccaaattttggctattgcaaacagtgctgcaacaaacgtgggagttcaaatatctctcaatatactgatttgtttaaatcataaactatatccaagggtagtaacttggcaaaatatgtaaaatacaaatcactgtgcattgcttttattttgttaaaaagtaaagaggtatgtgaatagatatcccccaattcagtaaatatcccaccattacatacaaatatatgtaaatatatatgtatacatacacacattccgtgggttaagtgaaaggcagaatatgatatacataaaattgttaatatatttacttataaatgtagattggaaggggtatgtgaggagaaactattagttgtcctcatgtagctctatatttggtcaatttgtttcaataagcaagtattttacttttttaagttaaaagagtaatttattaataaattcaattgttatgtctttcaggtttttgttttcatttctcatttaaatgttcttggacttagttgtatttaatgccaattttcatgacagctcaaaatcattggtagactttgttgatcatcctgaagccactccaaacatatatagtcctgtaaatttttgttgttttattgctttcaaggtggaaattggttcaattctttgacactattttattcatatcctgtcttctcttatcaagatatacttactgggagagcaaggcaagagcgaatattttaggcattgatttgggag

SEQ ID NO: 550583 - DNA, 2825 bp, Homo sapiens
tgcattaattcaaatgaaatagaacttctaatgctcaagaatattcttatcagctggtcagtatatcttcactttagcaataaagctttatgtggagcaatatcatcagaatattgcttcatgagcaagagcaaccaggaagatgatcataatagggttaaaagattgcaatggtctgaggtagccacaagagatatacgtccctctccttggatagccctgaaactactcttgtgtgttcttgctgttttattatccttttggtggactctatatagaatttctgccttcactcagcatattgttatttatcttccaaaatgctaaaacaaggtagattagattgtctttcttgtatatcagtagtattgtattaatgccttctaaagtttattcataagttccttgactacatttcagcaatgtgttttttattctaatttcatttaggaagggtttttctcatggcaatgaactgtgtattagcatggggatgttagttgctgtttttgcaaatagctgatttcatatgttacagttttaagtccaattatcttaaattattatgaaactgttaaatataatttaacatgaacctgtgtgtgtagtatgttttgtaataaagcaaaatggtttaaaatgtacaaaaatatatacagaaaaaaatgaatagaatacttcatgttttgagccataattttcaataagcataatctatataatctgtatttggtacaaacaactatctggtacaaatagttaaaaaatgagatatatattacaattttaaatacttgtactaaacactttgctattacatagacccaccaatttttatgcaaatacttaccaaaaaattaccatagctatttattatgatgtttaaaaattttacttactaacattaactcataaaaacagcagcctctgatgagtaatgtgctagttttgctgccttttaaaattatctttacatagaaatattaggtcttttaacaagatacgctcttctttttttggctctgaaaccaaagcattaacaaatttcgagattggacaaaaaataatttatcattaattactttttaaatagtaatttttaattagcaataattatttttctgtsaactaatactgatagattgtgcatatatctgttagaaatgtgtagaaatatataattttatcttgaattattactttagttattaattttatttattattgctattataattattatttattgttatcaagagagaagtgtgaattacaataacctttttaaaaaatgatttgacatacctattaaaatttaaaatatgcatttcttttgacctagcaatcccacttttagaaatatgtttttcagaaataaaagcttcagtatattagaatacgtgtacaaagaagttcagtgaatatatgatttattattttaaaaataacaatctgaaagttatctgatacatcaaaggatgggatatcatggaatcatttctttttaatttttaattgtaatttttaatggttcatagtaggtgtatatatttatgtggtacatgagatactttgatataggcacacaatgcgtagtaatcacatcatgtaaaatgtggtactcatctgctcaagcatctatcctttgtgttacaaacaatccagttatactcttttgattattttaaaatgtacaattaacttattaatgactatcatcaccctgttgtgctctcaaatactaggtcttattcattctttctttttttttgtacccattatccaaactcacttctccccctctaccctaccactacttttcccagcctctggtaatcatcgttctactctttatctctattagtttatttgctttaatttttagatcccacaagtaagtgagaacttgtaatatttgtctttctgtgcctgccttatttcacttagcataatgacctccagttctattcgtgttgttgcaaatgacaggatctaattttttgtatgtctgaatagtactccactatgtataagtaccacattttcattattcattcatctactgatggatacttaggttgcttccaaattttggctattgcaaacagtgctgcaacaaacgtgggagttcaaatatctctcaatatactgatttgtttaaatcataaactatatccaagggtagtaacttggcaaaatatgtaaaatacaaatcactgtgcattgcttttattttgttaaaaagtaaagaggtatgtgaatagatatcccccaattcagtaaatatcccaccattacatacaaatatatgtaaatatatatgtatacatacacacattccgtgggttaagtgaaaggcagaatatgatatacataaaattgttaatatatttacttataaatgtagattggaaggggtatgtgaggagaaactattagttgtcctcatgtagctctatatttggtcaatttgtttcaataagcaagtattttacttttttaagttaaaagagtaatttattaataaattcaattgttatgtctttcaggtttttgttttcatttctcatttaaatgttcttggacttagttgtatttaatgccaattttcatgacagctcaaaatcattggtagactttgttgatcatcctgaagccactccaaacatatatagtcctgtaaatttttgttgttttattgctttcaaggtggaaattggttcaattctttgacactattttattcatatcctgtcttctcttatcaagatatacttactgggagagcaaggcaagagcgaatattttaggcattgatttgggag

SEQ ID NO: 550584 - DNA, 2825 bp, Homo sapiens
tgcattaattcaaatgaaatagaacttctaatgctcaagaatattcttatcagctggtcagtatatcttcactttagcaataaagctttatgtggagcaatatcatcagaatattgcttcatgagcaagagcaaccaggaagatgatcataatagggttaaaagattgcaatggtctgaggtagccacaagagatatacgtccctctccttggatagccctgaaactactcttgtgtgttcttgctgttttattatccttttggtggactctatatagaatttctgccttcactcagcatattgttatttatcttccaaaatgctaaaacaaggtagattagattgtctttcttgtatatcagtagtattgtattaatgccttctaaagtttattcataagttccttgactacatttcagcaatgtgttttttattctaatttcatttaggaagggtttttctcatggcaatgaactgtgtattagcatggggatgttagttgctgtttttgcaaatagctgatttcatatgttacagttttaagtccaattatcttaaattattatgaaactgttaaatataatttaacatgaacctgtgtgtgtagtatgttttgtaataaagcaaaatggtttaaaatgtacaaaaatatatacagaaaaaaatgaatagaatacttcatgttttgagccataattttcaataagcataatctatataatctgtatttggtacaaacaactatctggtacaaatagttaaaaaatgagatatatattacaattttaaatacttgtactaaacactttgctattacatagacccaccaatttttatgcaaatacttaccaaaaaattaccatagctatttattatgatgtttaaaaattttacttactaacattaactcataaaaacagcagcctctgatgagtaatgtgctagttttgctgccttttaaaattatctttacatagaaatattaggtcttttaacaagatacgctcttctttttttggctctgaaaccaaagcattaacaaatttcgagattggacaaaaaataatttatcattaattactttttaaatagtaatttttaattagcaataattatttttctgtgaactaatactgatagattgtgcatatatctgttagaaatgtgtagaaatrtataattttatcttgaattattactttagttattaattttatttattattgctattataattattatttattgttatcaagagagaagtgtgaattacaataacctttttaaaaaatgatttgacatacctattaaaatttaaaatatgcatttcttttgacctagcaatcccacttttagaaatatgtttttcagaaataaaagcttcagtatattagaatacgtgtacaaagaagttcagtgaatatatgatttattattttaaaaataacaatctgaaagttatctgatacatcaaaggatgggatatcatggaatcatttctttttaatttttaattgtaatttttaatggttcatagtaggtgtatatatttatgtggtacatgagatactttgatataggcacacaatgcgtagtaatcacatcatgtaaaatgtggtactcatctgctcaagcatctatcctttgtgttacaaacaatccagttatactcttttgattattttaaaatgtacaattaacttattaatgactatcatcaccctgttgtgctctcaaatactaggtcttattcattctttctttttttttgtacccattatccaaactcacttctccccctctaccctaccactacttttcccagcctctggtaatcatcgttctactctttatctctattagtttatttgctttaatttttagatcccacaagtaagtgagaacttgtaatatttgtctttctgtgcctgccttatttcacttagcataatgacctccagttctattcgtgttgttgcaaatgacaggatctaattttttgtatgtctgaatagtactccactatgtataagtaccacattttcattattcattcatctactgatggatacttaggttgcttccaaattttggctattgcaaacagtgctgcaacaaacgtgggagttcaaatatctctcaatatactgatttgtttaaatcataaactatatccaagggtagtaacttggcaaaatatgtaaaatacaaatcactgtgcattgcttttattttgttaaaaagtaaagaggtatgtgaatagatatcccccaattcagtaaatatcccaccattacatacaaatatatgtaaatatatatgtatacatacacacattccgtgggttaagtgaaaggcagaatatgatatacataaaattgttaatatatttacttataaatgtagattggaaggggtatgtgaggagaaactattagttgtcctcatgtagctctatatttggtcaatttgtttcaataagcaagtattttacttttttaagttaaaagagtaatttattaataaattcaattgttatgtctttcaggtttttgttttcatttctcatttaaatgttcttggacttagttgtatttaatgccaattttcatgacagctcaaaatcattggtagactttgttgatcatcctgaagccactccaaacatatatagtcctgtaaatttttgttgttttattgctttcaaggtggaaattggttcaattctttgacactattttattcatatcctgtcttctcttatcaagatatacttactgggagagcaaggcaagagcgaatattttaggcattgatttgggag

SEQ ID NO: 550585 - DNA, 642 bp, Homo sapiens
aacttattgaatcacagaactaaatataaataaaggaactaataggatcaaaatatttatgtatgattaggtaatctatgtaaactaatataataatttccataataaacataggacaagtgggaaaaactgagtctaaccatctaaaatttaacaaagaaaaacttaatgaaggaggaaatatgacctgggggttactatttagtcaagtgaattatttaagcagagaataaggcaataaaaataacttcttagtatgaagatacagaagtagagattcagattcaaatatatggccttatttaaatgtaattaataatgaaaataccaaatcaatttatatattacaaattagaaaatattaaataaaagaaaatggtcccaataggccaatttttaaatgttaatttttaaaaataatttttcatttaacaacttataattgtatataattacattgttatagacakatatacacacacaaagatacacagcctggaatgatggaattaaaataatgaacatatttatctcttcaaatactttttctttctgtttaaatgcaactttgtacccttcgaacagtatctctccattttcctcacttccaagtctctggtaaccaacagcctgcttttgttt

SEQ ID NO: 550586 - DNA, 690 bp, Homo sapiens
tggggatggcctgacacagtccatagcagtgggggtaatacggtttggctgtgtccccacccaaatctcatcttgcagtatagctcccataattcccacgtgttgtgggagggacccagtagcagataattgaatcatgggggtggtttcccccatactgttctcgtggtggtgaataagtctcatgagatctgatggttttataaggggtttccccttttggttggttctttttctctcttgcctgccgccctgtaagacatatctttcatcttccaccatgattgtgaggcytccctagccgcgtggaactgtgggtccattcaacttctttttctttaaaaattacctaggttttagccagagaaattaagcaaagcaattctacaaacatagaaaaaattataaatttgtttataaattacctaatacaggggtcaaggggtgaggcagttcccatgtaagatttacccgcccagagctccaggaacaccaggagggcaagtgctctgatgccccaaccttcaactccctctggaccccccaaatcaacactgtcccaaggaccaacctttcaagccacagcttgaattcaggcttacttgtgcctacctgctcacctttagggcactcatcctccccctcagctcagggtcagccagcatgtgaactgggtacctctaggcctgg

SEQ ID NO: 550587 - DNA, 690 bp, Homo sapiens
tggggatggcctgacacagtccatagcagtgggggtaatacggtttggctgtgtccccacccaaatctcatcttgcagtatagctcccataattcccacgtgttgtgggagggacccagtagcagataattgaatcatgggggtggtttcccccatactgttctcgtggtggtgaataagtctcatgagatctgatggttttataaggggtttccccttttggttggttctttttctctcttgcctgccgccctgtaagacatatctttcatcttccaccatgattgtgaggcttccctagccgcgtggaacygtgggtccattcaacttctttttctttaaaaattacctaggttttagccagagaaattaagcaaagcaattctacaaacatagaaaaaattataaatttgtttataaattacctaatacaggggtcaaggggtgaggcagttcccatgtaagatttacccgcccagagctccaggaacaccaggagggcaagtgctctgatgccccaaccttcaactccctctggaccccccaaatcaacactgtcccaaggaccaacctttcaagccacagcttgaattcaggcttacttgtgcctacctgctcacctttagggcactcatcctccccctcagctcagggtcagccagcatgtgaactgggtacctctaggcctgg

SEQ ID NO: 550588 - DNA, 636 bp, Homo sapiens
ccagaaagttgcctcaggccatccatgggtttctgcctcaggcctccccagggctcctcctaggaatatagtaagggacagggtaaagtcagtgaaaacggcagagtcaggacctccaaaaagtgtctccttgaaaacaatgagaataccggcaaaaattggcagcatcaacgatttcaaagttctggaaattgaccataggcctgcaacaattctaggaggatttattcaagcaaaccggcagaatcttacaaagaacaagccttgcagcactttaacttactctatccccatgccacactccccagccctgtggtagacttgaaaaccaataacccactatcagggtgaagactaatagcttggcagccgccagaaagraaaaatggctagaagcaacttcaaagcctcattaacagaattgtcattacttgaagtctgatggttcactaaacccacttgcaaggttgtctttatttgacctgacttggagttctcctggtacaaaaagcattttcagtggggcatttattggaaacatttataggcaaatgtttagcttcatggtaaccaaagcagtgggtaagagtttgcgaaacaatagggtagccaacaagcttcaaattacaaagctgg

SEQ ID NO: 550589 - DNA, 1346 bp, Homo sapiens
tcttgagagtgtgccaccaagggtctgcactaaccaggggtgtgcccagaggctcgctgcaggcttgaaattcctgcggagtcttgtgttttacctggagcacatgtgcacagtttccattctgctccatagtatgcacatgtttgtatttatttcaacctaaaaatgtttgtttcccataactctttgcgtataattgatactctacgtatttgtagcctcttttactcttttccctttcctcagggagtggtttgctcatttagaaaaggccaagatatatcactgtagagtttcgtttcttttcttttcctccaccccccatctttaccttgttctgggagaaaggagaattagaagtctgagttgcagctggagaaactggcaaattaaaatcacattgggaaagagaattactgtgtttcacaccataccagtagaaatgacaggctgttttctgsgggtagggatttggcctttggtattggcagtcttgagaagtattagataatctttgctgatacagtctattttctcctcaggttctaggtcccaattctactgcaaatagtatcatggcatcttatcagcaacagaagacttcggttcctgttcttggttagtattttttctcatttaatattacaatactaagcagaaggactatctttctgtaagtattgagaagatcagcagtataaggagagattggatacaatttttcactacaaaaaattgactacaattcttcctcaattctaagaccgcatctttagtatgatcagtttcatgcttctagcggtgggggacctggtgcaggaaaatccagcatgaccattgtatgtgtaatttttaaaaatatttatgtggcatatgcttgttcataaaggcacaccacagttccagtttcagtctaaactgtctacatttacatatacatcaaaagattcttctgaagcatcattactggctattggcagttatgctttgcatcttgggggcattttcataaaccttgcttatgagtgggacctttttattatgtttaggattgacaatataatttgaaggcaaatccaaagaatattagcattttatacatatttcctgtttagttatgcatgaagtgttttatttgttgaggggagatgattctcaattagattacttatatccctaaaaattaaaaaccctaagcgctttcttttgaaagttggttagaaacatttgatgagtcagcttgggactttcagtatttgcccttacttatagttggatcaatgaagcatcttagctttgaaaagtgaatgatagtttctaaaataattggcagttttaactgctat

SEQ ID NO: 550590 - DNA, 1346 bp, Homo sapiens
tcttgagagtgtgccaccaagggtctgcactaaccaggggtgtgcccagaggctcgctgcaggcttgaaattcctgcggagtcttgtgttttacctggagcacatgtgcacagtttccattctgctccatagtatgcacatgtttgtatttatttcaacctaaaaatgtttgtttcccataactctttgcgtataattgatactctacgtatttgtagcctcttttactcttttccctttcctcagggagtggtttgctcatttagaaaaggccaagatatatcactgtagagtttcgtttcttttcttttcctccaccccccatctttaccttgttctgggagaaaggagaattagaagtctgagttgcagctggagaaactggcaaattaaaatcacattgggaaagagaattactgtgtttcacaccataccagtagaaatgacaggctgttttctggkggtagggatttggcctttggtattggcagtcttgagaagtattagataatctttgctgatacagtctattttctcctcaggttctaggtcccaattctactgcaaatagtatcatggcatcttatcagcaacagaagacttcggttcctgttcttggttagtattttttctcatttaatattacaatactaagcagaaggactatctttctgtaagtattgagaagatcagcagtataaggagagattggatacaatttttcactacaaaaaattgactacaattcttcctcaattctaagaccgcatctttagtatgatcagtttcatgcttctagcggtgggggacctggtgcaggaaaatccagcatgaccattgtatgtgtaatttttaaaaatatttatgtggcatatgcttgttcataaaggcacaccacagttccagtttcagtctaaactgtctacatttacatatacatcaaaagattcttctgaagcatcattactggctattggcagttatgctttgcatcttgggggcattttcataaaccttgcttatgagtgggacctttttattatgtttaggattgacaatataatttgaaggcaaatccaaagaatattagcattttatacatatttcctgtttagttatgcatgaagtgttttatttgttgaggggagatgattctcaattagattacttatatccctaaaaattaaaaaccctaagcgctttcttttgaaagttggttagaaacatttgatgagtcagcttgggactttcagtatttgcccttacttatagttggatcaatgaagcatcttagctttgaaaagtgaatgatagtttctaaaataattggcagttttaactgctat

SEQ ID NO: 550591 - DNA, 559 bp, Homo sapiens
tgatggttatatgtatagaaatatttatggttacatgagaaatataatggttatatttctcaggctaactgagaaagtggcatttgagcaaaggtttgaaggagttgatagattgtgctatctgaagacccgaaggaggaatgatccaggcagatgaactagcaagggcaaaggccctgaggtaggagctaaatctgcatatcttcaggagcactggagtgaaacaagcaagaagagcctggttgwccaagttgatgaggtaatggggagacattgtatatggcctgataggccattgaaaggactttctggctgggtgctgtggctcacacctataatctcagcactttgggaggctgaggggggcagctcacataaggtcagaagttcaagaccagtctggccagttggtgaaaccctgtctctaataaaaatccaaaaattggccgggcgtggtggctcaggcctgtaatcccagctacttgggaggctgaggcagaagaatcacttgtacctgggaggcagaggttgcagggagccaagatcacaccactgcact

SEQ ID NO: 550592 - DNA, 535 bp, Homo sapiens
gggatggcggggaagttccacacccctttttcgatacctctctctatgtttatctttatccgtatcctttataatatcctttagaataaactggtaggctgggtgtggtggctcacrcctgtaatcccagcactttgggaggccaaggtgggcagatcacgaggtcaggagatcaaaaccatcctggctaacacggtgaaaccccatctctactaaaaatacaaaaaaattagccaggcatggtggcaggcacctgtagtcccagctactttagaggctgaggcaggagaatcgcttgaacccgggaggcggaggttgcagtgagccgagatggcgccactgcactccagcctgggcgacagagcgagacccatctcaaaaataaataaataaataaactggtacttttttaaaaaaagaagaaaagtaattatcttctttaatgcataggatctttaataataataacacccagaatttattatatattataaaaatcagtggctatcatgggccagagacccatactgaagtc

SEQ ID NO: 550593 - DNA, 1579 bp, Homo sapiens
ggaaaaaatagtagatgcctaatagatggtacccattcaataaattcaatggtggtggtgatgatggtgataaacaaacagcataaaatatatgtttaaatggtaggggtcccattcaatgattttcacttgggaagttgtatacttatcttaatgatattacgagctcccaactcctatttacaaatgatctttggaacagcctgagaatattggtcacccacaatgtcatcaacagcaatagctatgaataagattttgacatctttgtttagttcatattattgttatatattattgaatcattttatatagacattttatatcctattttttcacttaacgtattaaaagcatgttcctgcacctttaaactttttgtatattctgtgttaacaaccacataatattctattgcaaagacctgccatattmatttaacaactcttttgtcactgggcatttaggttgtttccaattcttggttattataaataatgcagcaatggatggttttggccagaaggttttgtctgcatttcggattatttccttcagctaaattcctagacatagaattcccaggccaaaaactatgaactcatgatacatagtgccatatcgttatccagatcctccacatatttgaagacaacgatcatactcccaagtcttttctccaagataaacacgcacatatcccctatcactcctcatatgactcatttcccagtgtggtcaccattcttgccccttttcctctggaagaaagcacaaactcctaagctggcattcaaagctcttccactctgactcaacttcatctttgccccttcatctcctgtagtacctcacctcccttgtcaggcccctcctctcctctcagtcgctgctccctacaaatgccctgttccttcactctgccattcacttatttactgttccttcagtccaggatgcctttcatacttttgatgcctaggaaactccatctcatcttgcagtacagagctccagtgccgcctcttcttcttcttgatcccttcttccctgctccaggcagaactaacttttctgtgccccctactcctgtgccactttgtacagagtggtcagggccccaccatgaaatgacaacctactcaaatttggacaatgcaaacaggatttaataaaggatgatttaggaagatgtgtgcagaatgtagagaaaccacaaggaatagcatcatactcaaatgctagcaaggcttttaacatctctacacctgaaggagtaaggacaggaggggttactggaatgcagaaggaaagagttttgcggagagggccaccttaagagaagctatgacttccatcaaggaacaaaatcagccgaaggtaacacctcagggaagcacccaagggaataaataccttgacttcactctcctctctcctttccatctccctcttgtgcttctatgagcagaacccaactagacccagagcgataggaagcccatcggaacagtccatacaggtcatcccccctggggcacagagcatggtgaagggtggagagaatgatttgaggagc

SEQ ID NO: 550594 - DNA, 1579 bp, Homo sapiens
ggaaaaaatagtagatgcctaatagatggtacccattcaataaattcaatggtggtggtgatgatggtgataaacaaacagcataaaatatatgtttaaatggtaggggtcccattcaatgattttcacttgggaagttgtatacttatcttaatgatattacgagctcccaactcctatttacaaatgatctttggaacagcctgagaatattggtcacccacaatgtcatcaacagcaatagctatgaataagattttgacatctttgtttagttcatattattgttatatattattgaatcattttatatagacattttatatcctattttttcacttaacgtattaaaagcatgttcctgcacctttaaactttttgtatattctgtgttaacaaccacataatattctattgcaaagacctgccatattaatttaacaactcttttgtcactgggcatttaggttgtttccaattcttggttattataaataatgcagcaatggatggttttggccagaaggttttgtctgcatttcggattatttccttcagctaaattcctagacatagaattcccaggccaaaaactatgaactcatgatacatagtgccatatcgttatccagatcctccacatatttgaagacaacgatcatactcccaagtcttttctccaagataaacacgcacatatcccctatcactcctcatatgactcatttcccagtgtggtcaccattcttgccccttttcctctggaagaaagcacaaactcctaagctggcattcaaagctcttccactctgactcaacttcatctttgccccttcatctcctgtagtacctcacctcccttgtcaggcccctcctctcctctcagtcgctgctccctacaaatgccctgttccttcactctgccattcacttatttactgttccttcagtccaggatgcctttcatacttttgatgcctaggaaactccatctcatcttgcagtacagagctccagtgccgcctcttcttcttcttgatcccttcttccctgctccaggcagaactaacttttctgtgccccctactcctgtgccactttgtacagagtggtcagggccccaccatgaaaygacaacctactcaaatttggacaatgcaaacaggatttaataaaggatgatttaggaagatgtgtgcagaatgtagagaaaccacaaggaatagcatcatactcaaatgctagcaaggcttttaacatctctacacctgaaggagtaaggacaggaggggttactggaatgcagaaggaaagagttttgcggagagggccaccttaagagaagctatgacttccatcaaggaacaaaatcagccgaaggtaacacctcagggaagcacccaagggaataaataccttgacttcactctcctctctcctttccatctccctcttgtgcttctatgagcagaacccaactagacccagagcgataggaagcccatcggaacagtccatacaggtcatcccccctggggcacagagcatggtgaagggtggagagaatgatttgaggagc

SEQ ID NO: 550595 - DNA, 632 bp, Homo sapiens
tcgtaggacatttcacatgtgaaccactgcacccaagcatgcttatctatctttcaaaggctctggtctcaatgaattgcagcagccttcacccctaaaccttctgaaacatggccccatcaatgactcctttcttcctttcttatcccaacactaatccgtccacttgtcttttccatctaactctcaacagcctcttcagtctttacacatttctccatctctacgttcattcaagcctgggatattttaatattcctaaaattgtttcctctycattattacccactgtatcaaattccttctctattacatttaaccaaaaataattttataaacaaattcaatcacatcacctccctaattaaaatattccacccacttcctattccaggaagacaaacttcaacacgacttttaaggcaccccttattttagaaagcacctcgggtgccggcgccgctccatgtctcttccattttacagacaaagaccattcagaggtaattttaggtcaaagcatgctgttcttttcttaagtacagggcctgacaggtcaaggtaagaatattgactttcattcccagtgagaggaaaagctaaggagcgtttctagctgagtaagtggcaca

SEQ ID NO: 550596 - DNA, 632 bp, Homo sapiens
tcgtaggacatttcacatgtgaaccactgcacccaagcatgcttatctatctttcaaaggctctggtctcaatgaattgcagcagccttcacccctaaaccttctgaaacatggccccatcaatgactcctttcttcctttcttatcccaacactaatccgtccacttgtcttttccatctaactctcaacagcctcttcagtctttacacatttctccatctctacgttcattcaagcctgggatattttaatattcctaaaattgtttcctctccattattacccactgtatcaaaytccttctctattacatttaaccaaaaataattttataaacaaattcaatcacatcacctccctaattaaaatattccacccacttcctattccaggaagacaaacttcaacacgacttttaaggcaccccttattttagaaagcacctcgggtgccggcgccgctccatgtctcttccattttacagacaaagaccattcagaggtaattttaggtcaaagcatgctgttcttttcttaagtacagggcctgacaggtcaaggtaagaatattgactttcattcccagtgagaggaaaagctaaggagcgtttctagctgagtaagtggcaca

SEQ ID NO: 550597 - DNA, 632 bp, Homo sapiens
tcgtaggacatttcacatgtgaaccactgcacccaagcatgcttatctatctttcaaaggctctggtctcaatgaattgcagcagccttcacccctaaaccttctgaaacatggccccatcaatgactcctttcttcctttcttatcccaacactaatccgtccacttgtcttttccatctaactctcaacagcctcttcagtctttacacatttctccatctctacgttcattcaagcctgggatattttaatattcctaaaattgtttcctctccattattacccactgtatcaaattccttctctattacatttaaccaaaaataattttataaacaaattcaatcacatcacctccctaattaaaatattccacccacttcctattccaggaagacaaacttcaacacgacttttaaggcaccccttattttagaaagcacctcggrtgccggcgccgctccatgtctcttccattttacagacaaagaccattcagaggtaattttaggtcaaagcatgctgttcttttcttaagtacagggcctgacaggtcaaggtaagaatattgactttcattcccagtgagaggaaaagctaaggagcgtttctagctgagtaagtggcaca

SEQ ID NO: 550598 - DNA, 528 bp, Homo sapiens
agtagtagacttccccattccattcctcacagcttccaccacatccccacaaccctctcctaacgtacacaccccaaacgagaagagcagcctgggttctaaatcaagctctctaatttaccatctaagggtcattaagaaagtgactttgcctttctattccgtgtttgtcacatattatagggtgagtaaagaggagaaaacaatcaaccttctagaactaatatgaagattaagtgtcacaaaataattgccaagtaccaggtaccaaatatataatcaataaatttagctaaattttagttttagatacttactttctgctattctattctgaataaaattaattatcttcagtgtttgcctaatgcagctcttcctagggcagctttctaatgtatcagatcactatagtggattgcgagaacaggraatatggtttgaaagtgcgtgaagagcagtcggtgttttgaggaaatgcataaaaccagatatttcacatcaggcaggcccagatattcctctaac

SEQ ID NO: 550599 - DNA, 658 bp, Homo sapiens
gacttaactctaaaatattctgaccttcttcttggcacacataacagaatattgtactcttaaatcataaataacataaatagcctcaaataaaaatatccagatgattattttatatttaacaaataatgtaaatctgttgtactgctttcctgtttgtggtttctttatgctatgattaaatattaaattgcttatagcttagtgcagcatttttcctcatactaagcctaaaatatattaaatatctaattttatcctgttcagaactctgatgctctcagtattgtaaaatctaattcatgtgcttarttcgctcatacgtctatcccctttgctatagcttagtatctggctcacagtaggggtataataatacaccaattacccagatctcacaatcacaaaaactctttgacattaatgatttatgtttaaaaagaatattcagtcatatatgacaatcagtacagattcaagcccatctgctgctttcaatatttacacaaatgttttgcaaagtgagattaaaatactgtccttagcagttgaaaggctaccatcttcaacaaaaactacagttgctctaattgtattcttcctagtaaggcaggaaatttaattatatatttttaaaaattgtcaacaatcacaaaaa

SEQ ID NO: 550600 - DNA, 658 bp, Homo sapiens
gacttaactctaaaatattctgaccttcttcttggcacacataacagaatattgtactcttaaatcataaataacataaatagcctcaaataaaaatatccagatgattattttatatttaacaaataatgtaaatctgttgtactgctttcctgtttgtggtttctttatgctatgattaaatattaaattgcttatagcttagtgcagcatttttcctcatactaagcctaaaatatattaaatatctaattttatcctgttcagaactctgatgctctcagtattgtaaaatctaattcatgtgcttaattcgctcatacgtctatcccctttgctatagcttagtatctggctcacagtaggggtataataatacaccaattacccagatctcacaatcacaaaaactctttgacattaatgatttatgtttaaaaagaatattcagtcatatatgacaatcagtacagattcaagcccatctgctrctttcaatatttacacaaatgttttgcaaagtgagattaaaatactgtccttagcagttgaaaggctaccatcttcaacaaaaactacagttgctctaattgtattcttcctagtaaggcaggaaatttaattatatatttttaaaaattgtcaacaatcacaaaaa

SEQ ID NO: 550601 - DNA, 720 bp, Homo sapiens
tttatgctaagctggctatcagaagagggctaaatatattgggcttgattttttgaagatattttaactaaaaatcttaaacttgaaatcagtgagatggtggttttcaccaaggaagtaaatkagtggatggctcaagatcttgaaaacatcgtagcgattcactgtaaaggaggcaaaggtaataacattttccttttcatttctccctttctaaatacatgtaaatataaagtacaagaacaagatacgtattgctattaatacgtattaataactgttatcattttaaaatattagctccaaggtggaaagaagggaaggagaaaggaaagaggagaggaggaagggtgggagatagggagaggataaggaagggaagaaagtaggaaaaaagaactaaggaaggttgagcatattttcccttgttttcctagtatttggctttctttatttttggtttgccagtttatatctctcaaaatacaaacagtctttaattttagaatgtcagagtacttttattttatttaaggctgattttttattttaaaattaacacataaaaatatatttatggtgtacaatatgatgttttgatatacataaacactgtgaaatggctatatcaagctaattaacgtatgcattactccacatacttttttgtggttagaacatttaaaatctactgtctcagcaattttcaagtatacatta

SEQ ID NO: 550602 - DNA, 720 bp, Homo sapiens
tttatgctaagctggctatcagaagagggctaaatatattgggcttgattttttgaagatattttaactaaaaatcttaaacttgaaatcagtgagatggtggttttcaccaaggaagtaaatgagtggatggctcaagatcttgaaaacatcgtagcgattcactgtaaaggaggcaaaggtaataacattttccttttcatttctccctttctaaatacatgtaaatataaagtamaagaacaagatacgtattgctattaatacgtattaataactgttatcattttaaaatattagctccaaggtggaaagaagggaaggagaaaggaaagaggagaggaggaagggtgggagatagggagaggataaggaagggaagaaagtaggaaaaaagaactaaggaaggttgagcatattttcccttgttttcctagtatttggctttctttatttttggtttgccagtttatatctctcaaaatacaaacagtctttaattttagaatgtcagagtacttttattttatttaaggctgattttttattttaaaattaacacataaaaatatatttatggtgtacaatatgatgttttgatatacataaacactgtgaaatggctatatcaagctaattaacgtatgcattactccacatacttttttgtggttagaacatttaaaatctactgtctcagcaattttcaagtatacatta

SEQ ID NO: 550603 - DNA, 720 bp, Homo sapiens
tttatgctaagctggctatcagaagagggctaaatatattgggcttgattttttgaagatattttaactaaaaatcttaaacttgaaatcagtgagatggtggttttcaccaaggaagtaaatgagtggatggctcaagatcttgaaaacatcgtagcgattcactgtaaaggaggcaaaggtaataacattttccttttcatttctccctttctaaatacatgtaaatataaagtacaagaacaagatacrtattgctattaatacgtattaataactgttatcattttaaaatattagctccaaggtggaaagaagggaaggagaaaggaaagaggagaggaggaagggtgggagatagggagaggataaggaagggaagaaagtaggaaaaaagaactaaggaaggttgagcatattttcccttgttttcctagtatttggctttctttatttttggtttgccagtttatatctctcaaaatacaaacagtctttaattttagaatgtcagagtacttttattttatttaaggctgattttttattttaaaattaacacataaaaatatatttatggtgtacaatatgatgttttgatatacataaacactgtgaaatggctatatcaagctaattaacgtatgcattactccacatacttttttgtggttagaacatttaaaatctactgtctcagcaattttcaagtatacatta

SEQ ID NO: 550604 - DNA, 774 bp, Homo sapiens
tcagcaatgaccaccatagccccttctgtctctccaatgttccaagctcaataagtcccctctgcaacagaggtcttccctgatactaccataactcaaaatgaactcaatgagggaatttattcttggtatcagttatctgtcatttttcctacttcaygccaatcttgtcccaatttacattaaaatcatattctaagtcctcttgggaaaatggtagcattcagttttctttttcttttttgtttgagacagagtctctctctgcagcccaggctggagtgcagtggtgcgatctcgttcactgctacctctgcctcctgggtcctggttcaagcaattctcctgcctcagcctcatgagtagctgggattacaggcacacgccaccatgcccagctaatttttgtatttttagtagaggcggggtttcaccatgttggccaggctggtcttgaactcctgacctcgtgatccacctgccttggcctcccaaagtgctgggattacaggtatgagccaccgcgcccggctggtagcattcagttttcaaatgatttcctcgtatgtcatctcattttgtagtcaaagaatataagaattggaagtaacttttgtgggcacctagacaagcatcattagtgtaagaacatcccctatgcaacttttcaaactggggccattcaacttccctcagacaccttcaccgatgtgcagttcactcttcaactaaggccactttgaactgccctaattgttagaaagtacttccttc

SEQ ID NO: 550605 - DNA, 774 bp, Homo sapiens
tcagcaatgaccaccatagccccttctgtctctccaatgttccaagctcaataagtcccctctgcaacagaggtcttccctgatactaccataactcaaaatgaactcaatgagggaatttattcttggtatcagttatctgtcatttttcctacttcacgccaatcttgtcccaatttacrttaaaatcatattctaagtcctcttgggaaaatggtagcattcagttttctttttcttttttgtttgagacagagtctctctctgcagcccaggctggagtgcagtggtgcgatctcgttcactgctacctctgcctcctgggtcctggttcaagcaattctcctgcctcagcctcatgagtagctgggattacaggcacacgccaccatgcccagctaatttttgtatttttagtagaggcggggtttcaccatgttggccaggctggtcttgaactcctgacctcgtgatccacctgccttggcctcccaaagtgctgggattacaggtatgagccaccgcgcccggctggtagcattcagttttcaaatgatttcctcgtatgtcatctcattttgtagtcaaagaatataagaattggaagtaacttttgtgggcacctagacaagcatcattagtgtaagaacatcccctatgcaacttttcaaactggggccattcaacttccctcagacaccttcaccgatgtgcagttcactcttcaactaaggccactttgaactgccctaattgttagaaagtacttccttc

SEQ ID NO: 550606 - DNA, 774 bp, Homo sapiens
tcagcaatgaccaccatagccccttctgtctctccaatgttccaagctcaataagtcccctctgcaacagaggtcttccctgatactaccataactcaaaatgaactcaatgagggaatttattcttggtatcagttatctgtcatttttcctacttcacgccaatcttgtcccaatttacattaaaatcatattctaagtcctcttgggaaaatggtagcattcagttttctttttcttttttgtttgagacagagtctctctctgcagcccaggctggagtgcagtggtgcgatctcgttcactgctacctctgcctcctgggtcctkgttcaagcaattctcctgcctcagcctcatgagtagctgggattacaggcacacgccaccatgcccagctaatttttgtatttttagtagaggcggggtttcaccatgttggccaggctggtcttgaactcctgacctcgtgatccacctgccttggcctcccaaagtgctgggattacaggtatgagccaccgcgcccggctggtagcattcagttttcaaatgatttcctcgtatgtcatctcattttgtagtcaaagaatataagaattggaagtaacttttgtgggcacctagacaagcatcattagtgtaagaacatcccctatgcaacttttcaaactggggccattcaacttccctcagacaccttcaccgatgtgcagttcactcttcaactaaggccactttgaactgccctaattgttagaaagtacttccttc

SEQ ID NO: 550607 - DNA, 652 bp, Homo sapiens
atgttccaggattttcacattcaaagttgcgtttcttcttaaatgtatagcctttgcatcatcaacccaacagatgtgtcttgactgtctcttttaactccgaatgctgtttaggatacagaaaaaaaaggaagagaattgcctgaaaagtcctgcaggtgttcaagtcctgctgttcagagaaaccctgctcatatatgcaccttggtggccgatggaatctcctcttcagatgacaaatcgctaattcgggtcccagccttmgaactgcactgcttataggtgcattttatagcaatgcattgtgtatactcattagattgaatttaccgatttcacaagcatgtgctggggaaccagggacataaatgcacagtgacaatatctaaggttccatagagggagaaatgcacctacaacagtaacttgaagtgaaggaaccaagtggaagctgccattagaggctcccagacaaagagccagggctcgactgcctcttcagaggcctgggatcatcacaccaatcagcaggcactctggggtgtgatacagcttgctgcaaaggatcctctaggctaaccgtgactcattggccttaggctcccactgcctgttcccatgaggttggagaaagaacatgggctttgagcaa

SEQ ID NO: 550608 - DNA, 536 bp, Homo sapiens
catcccttcactcatcccttgagaccactggcacgaatttgtgaagtgagaagggcattctggggctgcataatggagcctccctctgggaccattagatgccctgaggggtggctcacctgaactcattaacaccttttaaagccatggcagctctggctgactcacgttctgtgaggtccaccaagagctaccagatcttttttggccttgtgtctgcctcatcttctcagtgctgtgtttgyatgatgggatttttgtttctaagcagactcagaggccctatctttacaggactgaacctctctgctctgtgacctggagcaggttccaggacctggctggtcttcggtcaggctccgggagagcagtgaagtccctgtctctatttcgtctttgcatatgcctcccctccacaaagaaggcacccagggactaatttacactgggaccaggacaaacttgggagtgaagcagtgacagcacgatgtcactaaagatggggagagaatggagggcagggaagacaggagagc

SEQ ID NO: 550609 - DNA, 1329 bp, Homo sapiens
taaatgtattgcataaatctataggaaaatgttatttgtttgaaaaaaagattctgtcaaaagaccaataagtttttttacttacatttgatcatgtgagccatagtgacccatggttgtgtaaaaactggaaaaatgtgtaggtcttattgcttaacaggtattgaatttttcaaatagccaagtctttttctctgaaacaggtaggcatttatagaacggcaaacatgatttcgtgaatttggtaataattgttcctcccatctctttatcacccaaactcaacatatctgtttgcaaacatgaaagactcctgtggaaccctttgggctgggtttctgctgtcttctttctgatcactagatggcactccattcatattacttcacagacaaggaagcccaacacagtggattatttgaattgcagccgaatttatagccttagaagaaaagagcataataacagtggaagtgatttagaaagatactggaaagatgaggggagcaaaggaagtggtttttcagtaatatttacacagaaacaacagggaggtgtttataaacgtatcttttctgtacatctgttctgagtagggaaggagtttcccagctaggttagatctccaaattcagcctaggtggaagtgaaccaaaatgtttcaagtagtaggtggcccatcaccctcagacagaggatgaaagcggacttccctgctgcactcaacaacccatctraaaatagtacctgcttaagaaatgtcctctaatagtcattttataaatgaaaactggtcacaggctgtgtcttatactggacactgggagcacacaacacacactctcaacacgctatttactcagtggcaatgtgtctggaattagttccttccggtgggttcttggtctctctgacttcaagaacgaagccgcaggccctcgcggtgagtgttacacttcttaaagatggtgtgtccggagtttgttccttcagatgttcagatgtgcccggagtttcctccttctggtgggttcatggtctcgctcacttcaggaatgaagccgcagaccttcgcagtgagtgttgcagctcttaaaggtgccgcctctggagttgtttcttcctcccagagggttcgtgatctcgctgacttgagaagtgaagctgtagaccttcacagtgagtgttacagctcataaaggtagtgcggacccaaacagtgagcagcagcgagatttactatgaagagtgaaagaacgaagcttccacagcatggaagagaacccgagcgggttgccggtgctggctctagtggccagcttttattcc

SEQ ID NO: 550610 - DNA, 1148 bp, Homo sapiens
cagagtgaatcaaagactcatagctaatttggggtgtatagaggcactgatagatgagaaaaagaaaggctacaacagaagtgctgaagtagacagcagcagcctccttctccaacatttgaagctaaaacaaaatgaatgcagctccaccatattaacattgtttttcctagactaacttggcaggggattcccacacagcgaggaaaccttaatggcctgccaaccattggagcagtgctgcctttctaattacacatatttccatgaattataactgggtgttttatctgttcaaccaatttggaagacagctgagaaccacatcaacttttccatgttcttctttgattctgaacattaaaacaacattattaagtcttcgtaaatggcattattaatagctgcatgagtataggatasagaaacaccagtgtcttcttagtagccattatataatttccagtattttatgattattattaatgatttcatgacaccatttcacagcagttggtggtggttctttctacagtctagctaacaataaacaaaattcctaggtcaaaagtgatgaataataataagcttactaagccaaattattttaaatagttttattaacattccaatgtgatgtggaattcctattcactgaatcctaaatggcatcagatattctcacttgaaaactaattgatttttaaaacaaattgatgggaaaattggaagatcactcattagtagaatttacgttactttggaaatgataggtgattatttcccatgtttattagccatttatattttttactttataatcattttttcttaatccaaaaaaaattgctggggttcctggaaaaaggagtcaaagtagaatgtaaattttacgtagcttcattgcatacttttgcataactaactttctgagaagctcaagggacgggaatagaaacaaatttcctaattatttgtacatttacttctgcatttcgtaggagcatatcagttagctataaactgttgaaaaatgacccattgtattgcagagtaccctgctgtctggggttctgtatgcctaataaaaacaatttccttcttccatttataatatagagtcagaatcatctttccgaagaatagaa

SEQ ID NO: 550611 - DNA, 572 bp, Homo sapiens
gacctctaggagttctttgttttacacagaaataaaaaaattaatagaaaatgcttgcttttactttgtaaggtagggcagtatccatatgcttacatgtgctcatctctaaaattctacaagttaatagaatcagctcacgaatctcatgaatgcacagctatgcttacttgtgatatattatacataatatcagcagttgaaaggtaaaacagtttttaattttgggtttgtttttttttgcttttgttatgtgactawggtactgtgtgattccttattctatagataggaggtagccccacatttattttggtctctttttacaaggaaacccataataaatctgtaaaataagaaggggacagaaaaagaatggggaaaaaaagaaaatatcagaaaacaaaatatcaaaaaaataccaaaactgcgataatctcaaaggtataatagatacataattagaatacaagaagaggaagaaagagaaaacagagaaaaatatttgctgtaataatgacagagaatttttcaaaattaatgagaacaccaaaccacagttccaggagact

SEQ ID NO: 550612 - DNA, 3541 bp, Homo sapiens
ttaggacagcacagtgtaaataatattgcaaaactgacaggctggggagacagacggccagggtcagatcctggccttgatgcgtccttcctgggtgacctctgtgtctttgtttccagtttcctcctctgtaaaatagtgaaaataataatctccatggtagagaatggtgaagaatactaaataagtaaagcccttagcacataataagactgatcaaatggcagctgaaagaaaaagagtcaactgagcctgagggacagtctattcttgctactctgtttcttacaaagcactgggtttagaaacaagggaagccttgcagcagggctggctcccattcctctccctgctctgtcttggttgggatgctcatgggagctgcaaagaagcaaaaacggagaggcagaggattcctccttatagttagataattcctgccctatgtgccacatctctgtctcctccacatggcatcttcctgtactggagatccaaggcagaggggccttatctgctgtccttgaggagaggactgtgattagagctatgatttctttctggtagtttcacacactagcattcctgcctaactctcacgtcagagaagtatagtcaaattagtttactttggcttaagatggagttgtaacatttgcaacatgcttggtacagaatttagtgcccaataactatcagttgttatttccctatcagaaaatagtggattgttctgaaggcacaagcctagtctgccctcctaacttatgcgacatttgctaagcacctatcacaacatctggcactcaaaggctttcacgatatgaacacaggatgaatgagaaaacaaatggggggtaaaggtttgttttcctcttccagggccaacgggctttggcaggcttggctgccctcagatctgcacagttgccactagagggcagaagcagttaagacaacaatacccaggactagccagatcccgaattaccggctttgcaagagaggatggtggaaagggttgaaaaaaaaaccccagttattctatatctcttggggaccatatggaagggaatgtgtagagaggattgaagttagacttaaagaagaacttccagaacacagtttgctaactacagcttttatacaagtgacttttttttttcatttttttttcctcttagcttcatctgcccgaacagaatagatgagaaagagggctcatcagtccaaggcctgtgtgacctgcgacctcaccaggtcctcctaaagtaaccctcctgcagtctgctttaaatgactccactcttgtagatgcaatcataaaataactttattggtcaggttagccaccactcatgcttttcctgtaataaggatcctttataaaggcatgatggtgttcacatgcagatgctttctgaagagccctggggcagggggcagccttgcccctcacatcggagctcctttgttgaaatgagctggtttggcttttgtggattccaggtctggagccaagaacstagtccaaagatcccctcttcccttctcagggaaggtgcttcaaagcatacacagtatcagggatgtgatggcatctgggcagagcctatacttgggctaactctcctccaacagtccttgcccctgactgcccagatggctttgtcccaaccttgcccaaagggcaggtgggttaagccccaggcaacattaccttttgaaatgggaagaattaagtgctccccagccaaactataaagcaaaagccaccttcactaatgaggatatagctcagagatgtgaaagcagagggttgtatgcccagcacaggcaagatttggctgcctggcctgggcttcacggaccccagccagagctggtactttttaactatggccttaggacaaaccaggtgaaacagattaaccacatcctccttctttgggctagcaagtccagggctgcctggagtctgtctctaccatcaggatatagaatcttcctgcttggataaaaggagaggacaaactgtgtttctcatactttaaaaaccatgtggccgctacctttgtggataaaaacccaggtaggatgctgtttggaatgcagaaagtgctgggcaagaatggaactactggggctgctttctcaactcagccaatttgaggtgtgtttggcccattgcagatgctgatggtaagcaaagtctggcctttcctcttctgaagtcttatccaccttcaaagagctacccagctgccaaaatatagccctatacattgatctaagcctgaggttggctgtctcctcccacatcaggtcatgaatattatcatcatgctggtgacctccaatctggtggctttccaggggtgaggttagggaggtatagaagtgactcctggtgtcctttcaccctcagacacagtgtgggttgtctccacaggttgctgggcagatgctcacatgccttggggtctcctgactctgcttaaggcacagaagaggcatctgtggaggaaagtggagtgggtgaagtggatttcagaagaggcagctgggcaagaggtatattttgagaagcaacaaatgggagcccagagtaactgcacgaccagcccagcacagagggagagctgtcaagtgctgctcacagacagccagggattgttagaaaagtatggttatatactattgcccatgccacttttgaagttccatgacctcagatcattgggaagaacttaagagccgtgagatttatggggttggaacatccagggatccttccatctaccaccacttctgtccctggaaaagagtgagcttctgcctatgtcctcagcagaaggctgcctgtccctgatcgccccccctaaccccacctacaggaaagaagactacagagggtgcccgtggacttctgtcacatggtccatcctggaccttccagcaaaagccaaaccaaaccatcaagccaaatgccacgggggctctccgcccagtacccggtgccagggctgctcagatctcgatgaggctggcaaggcgcaggcagaggggcgcgtcggcaggcatggcgctgcgcttgatctcgttcccgtccaggcgcagcacctgcagcttggagaagttcacgacgtccaccacggtgcagaagctgctgatggagaactctgtggggacaagaggagcacgggtcagggagagaagcccagattacgaacctgaagccacagtgagattagcctttgtgaagcagcttagataaaggggtggaagttggggatggagggcagatgttttccaggattggagtcatacttactggcgccactaggggcagaactagggacagagtgaggactgtgcctgcgtctgcagctcacctcctaaccaccaacctgaactttactctgcaggcccaggaatgttcttaagcgtccttccctctgggacatttttttttttttagcaggataggggggcaggtgggcagctgtgggcagcagtaggaagcagagggtagccaaag

SEQ ID NO: 550613 - DNA, 536 bp, Homo sapiens
caaggacttacaacagctcagtagatactgagtaaataaatggtttactttctctggcagacccctctgcccagatccacagtcaccagtgttcctggcaatcatttgttggctgccatgtagaaatamatgacatgtcatctaaggcaaataaggtattgtagaaataaatgacaagtcatctaaggcaaataaggtattgtagaaatacatgacatgtcatgtattgtcatataaggcaaattgggtattggtgactggatctaagttttccctttttccaaccttgagggatgggagttaagttaggaaaatggatattttgtctttctttctgtgtcagagacttgttggttaggagtaggagatgatggctattttgatgtctccgttaatcatagactagatggttaccaggcagctgaaacattttctggcatggttgacttactgctgccctatagggagatagctttacagaggttcccaaaggaaactcaacaatgtgtccactcctcttggatattatgctaggc

SEQ ID NO: 550614 - DNA, 536 bp, Homo sapiens
caaggacttacaacagctcagtagatactgagtaaataaatggtttactttctctggcagacccctctgcccagatccacagtcaccagtgttcctggcaatcatttgttggctgccatgtagaaataaatgacatrtcatctaaggcaaataaggtattgtagaaataaatgacaagtcatctaaggcaaataaggtattgtagaaatacatgacatgtcatgtattgtcatataaggcaaattgggtattggtgactggatctaagttttccctttttccaaccttgagggatgggagttaagttaggaaaatggatattttgtctttctttctgtgtcagagacttgttggttaggagtaggagatgatggctattttgatgtctccgttaatcatagactagatggttaccaggcagctgaaacattttctggcatggttgacttactgctgccctatagggagatagctttacagaggttcccaaaggaaactcaacaatgtgtccactcctcttggatattatgctaggc

SEQ ID NO: 550615 - DNA, 536 bp, Homo sapiens
caaggacttacaacagctcagtagatactgagtaaataaatggtttactttctctggcagacccctctgcccagatccacagtcaccagtgttcctggcaatcatttgttggctgccatgtagaaataaatgacatgtcatctaaggcaaataaggtattgtagaaataaatgacaagtcatctaaggcaaataaggtattgtagaaatacatgacatgtcatgtattgtcatataaggcaaattgggtattggtgactggatctaagttttccctttttccaaccttgagggatgggagttaagttaggaaaatggatattttgtctttcttkctgtgtcagagacttgttggttaggagtaggagatgatggctattttgatgtctccgttaatcatagactagatggttaccaggcagctgaaacattttctggcatggttgacttactgctgccctatagggagatagctttacagaggttcccaaaggaaactcaacaatgtgtccactcctcttggatattatgctaggc

SEQ ID NO: 550616 - DNA, 662 bp, Homo sapiens
accattttttttctttttttttttgagatggagtttcactcttgtcacccaggctggagtgccatggcatgatcttggctcattgcaacctccacctcccaggttcaagcgattctcctgcatcagcctcccaagtagttgggattacaggtatgcaccaccacacccggctaatttttgtattattagtagagacggggtttcaccttgtcggccaggctggtctcgaactcctgacctcaggtgatcagccaacctyggcctcgcatagtactgggattacaggtgtgagccactgtgctcagctttgaagcatttttgatttgaggtttctgactagaaatgctcaacctgtacttctgaaaggaggatattcttttcagtgtaatccttcaggaccgattttgtactcctttcctaaggggaatgaagggtcattcttcttttagtccagatattaggagcactatagtaatgcgatatttggttattatgactgcatggtgtggaaaggtcactggactaaaaaggaactgtaggttctcatcccagatgcatcattaactggttttgtgaccttgggaaaaatcaatgaatttgataaatattccttaagcacctaggtactatgcaagatgttgaagctaaaatgacaataggaa

SEQ ID NO: 550617 - DNA, 544 bp, Homo sapiens
taattcagacattgtggtctgatgtttaccttttgttaagaactggcttcaatacagtaaaatctgtccctgaattgacatatcctatcatattatatcatatttcctcatccctcacgtattagaattccttttgctgatttctcttggcctgatgttttaagcctacactaagcagtttttaaataaatagtcccccaaaattgtttcttgtttgttgtaagagagttttcaaagatattattcatcactctatcttataccatttttctgagaaccataaaagagaagttgtacttctcttgtacaacttttttttaatctgcaagaactgtccgttttataattgaccatgttttccttatyattttggttgccgtaatgtttactgtgtaatatatgacttaccattgtaaaatatatagaatttattgcactttttttttcatcaatgtcagttctggctttgtcttattttcctaactggatattatcattgcttcttttttttttctgcagatgcactgtgttaacaataaatatg

SEQ ID NO: 550618 - DNA, 600 bp, Homo sapiens
gaaagttctcccatgaatggaagattttaacatcttctaacagattagctctgtgcaagccatttaattctttgtggccttgcttcctctatctgtaaaatgggagatrataaatctgcttcccatggctcacataattttaggattatcaaataagctaatcagtttgaaagtgttttaaaaacaaagcagtatgatcatagaaaaataagatgagaagatttccagatatacccataggtaagctactttctgcctgagtaacacaacattgaaaatgcccctccaaaaaggcagagatggagaggatgactgatgtcagagataaagtaagtaatcaatgcacaattgagctttggttggaaaagaagtgtggtaagaatattaggctggaaccaatgaggccagtgacaatattttgtggcttgtctgagagatagctttgcattttaggtgagctttttcccctctgtatattattctgggtggcttattgcctgacattaccaaggagcagaaaagcagcaattctaacttgaaatattaggagaaacgttgagagagaatcagagctggaagggacagtgtatagaaatgagg

SEQ ID NO: 550619 - DNA, 600 bp, Homo sapiens
gaaagttctcccatgaatggaagattttaacatcttctaacagattagctctgtgcaagccatttaattctttgtggccttgcttcctctatctgtaaaatgggagatgataaatctgcttcccatggctcacatmattttaggattatcaaataagctaatcagtttgaaagtgttttaaaaacaaagcagtatgatcatagaaaaataagatgagaagatttccagatatacccataggtaagctactttctgcctgagtaacacaacattgaaaatgcccctccaaaaaggcagagatggagaggatgactgatgtcagagataaagtaagtaatcaatgcacaattgagctttggttggaaaagaagtgtggtaagaatattaggctggaaccaatgaggccagtgacaatattttgtggcttgtctgagagatagctttgcattttaggtgagctttttcccctctgtatattattctgggtggcttattgcctgacattaccaaggagcagaaaagcagcaattctaacttgaaatattaggagaaacgttgagagagaatcagagctggaagggacagtgtatagaaatgagg

SEQ ID NO: 550620 - DNA, 600 bp, Homo sapiens
gaaagttctcccatgaatggaagattttaacatcttctaacagattagctctgtgcaagccatttaattctttgtggccttgcttcctctatctgtaaaatgggagatgataaatctgcttcccatggctcacataattttaggattatcaaataagctaatcartttgaaagtgttttaaaaacaaagcagtatgatcatagaaaaataagatgagaagatttccagatatacccataggtaagctactttctgcctgagtaacacaacattgaaaatgcccctccaaaaaggcagagatggagaggatgactgatgtcagagataaagtaagtaatcaatgcacaattgagctttggttggaaaagaagtgtggtaagaatattaggctggaaccaatgaggccagtgacaatattttgtggcttgtctgagagatagctttgcattttaggtgagctttttcccctctgtatattattctgggtggcttattgcctgacattaccaaggagcagaaaagcagcaattctaacttgaaatattaggagaaacgttgagagagaatcagagctggaagggacagtgtatagaaatgagg

SEQ ID NO: 550621 - DNA, 600 bp, Homo sapiens
gaaagttctcccatgaatggaagattttaacatcttctaacagattagctctgtgcaagccatttaattctttgtggccttgcttcctctatctgtaaaatgggagatgataaatctgcttcccatggctcacataattttaggattatcaaataagctaatcagtttgaaagtgttttaaaaacaaagcagtatgatcatagaaaaataagatgagaagatttccagatatacccataggtaagctactttctgcctgagtaacacaacattgaaaatgcccctccaaaaaggcagagatggagaggatgactgatktcagagataaagtaagtaatcaatgcacaattgagctttggttggaaaagaagtgtggtaagaatattaggctggaaccaatgaggccagtgacaatattttgtggcttgtctgagagatagctttgcattttaggtgagctttttcccctctgtatattattctgggtggcttattgcctgacattaccaaggagcagaaaagcagcaattctaacttgaaatattaggagaaacgttgagagagaatcagagctggaagggacagtgtatagaaatgagg

SEQ ID NO: 550622 - DNA, 566 bp, Homo sapiens
acacatgttttaagcaaatcacaagtgagccgtaaatcacttacaggctcactttacaatctcatctgtaaaaaaargcaccgaatctaacagaagtttattctgagaaggtagtgtattacctctttcatcaaatagaacaatgattctcattaatgggaagatattaaatgtgagattttcaaacaacatgaggttttctgttctttctacaaataattcttcctctaagcaggacatataagtagaatggtacatactttcatggcttgatgaagcttctctgcaaagaaagctggtttgcttgtggcgcacttcactgttagagaagaaaattttagttgatgtatttaccatgaaaaaaatgaaatatccatatgaaagaaacaggaaatatagaattttgccaacagtgttctatccctcatcatcattcttcacctctcatctcccaatatagggcagttaacttctgagaaggtatttgtgactctctagatggtggttttgaatattcttttccctgacgatcaatttttttattaccttaaatacatctcaagagc

SEQ ID NO: 550623 - DNA, 566 bp, Homo sapiens
acacatgttttaagcaaatcacaagtgagccgtaaatcacttacaggctcactttacaatctcatctgtaaaaaaaagcaccgaatctaacagaagtttattctgagaaggtagtgtattacctctttcatcaaatagaacaatgattctcattaatgggaagatattaaatgtgagattttcaaacaacatgaggttttctgttctttctacaaataattyttcctctaagcaggacatataagtagaatggtacatactttcatggcttgatgaagcttctctgcaaagaaagctggtttgcttgtggcgcacttcactgttagagaagaaaattttagttgatgtatttaccatgaaaaaaatgaaatatccatatgaaagaaacaggaaatatagaattttgccaacagtgttctatccctcatcatcattcttcacctctcatctcccaatatagggcagttaacttctgagaaggtatttgtgactctctagatggtggttttgaatattcttttccctgacgatcaatttttttattaccttaaatacatctcaagagc

SEQ ID NO: 550624 - DNA, 1041 bp, Homo sapiens
actggtagtcccaaataaacctcctgcattacaaccattttattagtatacgtttccagtgcaattgaggctggctactcctacttctgagtgcccarcattccaacaacagagaccaaggctgaatctgtaatatgtcaccatttcctatagattccagtaagttccctcataatgatgattacattaaacccggtccctcatacagggcaagacaatatagcctcacagagtgaaaagatatttctggtaagtatttgcagtctaaacaaaaagctcttccaccagcatcatacttaggactttatggaatatgtaacccattgtatggtattctcataaaacaacatctctgaccaagggcatactaaggaatgatggcagtggctcacagccatcgaattcattagtctttctctgtgctccactaataagaagaagttagattgatattatgatgaaattttgttgaagatttaactaatggcattagctgggagataatatcatgagatagagatactaacctaaaaggttcagtaatatgtcttagaccagtgcccggttatctcatacccagaatgtacaggtcggacaagagatgaaaatatgtgtgactactctaaataatgtactttataacacttgaagatgattgttgcctgctttgacatttttaggcattgatcagttttcaggtccttgtgtacaagggaggatttttttttcccccactgtaggacagaatcatgggtctacttaattggatgctgacaataccacctgcaattttaggttcctcattctgctgtaccaatagttaaagaaggagtcagtgttcttgactcctataacaaagtaggaatgtggtttctggtatacaatgagggcaaggaagactatttctaaaacacgggagattcattgagacaccttttagtattctcttgacaaacggttgttgtcaatgaaaaactaaagcaaagtgctgtgggtgattaaagattgcatggattgggtggtagaaatagatagctgtga

SEQ ID NO: 550625 - DNA, 1041 bp, Homo sapiens
actggtagtcccaaataaacctcctgcattacaaccattttattagtatacgtttccagtgcaattgaggctggctactcctacttctgagtgcccagcattccaacaacagagaccaaggctgaatctgtaatatgtcaccatttcctatagattccagtaagttccctcataatgatgattacattaaacccggtccctcatacagggcaagacaatatagcctcacagagtgaaaagatatttctggtaagtatttgcagtctaaacaaaaagctcttccaccagcatcatacttaggactttatggaatatgtaacccattgtatggtattctcataaaacaacatctctgaccaagggcatactaaggaatgatggcagtggctcacagccatcgaattcattagtctttctctgtgctccactaataagaagaagttagattgatattatgatgaaattttgttgaagatttaactaatggcattagctgggagataatatcatgagatagagatactaacctaaaaggttcagtaatatgtcttagaccagtgcccggttatctcatacccagaatgtacaggtcggacaagagatgaaaatatgtgtgactactctaaataatgtactttataacacttgaagatgattgttgcctgctttgacatttttaggcattgatcagttttcaggtccttgtgtacaagggaggatttttttttcccccactgtrggacagaatcatgggtctacttaattggatgctgacaataccacctgcaattttaggttcctcattctgctgtaccaatagttaaagaaggagtcagtgttcttgactcctataacaaagtaggaatgtggtttctggtatacaatgagggcaaggaagactatttctaaaacacgggagattcattgagacaccttttagtattctcttgacaaacggttgttgtcaatgaaaaactaaagcaaagtgctgtgggtgattaaagattgcatggattgggtggtagaaatagatagctgtga

SEQ ID NO: 550626 - DNA, 1041 bp, Homo sapiens
actggtagtcccaaataaacctcctgcattacaaccattttattagtatacgtttccagtgcaattgaggctggctactcctacttctgagtgcccagcattccaacaacagagaccaaggctgaatctgtaatatgtcaccatttcctatagattccagtaagttccctcataatgatgattacattaaacccggtccctcatacagggcaagacaatatagcctcacagagtgaaaagatatttctggtaagtatttgcagtctaaacaaaaagctcttccaccagcatcatacttaggactttatggaatatgtaacccattgtatggtattctcataaaacaacatctctgaccaagggcatactaaggaatgatggcagtggctcacagccatcgaattcattagtctttctctgtgctccactaataagaagaagttagattgatattatgatgaaattttgttgaagatttaactaatggcattagctgggagataatatcatgagatagagatactaacctaaaaggttcagtaatatgtcttagaccagtgcccggttatctcatacccagaatgtacaggtcggacaagagatgaaaatatgtgtgactactctaaataatgtactttataacacttgaagatgattgttgcctgctttgacatttttaggcattgatcagttttcaggtccttgtgtacaagggaggatttttttttcccccactgtaggacagaatcatgggtctacttaattggatgctgacaataccacctgcaattttaggttcctcattctgctgtaccaatagttaaagaaggagtcagtgttcttgactcctataacaaagtaggaatgtggtttctggtatacaatgagggcaaggaagactatttctaaaacacgggagattcattgagacaccttttagtattctcttgacaaackgttgttgtcaatgaaaaactaaagcaaagtgctgtgggtgattaaagattgcatggattgggtggtagaaatagatagctgtga

SEQ ID NO: 550627 - DNA, 501 bp, Homo sapiens
aggtcagcagattgagatcatcctcgctaacatggtgaaaccctgtctccactaaaaatacaaaaaaattagccgggcgcggtggcgggcacctgtagtcccagctgctcaggaggttgaggcaggagaatggygtgaacccaggaggcagaggttgcagtgagccgagattgtgccactgcactccagcctgggcgacggagtgagactccgtctaataaaaaaaaaaaaaagtatttcaataggattccctctacctcaagtaccatctcctctgagagctcatctctcttaatcaatttgcacagtgcttagcatgtagttaaagctcaataaatgtgagctatgttcaactgattatagttattatgtgactttaattattaagcagtactgttgataatgttaattctactgggctccttagttttctaaactgggaaccattatatgtggatctcacccatatttgatttaaccactcaggctatctcaccgacc

SEQ ID NO: 550628 - DNA, 347 bp, Homo sapiens
ggtgctgtatttactttgtggaggcacagaagaagtcagaatcaaagaaacactactttgagagaaaaaactcagtgttaagttaaaaaaaaaaamaaccataaagcacctatcttcttgcctgcagtcgtttctcccaaaatcaccaagaatcagagccaaatgtacaaataaattacaacccacccaccttcaggaagccttgctaacttacatatgccatcatgggactcggaagggctccccttccaagttggcagaaccagcatgccaccactgtccgtgtcaggacaagagcctcaggcaaagatggctgtttgaaacctctttcttcttcttcttctttt

SEQ ID NO: 550629 - DNA, 596 bp, Homo sapiens
tcctctctttctcttcttttccccctcccttcttccttttttcttttttcctctttccttctttctcattccttccttcccataatttaaagaacatatttccagtcaacactgttcatttaaggtagacctataattaaataaactgtaattctcttggcctgtwtgttaaccccaggatcctatagaatgcacgagggaggcctggattaaatgtcacataggattagcacagtttacttctcagggaaggaatctggggtcgtgttttactctcatggtgcatttatattttgcttgatttttacaaatacatgacacaatcaatactgtttagttttggttttctgaaagtcattctaacggtggaagaggctgtggacgaggggactgacggtgagcatgatgaaggaagaactcggcaggtggactgggccttcgaggtcattggccagcctgtgtgtggccagatcagcttctggggagccgtgcaggagcagcacagaccgtgaggaggagctggttgggaggaggcagagaatggagaagggtgtgcagtccaggggccaaacacacatattccacaggctacagga

SEQ ID NO: 550630 - DNA, 893 bp, Homo sapiens
atctcaggtaccatggagcaaagagttaacagccagggtttaatccacagacatgaattcagtcaatctacagaggccatgctcaagagaatgtccactagcatatactactgctcaaaattgtttaaacaccaatatcatttgagctattyataatggaagtctgccagcttgggagggattcagtcatgagccaggctcaaagataggctgctctcatggagctcaggataacctccaggcaggtccaatttccccaatttgtggtacactactgaaggggctctgtggggctgttgcacattctacaggtcaggttgaaaccttatgggttgacccgtatccccagtgcccaacttaagtacaagcaaactaacaaacacagccaaagggagtaccaatattttattcatttggcagagactgtaccctggacctggggcagttgtagtaacaccagtggggaatcttggagtcttaaatacatctgtaggtcctagctaagtacaaatctcctagtaatgagagttgggaactagtacggtggtggctgtgggtcacttttggagtttgtaatttccagaagtggctaacattctccagatgtaacttgctgtctccacaaatagcaacccacacatttccactactcaaccctgtatctataatttccaattcctatctcagcatgtaatggggattaagcaggcaccctttatatcctgagtacacaggcagggtctcagtctctggcatcaggttgtccaagtactcttgtgcgcaaattaaatgtctagggcatttcaatgggctttcagtcgttaagggatcatatttagtaatctgttccttgattaagcatccaagtcaaagaggttggaggaacaattgaa

SEQ ID NO: 550631 - DNA, 553 bp, Homo sapiens
aaataatatgatataaagaaagacacagaaatagtggaacaatttagaaattgctgtagtcagtatttaaatatattcactgacgtgagatatgagaaatgcagaaaagaaaaatggttttggaacagttagtctaccagtaatgaggaaaacagacttcatactctatccctataaaaaataaggagacatgtacaagaatgcccccaaactggaaataacccaaatgtccatcagcagtgaagtggagaaatcaattgtggtgtatccacacgacagaatgctgttcagtaaaagagaatagcccactgatagacaaaacaacacagactgtgacataatactgagtgmaagaaaccagacacgacagagaacatatacagtcaaaatgtatgtacggtgatagacatcaggaaaactgttttctcggaagaggggcaggtataatgaggaagcagcatgatagagccctagggtgctggaaatgttatacatatataatatataccacgctccagcctgggcaacatagcaagaccccatctctaaattt

SEQ ID NO: 550632 - DNA, 2201 bp, Homo sapiens
  misc_feature 1176: n = A,T,C or G
tacagaagtctacaacgatgaaagtgcatggcaagcgtggccttggggaagtagagtgggaaggaagtattcctcctgtgcctggcctgctcctgtggccgcagcatccctgggcgggacactcttatctgcttcacttgaccaccccttctgcttttcccatctctgtcccctgcctgctgtcagggacccatttgctttgctcctgctttgtcctgcaccgtatatccaggtgttgccctaaagccctttcctggacacctagaggatgccttttggaaaagcctcagacaggtgaagcctggggttactgtaatctcatctgacccagtccttaccctaaaagatcagctccagcccagcttctcccacaggagcccagattctccccagcctggagcctaaagcttgtatctgggaatttaagtcttcttaatgtcttgattcctggctctgactttcttccctgctgctaccctcctgaggtggctcaggccagaacccttgaaggcaggtcagggtcagtgtatgagcttggattggagtaggtgaaggatggaagaggcgcattggaagggcaaggaagaggtactggcaggaccactgaggatcgagacttaaggtgattgctgtgcctcaggattcattttggctatgggggaggcagtctattccctcacctgcagaataccagggatccatgagcccctcacaccaaggttagagaaggaaagagatgaggagctgcatttctgagaagtagttaaaatctagatgctcccctcacctccaagcagggcagcacttcctggaacatgccctttttcatccccatcagagcaggaaggcgtgggtggctgcttggcagacgggtgtgacttcaggggcagatactcctagcctggatgaacaggatggggctgaatttggccaaaggaggaagaagagctactcactgtctgcccctgcccatcctgtctactcctaaccttaaggccaccttgattcctgggctggctccacatctccagcctccagcatctctttccagagtcctatgcatgcccatgtgtcagaggctttctgcctgagctgcagctttgagagggtttgtgggtgaagataagtatgtgtgtaggaattggcttctctgacccaagtgccaactcggggctntgctggcctggggtcaggtcgtttgaggttccaggctatattctgtaagagtcgggaagacttttgcataggggctgttactgtgactgctccctctccttgcctgtctgtctcttatcccactgctcctaacactccgtactttgtagatcctcctgtagctataaggagagggtgcattgtgctgggaggtagagagatttggggtgcttatggtagcaaccagaggaacttagctgagctttatacatttttcttaaataataataaaagcaagcaatattcattacaaacagctcagaaaacattgcttgcatacatgtggagtcttcttgtgggctttttctttctatgagtacatgtacattacatacacctacctgtagaagtcagattttcatggagctggcagcttggaagcagggtggagctggtgttttggggtgaagatgagctctgaggctgtgctctgagaggagctttgaaagcccgcaagggaggggagaagagggggatttttcccctctctggagctggtttgggaggaagcaggaggcgaagcagagcaaggccagactgcagggagctggagcctcagtggtatgtaccagccgtgtccaagagtaacagtccccaagttgctccagggcagatggggctcactggggctgccttctctctggggggtcttagggtgggaagggattcacttcccttcagtgtttggagagggctggctcatcctttggctgcctggaagcccagtaactgttgttgagatggggggcagtctcttccccattgttagtccctacggtggggcttccctaaggagagtcccaggtcttggccagaccagaagctcatgcaagcgtatgctccagccccagtgaaatgagtccttccccaggatcctgtgaggcctcccaccccattcacacagggagagctccgamaggaaaagagaggttcttgccttatagggccacccagcgcccagcctctcctggtctcaagccctagcc

SEQ ID NO: 550633 - DNA, 535 bp, Homo sapiens
catctctgcaacagattttaaaatgcacgttcttaaggtttcatagtgaaagttcagggtagatggcctaggcctaccttttaagggattctgatgctgcaaaattgaaaggtggggtttttgtcataccagggagcacagcactaatggggttaatgaaaattgcctctttttcctaaccctaaacacatgtgcacacacacacacacacacacacacacgcacacacggttcagctttcatttctcatattgcccaagrgggtgtaaaataaaaagaggtcagccaaaaaactgtctgttaaattagacttgcaaaaatgctactgacaaacaaacaaacaaacaaaaagtcatactgtgctcctgttgtacataattttacagcatacaatcttcttaatactgatcctagccccggcgccacattggagacatacatagcatagtaacccacctaaaaaaagaataaaaaacaccatgaggtataataaacactttgtttgcacaaggctattaatatctcagggtttttt

SEQ ID NO: 550634 - DNA, 512 bp, Homo sapiens
ataaatatacctgatgtggcatacaggatcttcttttttgagtaggggttatagccatgggatatgaaccactgtaggcacacgaaatatccattgcatctaaagaagtcatgttcattctggatggttctgagttattggatgcattaatatgactgttaaaacttcgaaaagcaacagcatttcttttagaggctaacgttttcagcacctccaaaggaggacctaacattttttggttactctcttgtacagcagggttctcgacaccttttggtgaggtcttttcttggcaatctggtgttacaataagtggatcttcaatatttgattcttcaaaagaggattctttratgcttctatctgaatctaagggctgactttctaatggactttccattatagaaattccaggaaaagatgaatcagagttcatagaaatatttttagaagctctatcatcatcagaacatagaaaactagaacttaagtagtccctcttactattcttt

SEQ ID NO: 550635 - DNA, 542 bp, Homo sapiens
ccgcctctggaattagcagaacctgcctcgcctcctccctctgccctcctaaggtgaaacccgctcttccctagatcaatgagaagactctattcatttcccaggaaattaactgttctaatttgcagagttaaataaacgccagagctctctgacctcaatcaacgactaatgagacccacagagccttctctctcttcctctctctcgcatgcgctctcgaggtggaaatgtgcggtgtggctgaccacaggcgggactaggtaggtcaatgccaccccaccgaggacccacggtgtcaggggaccctggggraggacccgggggtttaaaaggctagagcagctggacagagccagcctggaggagagacctgggacacttccccacagcaggggcaggaagaggagctcccctggctcccgcctaggcctggagcctgtgcaccccgccctgcccacatactgtcttcacgccacagccctgcccacccctccagccacctggccgtgtccccacactccctcccagcacaggacctc

SEQ ID NO: 550636 - DNA, 769 bp, Homo sapiens
gacggcgtcttgctctgtcacccaggctggagtccagtggtgtgatctcagytcaccgcaagctctgcctcccaggttcacaccattctcctgcctcagcctcctgagtagttgggactacaggcgcccgccaccacgtccagctaattttttgtatttttagtagagatggggtttcaccatgttagccaggatggtctcaatctcctgacctcgcgatccgccctcctcggcctcccaaagtgctgggattacaggcgtgagccaccgtgcttggcctgaatggtctccaggccatcttgatgcagcctggtggtgaggagagggtgtggtttctcctttctttgaaaatcgtggcccttgtttaggtggggaaaatgtttcaacagtgcattttggaaagagaattagataaccccaagttctctttaagttgatattttagatgtactttatagaggtattgagagtttcagatagcttattcttgatagcctttttgttgttaatgatggctactaagattctggatcccacacaatgggattgtcaggaagggagtctactctgccactgttcaataagtaggtgcccatctgcttgccatgaagagcagcattcacaggaagtgggtccataaaaatcacctccaagggtcctgacaaagcttgggtagtttttgatggcctataggcactttctgtacttggcctgtgtggtttttgagtggccaacttgggtccctttggtttctgggtttactaaggca

SEQ ID NO: 550637 - DNA, 769 bp, Homo sapiens
gacggcgtcttgctctgtcacccaggctggagtccagtggtgtgatctcagttcaccgcaagctctgcctcccaggttcacrccattctcctgcctcagcctcctgagtagttgggactacaggcgcccgccaccacgtccagctaattttttgtatttttagtagagatggggtttcaccatgttagccaggatggtctcaatctcctgacctcgcgatccgccctcctcggcctcccaaagtgctgggattacaggcgtgagccaccgtgcttggcctgaatggtctccaggccatcttgatgcagcctggtggtgaggagagggtgtggtttctcctttctttgaaaatcgtggcccttgtttaggtggggaaaatgtttcaacagtgcattttggaaagagaattagataaccccaagttctctttaagttgatattttagatgtactttatagaggtattgagagtttcagatagcttattcttgatagcctttttgttgttaatgatggctactaagattctggatcccacacaatgggattgtcaggaagggagtctactctgccactgttcaataagtaggtgcccatctgcttgccatgaagagcagcattcacaggaagtgggtccataaaaatcacctccaagggtcctgacaaagcttgggtagtttttgatggcctataggcactttctgtacttggcctgtgtggtttttgagtggccaacttgggtccctttggtttctgggtttactaaggca

SEQ ID NO: 550638 - DNA, 549 bp, Homo sapiens
ccaagatcatgctactgcacttcagcctgggcgatacagtgagactccatctcaaaaacaaacaaaacaaagcaaaaaaacaccaaaaaaccaagaatgatgctaaatggatttgtgtgtgtgtgtgttttgctaccatatttcctgttcaatagggtcaatatttattttcccatagagaatgtcctctgaagccttaagatatgttctgtatgtggaactactctttattgtactgaaccaataattgaatatcagctatgtcattttcatttaaacgtaaaattttgttttttgaatagataatttctttattgggttcaaaattcaaaaaatgcttttagtgaaaaagataccctccaagtcctgtccttcagctatacagtatcatttcttgtaggaaatctgtttctaattccttgyatacccttggttctcagataaatacgcatatacaatgtcttcttttttatattcagattgcatcatacaatatactctttagcaccttgcctttttaaaaacttaacaataggtctggcagagggt

SEQ ID NO: 550639 - DNA, 644 bp, Homo sapiens
tggtctttgtgtctggcttctttcactcagcataatgtttttgaggttcatccatgttgtcacaygtattagtactttgtttcttttcttgccgaatagtagtctattgtatggttatatcacattctgtttatccatccatcagttgatggacctttgggatgtttccactttttcttatttttttttaaattgacaaataaaaattgtatacatttatgatgtacaatgtgatgtgttgatatatgtttacactgtggaatgagtaaatcaagctaatttacatatccatcacttcacatgcttatcatattttgtgataccatctgaatttttgtattacatctctttctgctatatcagccaaaaaacagattctaaataaattgatcttaaaaccagatgatcaaatcattatctcaaagggttaaacaatgagtttaacaaaattaagcttattgctctcagaagttatacatgatcaataaaaccttatgctgttaattggtttttgtgctgttaataaataaaattaattagtttattaatattatttttaagtttatcatatatttaataataaatatgaatatttaaatttataaatgtatctattgataaatacttacaaattttaaaataaa

SEQ ID NO: 550640 - DNA, 605 bp, Homo sapiens
gtgctttgattttacccaggtatgagggtctggaaaatttcttatttaaatatacgggtatttttatggggccttttaaatctttgccttaatactgtagtttcctccatrtgtttactgtcaactaacagcttagaactgataagccatgtggaaatgttttgtaaagctgcggttcttctttgtgactactgcttcttttattaaagtcgaacttcttccaaaaaagaatgcaatttgtttgcatattcttgtctgcaaaatatggccaagtatgggtaccttttacatgataggaaagagggtttagttaggtgtcttttagtgtgattagaatggatgtgacatgcacatgcttgtgttttgggaagatcactggctgcagtgagggagatgagatgaggttggagccagggagactaaaatggggagagttacacaatccctgggagaaatagtgatggactggatggaggcagtaggagggaaatggggaagagggaacagaattcaagaatgtcctgggaagtagattcattggaagggtgtaccagggaggaaaaaggatttattatgattcaagcatcttccttggttaatagtaa

SEQ ID NO: 550641 - DNA, 605 bp, Homo sapiens
gtgctttgattttacccaggtatgagggtctggaaaatttcttatttaaatatacgggtatttttatggggccttttaaatctttgccttaatactgtagtttcctccatatgtttactgtcaactaacagcttagaactgataagccatgtggaaatgttttgtaaagctgcggttcttctttgtgactactgcttcttttattaaagtcgaacttcttccaaaaaagaatgcaatttgtttgcatattcttgtctgcaaaatatggccaagtatgggtaccttttacatgataggaaagagggtttagttaggtgtcttttagtgtgattagaatggatgtgacatgcacatgcttgtgttttgggaagatcactggctgcagtgagggagatgagatgaggytggagccagggagactaaaatggggagagttacacaatccctgggagaaatagtgatggactggatggaggcagtaggagggaaatggggaagagggaacagaattcaagaatgtcctgggaagtagattcattggaagggtgtaccagggaggaaaaaggatttattatgattcaagcatcttccttggttaatagtaa

SEQ ID NO: 550642 - DNA, 656 bp, Homo sapiens
tatctgttgtaccaaagaggacttggacaggagtatccattgttcatggggaattcttaggaatatattcaatggaaataaccaaatgtgtcggtcacatttgattctatcacagtcaggcaggtgtggcagggtcaaaaagggtataacttattttacagaaaaacatttttgatgggacatgtagattcaaattagcatgttgggattagaactagtagacttgactgaaagtcggwggggctgtttatataatttcttcttctcgaatacatggtctttattatactaaattacaatttgcatcattcaaatgcaaatgaattttcaaaagccctgtgtgggcttcacgtaattcttttgggcaagcattgctcaatgtttcacttactcgaaaaggattcagtgattcaactgattccatgaaaaaaaaagtgaatttgaaagtgctgttcatattggaagggatggtataatcatatcaaattcacatctggttttattttgctgactgtttctcctcttggctttcctaaagtatatgtgccctatgggatataatgctctttacttgactttcccttatttcccggagtctgattcttctcagagttatgctcccaattaaatattgactataaaagtaaggaacacaa

SEQ ID NO: 550643 - DNA, 556 bp, Homo sapiens
caattcttacccctcctacacacctatctatccactcatgactgagggtatatagtcaaaattctggtccgtaagttatttggattagtgtccttttctccctctatttttttttctctctctctttcttttcttctttctatcctccctccttccttttttctcartctccctctctgcctccctccctcctttccttctgtgtgattatggcattcctttgacatatatttgtgtttattgtcagcttgctttcagtgtttgagtcctcaccccactttcacattctcactgattttattttactttgttcaatgtgtagactatcaacatgtttccagtcaaactatgcaaaaagtatgctcagggaaatgtcactccttcctgtgtcgtttcaccccatttcacccccatccctacccttgtaggtaaccaacttcactgttttctggtttacccttccttgtttcttcttgtaaagataagcagagattgcatttcccccccatcttccctgttttcttacacaaaaggtaatatgtgtgtgtgtggctct

SEQ ID NO: 550644 - DNA, 892 bp, Homo sapiens
gccatgttggtgtactgcacccattaactggtcatttaacattaggtatatctcctaacgctatccctccccctcccccacccccaccccactttaccctctgaaggttctagggagaaagcctttcatgccggtgattcctggtgttccttggcttgtagctgcattacttcaatctgcctctgatgtcaaatggctttcttccctctatgtttctgtaatctcctattcttataagggcttgaatttagagcccagcctattctgatatgaacttatctaagtttaaccaattatatctgcaaagaccctatttccaaataagatgatgtctgagattctgaatgaacatggatttggggaggacactattcaacccagtataatatttatattcatatctatccagtgagtgtgtgaatgcatcaatacatgaatgtacamatgaacaaatgtatgaattcaaggctatgtaagtgagttaaacaatggatccgatggcagaaaatgatactaaaaagagagaaggattcaatattatacataccaaattaaagttgatggtatatcttacaagtggagttctcacaggcagttggaatcatgtcagttgaaacatgtcacttcactgctactacccttgtaatataatattcttcacagtaatattgctctattatcctcctccacttattcatattacattacattcattctacaagcctcagttcatttaccatctcatttggttatttcagtccacacgatttttattttttaaaattcctcttgcatttatttacatactcctaatttgctttttttctattttacttcatgtattgattcattccatatatttgaggttctaatgtaataggcagttagaatt

SEQ ID NO: 550645 - DNA, 994 bp, Homo sapiens
tgtgcttttagaggacttcatttgctccagggataagacagacttcataccacctccacatgaatgtttttttggataaaaaagaattggattataagagactgtgaaaggaaaataaaatatcaggaacccaaactcactatgccaaggggaaaagtcaggcttatgggaactgagtcatgaaaatactgccttccttttatttgcaagcagctgcaatttcacatgcttgtttgtcttatgtaaaatgtagatttactgagtgctagatgaatacataattgacttctcctccactcttttcttttcacaagtaaaatgtacattcatgcagcacacatcagagccacatgagaatgtaagcacttgcctcatttctttactctccctccttttatttttctgtcccctccatcttgctctctcccctttaaatattgaagttcccaaaaccctctctttggaaaacacacaggacgcaggtcctactgtgacttgtgtttattttctctgggcacagcctcaaccttggcaaaaatcatcctctaaatcgatggagatctgcctccatcactttttggtttacagaacctttgagcaaaagcagaaagactagttaggagattgttatgctagtcccagcaaagttgatggtttgacatggattaaagtagaagctatgcagtgccacggacacacagatttattgcatgcgaagacccaactattgattaattattaaagacatttttattccttgagcaaataaaatgttttaacaacacaggaacaaactggggaaatyagagtgtactaagaagcgtcggatggccaagggcacattttcagtccccttagcaaacttgtaccctagtagtatccgttattactgggccattgtttaaagggtcctatgatattcatattatcatcttggtgggggactgccttctgttatcatatcctagctattcagattacagaaactgactca

SEQ ID NO: 550646 - DNA, 1858 bp, Homo sapiens
ggatgaagaaacctactggtttccagggaagggtaccaaccagcaaactatctaactacaaggaatcattagagactagtcaatgtaatcaaaatttaatacattgcaaaaaagattcaatatttttctgcaaatgtcaagttaccttggggatcagcaccccttaattatgagatcttagactctaagatccctcagactgtgacttataaatgtgaagaacagcagcttgtttcttaagtggagtttgctcattttaccacgtttataacgaagataataatcttgagccaatcattgtgggtccagttggtacatgggtagtttgctttctgtgggataagtatgtgtgtgtgtgctcatgaacgtgcatctacagatatgttgtatgtgtgtttactatatatatacacatatgtgaatatacatgtatatataacttttgtatacaaataaatatattcatctggatcatttaatctgacaatttaaatatttgagcaataatattctcatatgtctcatctctacttgactgtatgtttataactttgacttgagcatgattagttactgagaaaaaagattaagggagtgagaaaaagcaacaagagtttaagtacagcaattttgaaaaactgtatggaggctcctaaaaaagaaactaaaaatagaattaccatatgatccagtaatcccagttctgggtattttcccaaaagatttgaagtcagcttgtcaaagaagtgtctgcactcccatggcctctgcagcactagtcacaatagccaagttatagaatcaacccgtgtccacagcagatgaatgaataaagagcatgtggtatgtatacacaatggaatactatttagccttaaaaaagaagggaattctgacatttgcaacagcatttggagagccttatgctaactggaataagccaagcactggaagacaaatacttcatgttctcatttataggtaaaattgaaaacaattgaattcatagaagcacagagtagaatggtggttacagaggctggggagtgagaggaaaggggagataatggttggaggctacaaaatctcagacaggaggaatatagtgttctttttagttctattgcacagtgtggtgaatatagttaataagagagtattgtacattttaaaattgctaaaagagtatatttcaaatgttctcaccacaaaaagtgttaagtatttgaggtgatgggtatgtgaactagcttgatttaattccacattgtattcataaatcataacatcattttgtamcccataaatctatacaattataagttatcaatttgcaataaaaaggagtagaaggtaggttactaaaaatagtttcacacacagtgatgaagaacaggccatcatcatgggcttgttctgtgacctgtgaattaacctcaggttgttttcctccatggaaattcattaaagaaagatggaatccagtatacagtagattccaataataatttaacttgaagtttcatagagatatgatttatcgtggcctgatgaacaagatgtagttatttccctcttatatcacttcagctatttgggaaattggataagagagaagattcattatatacagtatacactgtgtatatctgtatcttatacctacagatgctccactttttaacagagaaaaaatatcttctggcatatctgcaatatcccgagttgctcttcagcaacccttaagagtgtttgagttagtacctacgaacccactttaattctgagaacccttcaagaatattctgcaccgctgtggcgtggagttttatcgagcactgtatgaaatagaaaatgc

SEQ ID NO: 550647 - DNA, 546 bp, Homo sapiens
tcatttgctattgtagtaaatcctctagtttaccttgtattagatyaattaaacctagagtcataagactttgtttcaaactaactgtgaacttggaccaatcaatcagtcactaagcctatgagttagtgcatttcaaggtcaatcaaaagtttatctcatgattaccagtttgctcttaaatagtaaaataccatatttctgctaagttgcacgtatttatttatttgtcatttaccaacttaaaaacctctccaagtctaaatttcctcttatataatgttcattcatttatgtgcctatcacaggtatttgtgtcttatactattctagaagttggaaatgcagtgatgaacaagagagagagttccttctcacatgcccttacattttagtggggggcacaaaataatcacatagctatacgacaaggcagttgatatgtgctaggaggaaacattatcagggttgtggagggtgcaatttcagataagaagttagggaaggctgctctgttgagaacagacctctgaaggaaagaaggca

SEQ ID NO: 550648 - DNA, 546 bp, Homo sapiens
tcatttgctattgtagtaaatcctctagtttaccttgtattagatcaattaaacctagagtcataagactttgtttcaaactaactgtgaacttggaccaatcaatcagtcactaagcctatgagttagtgcatttcaaggtcaatcaaaagtttatctcatgattaccagtttgctcttaaatagtaaaataccatatttctgctaagttgcacgtatttatttatttgtcatttaccaacttaaaaacctctccaagtctaaatttcctcttatataatgttcattcatttatgtgcctatcacaggtatttgtgtcttatactattctaraagttggaaatgcagtgatgaacaagagagagagttccttctcacatgcccttacattttagtggggggcacaaaataatcacatagctatacgacaaggcagttgatatgtgctaggaggaaacattatcagggttgtggagggtgcaatttcagataagaagttagggaaggctgctctgttgagaacagacctctgaaggaaagaaggca

SEQ ID NO: 550649 - DNA, 1066 bp, Homo sapiens
gaggggctgctgaggcctgcggagaggccagggtggaggctcgtccccttgtccagcccttggcatggtctccatcaggttcccagcccaccagtgcagggcgcccctgagcctgctgctgccacgggcccggtctctacccaggacgtccccccaccctcgcagtgtcagggaaattatcatggtggcggtgacactcygcaggcagggctgctgagagaagctgagaagggtcacactgcaggcaggggcccatgtgacaagcccctctcaccccgagagagctgaccaggcagctcacaagcagagccacatcctgggagtccgagaaaggtccgagaaagctcagccacctcattggctatgggcagcctttgtcgtgtgagccttgctctcctggggaggctcaggctgacggctgatgtgggcattgccgagggtaacctgtggcccagtggatatggccgggtctcctcaagctgcattcattcaagtaggacccagggtgcgtgcccatctccagcccagggcagctcccctgtaagctgggtgagctactgaagccaaggcgggaggcagctgacaacacccacggcccatgtggaggtggtggaaaggctggactcagcagcaacaccaaatcccggaccaggcagaaaccacccaagactgaggggctcatgccagagcggtggccacaggtaagaacccgggcccaggctgtgtgtggcgggaatcctccatgtcccagggcttagcatagcaaaggaagatcagctgggtcaccctggtggccatctgtccctgtcccacctgtagagtcagaacagcctctccccagtggggatcatctctctctgccaaagcaacagcggtccctgccccaaccagactaccccactcagtggagttacggatgctgctccagcatcctaacactgcccagctggcgcctgcctgtgctcacccacacccccaggccggccttccctgcagcctgggcttggccaccttggcctgattgagcactgaggcctcctgggcacccagccccatcactgcacct

SEQ ID NO: 550650 - DNA, 1066 bp, Homo sapiens
gaggggctgctgaggcctgcggagaggccagggtggaggctcgtccccttgtccagcccttggcatggtctccatcaggttcccagcccaccagtgcagggcgcccctgagcctgctgctgccacgggcccggtctctacccaggacgtccccccaccctcgcagtgtcagggaaattatcatggtggcggtgacactctgcaggcagggctgctgagagaagctgagaagggtcacactgcaggcaggggcccatgtgacaagcccctctcaccccgagagagctgaccaggcagctcacaagcagagccacatcctgggagtccgagaaaggtccgagaaagctcagccacctcattggctatgggcagcctttgtcgtgtgagccttgctctcctggggaggctcaggctgacggctgatgtgggcattgccgagggtaacctgtggcccagtggatatggccgggtctcctcaagctgcattcattcaagtaggacccagggtgcgtgcccatctccagcccagggcagctcccctgtaagctgggtgagctactgaagccaaggcgggaggcagctgacaacacccacggcccatgtggaggtggtggaaaggctggactcagcagcaacaccaaatcccggaccaggcagaaaccacccaagactgaggggctcatgccagagcggtggccacaggtaagaacccgggcccaggctgtgtgtggcgggaatcctccatgtcccagggcttagcatagcaaagraagatcagctgggtcaccctggtggccatctgtccctgtcccacctgtagagtcagaacagcctctccccagtggggatcatctctctctgccaaagcaacagcggtccctgccccaaccagactaccccactcagtggagttacggatgctgctccagcatcctaacactgcccagctggcgcctgcctgtgctcacccacacccccaggccggccttccctgcagcctgggcttggccaccttggcctgattgagcactgaggcctcctgggcacccagccccatcactgcacct

SEQ ID NO: 550651 - DNA, 1171 bp, Homo sapiens
  misc_feature 858, 859, 860, 861, 862, 863, 864, 865, 866, 867, 868, 869,870, 871, 872, 873, 874, 875, 876, 877, 878, 879, 880, 881,882, 883, 884, 885, 886, 887, 888, 889, 890, 891, 892, 893,894, 895, 896, 897, 898, 899, 900, 901, 902, 903, 904: n = A,T,C or G
  misc_feature 905, 906, 907, 908, 909, 910, 911, 912, 913, 914, 915, 916,917, 918, 919, 920, 921, 922, 923, 924, 925, 926, 927, 928,929, 930, 931, 932, 933, 934, 935, 936, 937, 938, 939, 940,941, 942, 943, 944, 945, 946, 947, 948, 949, 950, 951: n = A,T,C or G
  misc_feature 952, 953, 954, 955, 956, 957: n = A,T,C or G
ttgcataataatatgagtagaattgggacaatgggatttgttaaactaatamattcccattacaaaaaagtaaaacaatatggaaaaatagaaagacaaaacaagcatcacttaacccataatacagagagaacactgttatataacttgatttttttacattcactccttatattgacatcttcccttgccaataaatataattaaatttatctttccatgaaatacagtagactagatgttctatgaaactcctccagggacagtatgcctccaaatgatggtatgtgtgtatatacatacatgtatgtataaatagagagagagactaatacacacacatatacacacacatatatatatattcctgccccacctttaaaaatacatgaatgcatgtttgagttggcacaaaattttatttatttatttatttatttatttattttagagacagggtcttgctctgtcacctgggttggagtgtgctcatagcgcaccacagcctcaaactcctggattcaagcgatcctcccacctcagcctcctgagtagctatgactacaggtgcataacaaagagaggcatactctcctgcctggctagtgttattatttttgtagagttgagctcttgcaatgtttcccgggctgatcttgaactcctaagctcaagcattccttcttcctggtgttgagattacaggtgtgagtcaccacacccagccaaggggaataggaaacaagaaaaaaaaacattaaatgaaaagaataagtgagctgtagagctagactttgtcttggggcctactagggtttcagtaatagggtaatatgggtcactacatgagagatgggnnnnnnnnnnnnnnnnnnnnnnnnnnnnnnnnnnnnnnnnnnnnnnnnnnnnnnnnnnnnnnnnnnnnnnnnnnnnnnnnnnnnnnnnnnnnnnnnnnnntatttgcttgtcatccttgactcttgatggaatagaagaaaaaaacacagaaaagtctttcttggagaatttctaatcttaaacttagacaccatatagaaaatttgaagtctcctagatttgtactgtccctagggctccaataacagcagcagcacatttttccagacagaacatagtttaaaccctggtctcagagaattctcacagataa

SEQ ID NO: 550652 - DNA, 726 bp, Homo sapiens
acttttgaataagatataaaaatgaatgagtaccatcaatgtaatacatgtttttaagaaagtatttttcttttattcacaaaaacaataggtatggtctacctgtgtacaacagatgttggggtggactacatctatttaaaaaataatcaggccgggctgggtgcagtggctcctgcctgtaatcccagcactttgggagggcaaagcgggtggatcacctgaggtcaggagttcaggaccagcctggccaacgtggtgaaaccctgtctctactaaaaaatacaaaaattagccaggtgtggtggtggggcccctgtaatcccagctactcaggaggctgaggcaggagaatcacttgaacccrggaggtggaggttgcagtgagctgagatcacaccagtgcactccagcctgggtgacaagagtgaaactccatctaaaaaagaaaataaaaaaaatcacagaagctgggcgcagtgactcacgtctgtaaccctagcactttgggaggtcaaagtgggcagatcactggaacccagcagttccagacaagcctgggcaacatgttgaaaccctgtctctattgaaaacacaaaaattagtcgggtgtggtggtgcacgcctgtagtcccagctactcaggaggctgaggtgggagatcacttgagtctgggaggttgaggctgcagcgagctgtgatcgtgccactgcccttcagcctgg

SEQ ID NO: 550653 - DNA, 2211 bp, Homo sapiens
  misc_feature 1242, 1243, 1244, 1245, 1246, 1247, 1248, 1249, 1250, 1251,1252, 1253, 1254, 1255, 1256, 1257, 1258, 1259, 1260, 1261,1262, 1263, 1264, 1265, 1266, 1267, 1268, 1269, 1270, 1271,1272, 1273, 1274, 1275, 1276, 1277, 1278, 1279, 1280: n = A,T,C or G
  misc_feature 1281, 1282, 1283, 1284, 1285, 1286, 1287, 1288, 1289, 1290,1291, 1292, 1293, 1294, 1295, 1296, 1297, 1298, 1299, 1300,1301, 1302, 1303, 1304, 1305, 1306, 1307, 1308, 1309, 1310,1311, 1312, 1313, 1314, 1315, 1316, 1317, 1318, 1319: n = A,T,C or G
  misc_feature 1320, 1321, 1322, 1323, 1324, 1325, 1326, 1327, 1328, 1329,1330, 1331, 1332, 1333, 1334, 1335, 1336, 1337, 1338, 1339,1340, 1341: n = A,T,C or G
actcctagagtcaacttattctttatttrcttctttttcataaaatgaagctgatttgtgagaccctttgggccagtgtaataggccaccctcaagagtcatcatcattcttaaagaagttttcaatgcattcactgttgctcttgtccttgacttctcacccccgtttaaataattatttttggtatctgtaacatccataataggatcacaagtaccaatctatgaacttacacccactttcccttctcatctgtacaaatttcattaacaaagtagaaggggattctccctcaccctttcaaagaattttgaatgtattttgtgtgggcttattccaaagcagaactcagcgaacattttctgtaaagcgaagacagtaaatattttagtctttgtggaccacatacagtctctgttatatatactttttttttctttctttctttttttttttttttttttcatttgcagcttgaagggccatacatagataggtcagatttggcctgtaggcgaagttcactgactcttgttccaaagcatatggttctttatcactacagcagtggtctccaaaattttttaaaagtgtatccctcttaaaaaagcttcaagaatgtactcacagcctagatactgaaatgtttatttttatttataaaacattagatgtttttatcaaactaataaattatgtacattataaaacatgctcaaaaatataaatttaaaaagcatgagatgaaatgtgaatgtaaatagaagttctaaaagttctttctgtgccccaggagatcatcttgcctactttttgagcaatctgcatttcatcttggagttctccctgttggaggaaaaagatgatgcttgtcacatgacactggcccacaattttctagaagatcttaatatcagcctttatcttgagcctacttaaacccaagggaacttgattcatttggacctgccaaaataaaggttgaaaaacattacaagaatagacttaaaaaattagttctcaaagctattcagaaaatagactataatagaaaataagctcttcaagattataaaagtctccttcagggtcataatttattaaccatttcatttttttcactggtgaatgtacagtcttttaatgtgatatatcacttgaaatgccaaggctaccttttgggaaacagcatggaatccaggtaaatgcatttacttatgaaaccggactgttaagtgacnnnnnnnnnnnnnnnnnnnnnnnnnnnnnnnnnnnnnnnnnnnnnnnnnnnnnnnnnnnnnnnnnnnnnnnnnnnnnnnnnnnnnnnnnnnnnnnnnnnnaacaacgccccctccctagccttgttgggttttgacagtatcagggtatcagaaaagggaaaaacagtggcatagtaaagtagtaaaagaggctcagagagaagttgttatacacaacacagattagtgacaagctaggctattaacgatccaatattggacccatgacaattttttgtgatatgtagtatatggtaggtactttacgggggggagctaagtgctttacacacatttcctcattcctcctcagtcttatgagataagtaccaccacacccttttaggttaattttctaaatggtgtagaaaaagagcacacaacagagctacttttaggtaccaatcataggcaaaaccaacttgaacaaacatgaagggaaaagaaagtacatttgattcatacaaggaacctgtgttcacacagggtgatggtgcagctgtttcagggcaactggaaataggactgggaagttggagaactctgccacttctctctgctcttcttactatgtgggctccgctccctctttcttcaaagtggctctctcctcatggtgggaaacagagctggcagcaggtgctagctcacgtgtcccaacttccccacctgagagagatactctcttgctaaacctggaccacttcactggccagggtatactgccctgattgtctcgaccctttagatgtctctaacctctgtatccatcatggcctgaagggcaagagagaagcacacacaggccctatgggtgatctcggtgctctagaccaccacagatggtgtgcaatacaccatcctaagaaatgaaatctccttccaggcaaagggaaaggtaataagcagaacattcaagggaaaaaaata

SEQ ID NO: 550654 - DNA, 675 bp, Homo sapiens
attccagaaagctttagtaatcaaaatatagatttaagacacttattcagtcatttcacttaattcatccatctattcatttattcattcattccatctttattgaatacctactatgtgcagtgcagttactccaatcttatccaacattggactactaattagtaagatttttgtaattctgtttttaaattattcctttacatgggacaaaattcaaaaggtatatatatacaatgaaaaggaaatcttgcacccagttccccagccattcacctcacctcctcaaacaacaagaaaaagaacagtgaggccaggcgtggtggctcacacctgtagtcccagtactttgggaggtcaagtgggcagatcacaaggtcaggagtttgaggccagcctgaccaacatggtaaaaccccgtctctactaaaaatacaaaaattagctgggcgtggtggcgtgcacctgtaatcccagctactcaggaggctgaggcagaagaatcgcttgaacccgggaggcagaggttgcaatgagccgagattggatcactgcactccagcccrtgcaacagagtaagactctgtctcaaaaaaaaaaaaaaaaattaaaagagttataataaatacaggcttagaaaagaataaagtctcagaacaaggtaaaggggcaata

SEQ ID NO: 550655 - DNA, 1116 bp, Homo sapiens
gtcacaccagccagccacttttatggcagaaggaaaatcctacctagccccttccccagagatggcagaatgcagcctggctgactggcagagcctctcaggctgtgctccggaccctggactccagcaagggggaagaacagcagctcccagttctttcttacagactgctttcttgaggagcttcaagtgctctggctatgattggtgcagggctctgctgcctccagagggtgctgtctcctttccctagcagaggcaaagggtctggcaggcaactctgggagtattggtttaacctgaaatgtctgctaggaagagctacctacccctctcctgggcattatggtcctgaaggaagagcttggactttggattgaaagtccagccctaccatctacaagttggctggctgagacaagacactctacttctttgaggctcagttttctcgcctgtgagatgggatgatcacaccacaccagttaggcatgaggatggactaagggcaggttcacatgcttctgcctggcatgggagctgtttgctgcttttaccaccatttcagctcttctgctgttctctgacccacaagagctagggttcaggctgcgtgccttgcgcagtagttctcaaatgtgtctatgtggaagcttgcctccaagggcttaccagcaaatccagaccccacacagctgccctgcaagaaggaggtgacagtggctgcgttcttgcctgcacagaggacgggtgtccatagagctcccagctggagttgagcagtttctggtcaagcaatgttctctgattttacatgtctggaagctaccattacmatcaggtcttcttaaatgtcctccctccctccgtcttcctttcttcctttctttctttgtcagatgctgtgtgtggacttgtgctgggatctggaggcggagacaagagctgtgacctagacataggggagtggggaacaaaggtgctcaggcagacaaccaactaggctgctacatctgcctctgcagcagagcatgggagggtggtaggaatttgtcatggcagcagggacatcggagctggggtgcaacagaggagcagccgctttccaggtagtca

SEQ ID NO: 550656 - DNA, 679 bp, Homo sapiens
cagggcttattctgggtttccctccttccatattcatgactgccttctccatgagtgagaaaactggctcccaactttgctcagttggtccccctgcatatacccaatcttccatagcagaactctgcccctccactcattctgtgtggctctgacatccacacttggttgtccccttctgccatgtgcactttcattccacagcacttggactctaacaccctgtgctaggccaccgtgcccctgcckccctgcatggccactctttgtcctattctggctctgacatgccatgccaggctcccccacgccagatgggtgccatctggtacatatcccgtgtgcttagcttagactacccgggctatgatggctactgtcccacccatgcccatgtgctgcatgcatcttatgaaggcatctggtttattctccctgctcatcagttcaatcagcatgtgctaccagtgtagtgcaccagcataccatctgtggatctgtgggatgttcagaagatcaaggtctctgtagaccacactataacagaaagctggaaaacgaacatgatctgggagaagacactgactttgtacttctatccttgccaggtgaaagcaaacttctgctggttcttaccgatatagatggggagaaaacacaagctgagtcaatagctaca

SEQ ID NO: 550657 - DNA, 679 bp, Homo sapiens
cagggcttattctgggtttccctccttccatattcatgactgccttctccatgagtgagaaaactggctcccaactttgctcagttggtccccctgcatatacccaatcttccatagcagaactctgcccctccactcattctgtgtggctctgacatccacacttggttgtccccttctgccatgtgcactttcattccacagcacttggactctaacaccctgtgctaggccaccgtgcccctgcctccctgcatggccactctttgtcctattctggctctgacatgccatgccaggctcccccacgccagatgggtgccatctggtacatatcccgtgtgcttagcttagactacccgggctatgatggctactgtcccacccatgcccatgtgctgcatgcatcttatgaaggcatctggtttattctccctgctcatcagttcaatcagcatgtgctaccagtgtagtgcaccagcataccatctgtggatctgtgggatgttcagaagatcaaggtctctgtagaccacactataacagaaagctggaaaacgaacatgatctgggagaagacactgactttgtacttctatccttgccaggtgaaagcaaacttctgctggttcttaccgatayagatggggagaaaacacaagctgagtcaatagctaca

SEQ ID NO: 550658 - DNA, 1583 bp, Homo sapiens
catcccagaaactaactgacctcaaggtcagactggaattaagttttttctacaaaggtggttaaattaggatatcattcttagagactggcaatgaagattttactgaaatagaagagcaagggatcaatgaagaaatcaccctgacactgtgttcccccaacatttaccattcaaagacatttgtagcagatctacaatgtcaaattagtgataaaaatctatgagagattattctaattttgaattcaaagactgctggaacaatacagtacgcccatataggctactggaaaattttatcaggaaaggaagaaagcatctttaatctaaattttaataaattcctacttgaagaagccttaatcagtctatcccatggaaatcatccaaaaggaacattcattcatatatttgtcaatatttggtttcacctcttatatttttaatttttaaaaactgtattttcaagacttattttcataatcaatttaggtatttttaagttatgaaatgcckttcttgcaatgaagtgccaatatagaactgcacctacagaaagtaaggatttaacttacaactcttgactgttgcaaaacaaactaaatcacagattgatttaacatataaacatagagcattattaaatttggtgatgtgtggtatactgccaaaggttatcaagttaaaacttaaattcaatctgcagtagttcaaattgcgaatttaaaatggtagtcagcaaaaatttctaatgagtctcttccatatttaatgggtttcgaggaagctagatatggggtggaggttacagaggcaagaatagagtccacaagcagctaatttttaaccgtatttaattaaatatacaccccaaagagtaaagtctcacataaatttcattttatatggtcaacaatgatgtacaactgagctatatctaagttggagtagctttctttaagagtctttacaaaataattcttagaactattttagaagaatgttaagactttcaaatcaacattcctggaaaatttcagcctttctgctttcagctaaggaactcatacctactcaccaggttaaaatttcatctatttgaataagcctgagagatgccagagagtcacaggatgaaacgtcaggatataccattagttgcttccccaaattagtagaaagaaattttattgaaaatttctttaatttctataaaattaaaattttatagaaattttattgaaagaaatgcctttctttcaataaaagaagggaaaactttgttatgggtacatgtgcagatactttttttttggggggggacagggtctagctctgtcaccctggctggagtgcagtggcacaatcatagctcactgcagccttgatctcctaggctcaaaggatcctcccacctcagcctcccacatggcaccatgcccagctaattttttttttttaaagacggggtctcactacgttgcccaggctggtcttgaattcctgggctcagatgatcctcctgcctcagcttctcaaagtgctgggattataggtgtgagccaccactcctagccttg

SEQ ID NO: 550659 - DNA, 1404 bp, Homo sapiens
catcctgatatcttatagaatggatagtgtatttcaatattattaattaagtgggcctttgttagatataaagcaagatacctccagtaggtcctgttagcagtaagttttatattgtggaggtgaacaaggtatttttgtgtaaatcagtttactaaattgtattattttcaagctagattgtgatggtaaggttaagtaaggcaaatgtagtattttaaaatacatgatgaggtacagattaaaaatcacttgctcaggattacatatgtgtgtagagttgctgatatactaggttcatggccataattgttgtactgtctgttaaagcttaattgaaaactaatttagtcccacaatgtacttcttattactttacttacaaataagtaaatttaactgaaaatatagatggtggttaagcaacatatgagaagaaaggcatgtttattcaggaatcattggtaagatctataaaaatacacttttaaaaatgtcacacagagtgtaatgcctgctttaactgagtcacttataatgttcttcaggaagcatattaaaagttcttcactcagctcttacgctttccctttctcattcttcctgcctcttgatctcttgtttttaaaatcttcctccttattttgtagacactgctctcctgttcactacttcttctctgtctttacgtctcatcactgggcctctctcagtgtctgttttcccaaccttcatcccaaattccagctgtatatctacaaccagttggtcaggtaactttgcacctttttcagtgcactctttgatagagcatgctctgttctttttgtttgttttgtttgcttttctctctctctctctttttttttaatagcctggaggcctcttatcaaatgtcccataaattttaccttttgtttccacattaatttgacatgatgatggctcaagaagtagagtgacagctcttcttgtgctttttagtaagtgtttgtgcgatacatgtacgcatttttcttggttagctaccactatagatgtaacactagtaatgtgagcagcccacattttatttagttgtggcatctacatttgaagatggtttattagtagcctctaaactaagtaatttttcctaactcagtaatttctcctaaccctctgggcctaagatatcattggctatttaagttcagaaatcaggttaaattgagaatttgatgcatccctttactcaagtaaataaatagttacgtttatatgcataaracatggactgtggtactcagtgttctctccatgaaaaaaaagatttaccacttgacattgtatctcttaggtaatgaagaaacaaaactcattagacctgaaacaaagccaggcagaaatttaaaataaaagtaa

SEQ ID NO: 550660 - DNA, 545 bp, Homo sapiens
atcatccattcatcatctatctactatatacctatctatctatctatccatccatctatctcctcatattttctgagtctgcctctcttttccacccttgtccagacaaattatttcctagctactcctcatkttggattctactgctagcaatttatgctcagtaaagggctttgtcctgggaggagccttaggttattagtataggaatttccgggggcttagacaactccagcatcttcagatcctactaaggtctgcttacactcacctatgaattgtggccttcagctgcattttctcgttaatatctgctgcaaatttttgagttcttcagctcttgggtcttcagacccaagagcctttcttctgcttcctcttactcagacattgacgtcaaatgggtcttgtcacctagatttgttgcagatgttgtctgtgagtctttagttttgtctttctagctgctctgtttctgtggggggaattcagggagattagaatgttttgctgctgcaactgctatcctcaccacaattattgtt

SEQ ID NO: 550661 - DNA, 730 bp, Homo sapiens
tcctcttgccaatctagcatggtagaaattgttatcctcatgcaatgaatgagggaactcaagcttagagaggttaagtgacctacccacggccacacagctaacaagtgacaagacctttagcccagatcagccttatattcttttgaatccccccagtgttataaccttagcaggctcaagctgtggacatgctgaggtctcagccaagggctctggagaagagagaaagcacagatgtcagaactgaggcaaggggtgacctgagctgcaggtgagagattcattctagataccacccactggggcagtcagcactttccaaactgccaggtctgagacccattggttgaggcatagaaagagactgaagctggtggataaagaccttcagttctgccctagacatttagcatgtaggggctggcacaggactttataaagtaggaggtccatagcagttacattcaactactttgaattacatggataatgacacarttgacatgctccctggctactttcccacctaaacccctgcttttctgataatattggcccactatcttctccgagcaataacccctcacgtgtgtggcactctgcaggtgataaagcagttcatcatttgctgtccacaatgaatgtgataggggcagagtaggggattgtgtctctgttttaaaggtgaggaaactgagtctcacatagctcttaagtactacagatg

SEQ ID NO: 550662 - DNA, 574 bp, Homo sapiens
gaaagtggggtgtcgaaatccctattattggagtattgtctgtctctctcttttggtctaataacgtttgctgtatatatctgggtgctccagtgttgggtgcatatgtatttaaaattgttacatcctcttgctgaattggtcttttatcataatacagtgaacttctttgtcttttatagtttttattttgaagttctttgaaatttagggtatttttattttatttgaaatgtcctaaagatatcatgtagaaaaagaaaagtagcaggattattttaattttgtcacataatagtgcttggttctttttaattgcatagggtaatacattttaacagatgactatcttgtcatctttttaatcactgtaattagacaatgcctttttaatatatctgacatayatctggaactgtcatctttcgcttggtgatttagttgattttacacttagaaatgtgactcatattttattagaagataatataaagcctcatttttgtatcttattaaaaattctttcagttttactgttttaattatctaaagtctcaagatgtgagtgagaaca

SEQ ID NO: 550663 - DNA, 612 bp, Homo sapiens
agagagtggtggtgcaggaggctgcatggagaaagctctgctgcttctgtgagggacgcaccagcttctgctcccagcatcaggctatgatgaggagagtgtgagaaaaaggacagtcgagggaaacaggacgcaggaagacttggcaggaatgaagagcagcatggagaggagagggaagagcgctgaccaaaggggcacagagcctgagacatccagcctgtcactggggagaaaagccacaagcacaacgtgctcmaaggcagccaagagccccgaggggcggcccctgtgggcttccacaaaatactgtgtgcccttcctgagtggtgaatgaggggcagcatgtctaatggagaggaaaatgaaggaactacccgggcacgaggccaaccagaccctcagggtgaggaggacggtcagggagctgggggcgggcagaggcaatggtcaaggccacaggcgagcccagggcaggactggacagagagcagcgcagcgactttgggagggggacgtgggtaactcctccagccagagcaacttcaatggctttttatcaagcgtctgggttaagagaccactaagggttagataaaaggctgtagacag

SEQ ID NO: 550664 - DNA, 612 bp, Homo sapiens
agagagtggtggtgcaggaggctgcatggagaaagctctgctgcttctgtgagggacgcaccagcttctgctcccagcatcaggctatgatgaggagagtgtgagaaaaaggacagtcgagggaaacaggacgcaggaagacttggcaggaatgaagagcagcatggagaggagagggaagagcgctgaccaaaggggcacagagcctgagacatccagcctgtcactggggagaaaagccacaagcacaacgtgctccaaggcagccaagagccccgaggggcggcccctgtgggcttccacaaaatactgtgtgcccttcctgagtggtgaakgaggggcagcatgtctaatggagaggaaaatgaaggaactacccgggcacgaggccaaccagaccctcagggtgaggaggacggtcagggagctgggggcgggcagaggcaatggtcaaggccacaggcgagcccagggcaggactggacagagagcagcgcagcgactttgggagggggacgtgggtaactcctccagccagagcaacttcaatggctttttatcaagcgtctgggttaagagaccactaagggttagataaaaggctgtagacag

SEQ ID NO: 550665 - DNA, 612 bp, Homo sapiens
agagagtggtggtgcaggaggctgcatggagaaagctctgctgcttctgtgagggacgcaccagcttctgctcccagcatcaggctatgatgaggagagtgtgagaaaaaggacagtcgagggaaacaggacgcaggaagacttggcaggaatgaagagcagcatggagaggagagggaagagcgctgaccaaaggggcacagagcctgagacatccagcctgtcactggggagaaaagccacaagcacaacgtgctccaaggcagccaagagccccgaggggcggcccctgtgggcttccacaaaatactgtgtgcccttcctgagtggtgaatgaggggcagcatgtctaatggagaggaaaatgaaggaactacccgggcacgaggccaaccagaccctcagggtgaggaggacggtcagggagctgggggcgggcagaggcaatggtcaaggccacaggcgagcccagggcaggactggacagagagsagcgcagcgactttgggagggggacgtgggtaactcctccagccagagcaacttcaatggctttttatcaagcgtctgggttaagagaccactaagggttagataaaaggctgtagacag

SEQ ID NO: 550666 - DNA, 628 bp, Homo sapiens
ctttctctactaaaaaatgcaaaaattagttgggtgtagtggtgcacgcctgtaatctcagttactcaggaggctgaggctggagagtcacttgaacctgggaggcagaggttgcagagagccaagatcatgccactgcactctagcctgggagacagagtgagactctgtctcaaaaaaaaaaaaaaaacaamaacccataaccattgtaagaaatcaagaaaacctatttactttacagcatgtggacttcagtgcagccttaccatacgaattgggtagattcagtaaccattgttagctgatttaaaaacataaggcagacagtttggagatcacaggcaggattacttagtgttcagtgcctttctcaaagttgcattagttgaaagtaaaaatcaaccgacaagctacacaccacataacataaacatccaaagtcgtccttctttccaaaccactcagccagtcctggcacttaactggtgaattaactgcctgctccatttttacaaacgcaggaaggacgttatgaacctgggactcagccgccacacctccatagagctgtgtttcgttgaaaggatatgtcaggagtctagacacagtatgtggataaatatgggag

SEQ ID NO: 550667 - DNA, 557 bp, Homo sapiens
caacacgagttatttaactgtctgtcttgtagaaggggaaaataggaaggcaaagctctaacagtggctctcctggaggggctggggttacaggcaacttttcttctttgggcatttgagtgttttccaatctttcaacaatgcatacgtatttccacaagcacaataaatgcttcagaaaaaatgctggtgaaatccaagagctactccttctggaatgcaacagtttgaagctaytaataatctttagtataagaaatgcacttagtgagttgagtaactaagacaaataatgcatgctttaatgaacttaaggctgaatgtccacatgggcctcctgcgggaaacttgtctttttggtctgccctcttggctcagatgtccaaggtccaaggctgtcagcatccactgccgctgaagtgacctccagaggaccctcccaaggacaggatgcctcccaagccaggctgattcagctcagccttgggactgcaccagaaacacattaaaacagcacagtgttctgactaagaccctctcaatgaagggaacccttg

SEQ ID NO: 550668 - DNA, 500 bp, Homo sapiens
aaaactgaatattattatcttgcttttgttatcagctttcttatgcacctgaactaattgctgtggaagccacatgtttttgctttgtagttgaaataatttctgctccagactcctgctgttcagtgtgcttggtcacattatcttgtttgttttgatacatgtgttcagctttcttcatttgacactatgtttcacttaggtctctttgtgcatgttctaaaacctatgtattttctctttgagcgtctcctgcataattgaaattaatttttagacttttggattccctttgagcttcagaaagtggttgatgaagcttctcattgttatatattattcacatcaacattcatttttccttgcaaatgagcactgtggaaagcaagttcttggttttttcttgatgtcacactttatcttggtcttgtatagcagaagcyagtctagaatggtatgattcaatttctttctccagtatttctttgtcttgtttttcc

SEQ ID NO: 550669 - DNA, 684 bp, Homo sapiens
taggatatcaataaaaagtgatcagttgctactattctatgttacccttataaaatgtgccataagaggtagattcctaacatccatatttaaagaaattgctccttctgctagtggtgttgaatgtgcctgaacagactcttggtcatacaagtagaaatttttttttttagtagattctgaatagcggttctatttctttaatgactgaacaaaatggtagcataggactttggtttggaatctggttttgccctcaaatcagaaagttcttgcatagtttatcckcagaatatgaagttaaactatacttgatttaaggtagtaatttgtcagtataattttctgtagggatatttttggcagaaatagaaagggtcttgaataatctgaagttattgaaatttttttttgtagaaaattacgaaaaactgtaaatggtgatgggagccgagaaaatggaaataactcctctgataaagtcagaggaatagaaactttggaatctgtacccattattggtggtttttgggagactatctttggcaacaggtgggagtcttttttacttgattttgtattcacatagtgtttacagaatgtatagtatcatcaggccataggagtaagtagtatagacttatcttggtgtgatttttaagggttatcagagggcttgcttac

SEQ ID NO: 550670 - DNA, 516 bp, Homo sapiens
cactatgtggctaatttttgtatttttagtagagacgaggtttcaccatgttgcccaggctggtcttgaactcctgacctcaggtgatccacacaccttggcctcccaaactgctgggattacaggtgtgagccaccatgcccagccggttttgagtttatttctgatgccaaataattgttcttggtgcaaaggtgttgtcctgctgctgttgtcactgtcagcaagaaatgagtgtccctgttcctacagcatcatctgcattgggttttaggattaacacttattttcaaactgatttttatgtgcatcattttaatgagtacatccttgagtgggtagctgactggagcagtaatcgcatgtctggaatcttctctttcttgtcttagctacactggtctgtaaatatttattcatgctagcatttggaagtcctgctgtactcatctttggacatgctttggcagaaagcacagatgaggttctgtctktgatggtctagctggggagtag

SEQ ID NO: 550671 - DNA, 1205 bp, Homo sapiens
ccctttattcccccaaatgccaaattaacatgatattttaatggtggcataatcaaattgtatgtgatgcagacacagactaatatttttcagaaaaatatttgttcttttgttttctgctttaaaatgaagctaagctgcattctaagtgtgtttttgttcatattgaggctcttatcttttctgtgggtatattcactttagactctaaaatgtaaatcaacaggaaaatgggattttgtttacaaatttatgcttacaagaaagcatggataaatctgtcaaatgaccaaaggaatttataaaagagtacaacaaaggtagttaagtatacaaattgaagaattactgaccaatgaaattatttggcatccccttttactatacattttcttaaatgagctatatctaatttctggaggtagtcctatgcttgggctttaggattagaatcagagacattctgagtagaaagggaacttagagtttacctagtccagtaattttttccaaacttattttctttaaatttcttcaatcaaaatcttgtttgaaaactcaatacagagacctggtaataggggtgagtttctaattaaagtcggggttgaggggcttgaagcctacctaatccactcccttatcactacttccctacattttctgactgaagtctacagaaactaagtgacttggccaagtttgcccagtgaatgatagtggatctcctattttttctttaattttctttatttccattttctattctctttcacctcccataacacacacacacacacacaaacacatataacacatgcatgcacacaccattctaggtagtcagaagaaacttctgcctctcataagccactaatatctcattgagaacatttgcattttcaaagagaaaagtcagaaggaggcaatgttgaagctaatgaaatgagtcactaaagatagcatgacagaattacggcaaattttgctgtgtgtgggctttctcaaatcatactttgtaagcatcctcatctttgtccaatatttaaggatagctctgctgacttatttaaaaataatggccttggaaaaaacctcagtagcaatttgcatttagaccatcatkgtcttgagagttgaacaagcagaatgagggtgaaaggtgttcctatgcttatctagcaagcttccactttactgcactt

SEQ ID NO: 550672 - DNA, 853 bp, Homo sapiens
gatcatctaggactttcttcttggctttgtgagttctccctaaccccttctccagctagaaaataagcttctgggagctcttttggtttctggagtcttcttctaaacctgtctgtcacacactggttgtcattttccctccctgacccatctcatatccttctcactgctgggtaaggtaacagttggcagtggatatgttcagagtctagtacccggcctgaccacacaacacccagataaccacattgttatccttcccacccaaggtgagcctggggacagtggctcctagggaggcagagcagccagttctgcttctctgtttgctgagagtttccagtttgaaagacacacatccccctttaatggaccatctratggaaatcacctgctcctcgaataatcattgaacaaattgatagcacacagtagcgaggcttctgggcttcaatactacctggctgattccagtagatggaatgaaaacaaaccaaacaaaccactgttcgttgtttagaagctcgttattacaggggaatcacggcctccgcaaattggagctcctctgctggaaaggcaagagcgcctgtggccaggggaaaagtgccctggatcctctagggagggctttgagtcctggatttgctacttatcagatctgggaaaaaacaaaaaaacaaacaaaaccctacagaatccatggagataaaatacctaccttaccctgaagccttgtagacagtatgaggtcaagttaggtactatgaggaaagctctttctcaatttgaagtatcaggccctcagtgtgacagcactcgggcacccaatacagcagtcccgtcatccaca

SEQ ID NO: 550673 - DNA, 853 bp, Homo sapiens
gatcatctaggactttcttcttggctttgtgagttctccctaaccccttctccagctagaaaataagcttctgggagctcttttggtttctggagtcttcttctaaacctgtctgtcacacactggttgtcattttccctccctgacccatctcatatccttctcactgctgggtaaggtaacagttggcagtggatatgttcagagtctagtacccggcctgaccacacaacacccagataaccacattgttatccttcccacccaaggtgagcctggggacagtggctcctagggaggcagagcagccagttctgcttctctgtttgctgagagtttccagtttgaaagacacacatccccctttaatggaccatctaatggaaatcacctgctcctcgaataatcattgaacaaattgatagcacacagtagcgaggcttctgggcttcaatactacctggctgattccagtagatggaatgaaaacaaaccaaacaaaccactgttcgttgtttagaagctcgttattacaggggaatcacggcctccgcaaattggagctcctctgctggaaaggcaagagcgcctgtggccaggggaaaagtgccctggatcctctagggagggctttgagtcctggatttgctacttatcagatctgggaaaaaacaaaaaaacaaacaaaaccctacagaatccatggagataaaatacctaccttaccctgaagccttgtagacagtatgaggtcaagttaggtactatgaggaaagctctttctcaatttgaagtatcaggccctcagtgygacagcactcgggcacccaatacagcagtcccgtcatccaca

SEQ ID NO: 550674 - DNA, 569 bp, Homo sapiens
ttttaagccctctttcaacataaaatgtttctagtttaagatggtgattttgccattctgaactcccctgaaactcttataaatatttggagagtgaaaaaaacatattattataacacatatacagacaycccaagtgaattacagtagcagtaggtcatttcccagtgtttagaaggcctatggtgataaaaagagacttctgatgggtggcagatgcttccacacacatgaaagagagaaaaccttctttcctagtgaactttaggacagcactttgttccttctctactttttgaacaagatagccaaggtctgtgtcagcagaaattctaaggccatcacagtgtattttgtagaaaaaaaaccacagaaagtagaagaggctggtggtggagtgctgagttttgggagctacaattccaaccatttaactgtaggccagaaaggaaacaggagaacgtggtgcaggctggggactgtagctgctcctgtatttcatctcttctactggtcaaagaagaggagcaaaggtaggagacggaggctcagctctatcctggtttgcc

SEQ ID NO: 550675 - DNA, 1145 bp, Homo sapiens
aagaaaaaattctaacagcaaccagatagactactattccagggctggatatatttttttgtctagtgacaggaaactggaagtaaagaaagcaaaacaaaatatggaataagtaaaacacctttaacatgagaaaatgaaaaacaaaacactcaaactatagaaaaaatgttttttttaaaaagacactgcagaaaacaaatttaagtatatattactttgtactctccaaaatttcaaaggaatacaggctctatataattagacattagagataaaatagtaaaactgaaaattaatatttgatatgtgatggaagcttgctgagaagcacacaattttttaaaagtaaaaggcaaatgtatctattttattttaaactttaattttatgttcaggggtacatgttcaagtttgttatacaggtaaattgtgtattgcaatttggtgtacagattattttgtcatccagctaataagcatagtacctaataggtagtttttcaattctcaccctcttcctgccctttaccctcaagtagcccctggtgtctactgttcccttctttgtgtccatgtgtactcaatgtttagcttccacttataaatgagaatgtgatatttggttttctgttcctgtgttaattctcttagaaaagggcctccagctgcatccatgttgctacaaaggacatgatctcattcttttgtatggctgcatagtattccatggtgtatttgtaccacattttatttatccagtttactgttgatgggcacctaggttgattccatgtctttgctattgcaaatagtgctgtgatgaatctacatgggcatgcatttttatggtagaaacatttatattcctttgggtatatacccagtaataggagtcatgggccagatggtaattctgtgttatgttctttgagaaatctacaaattgctttccacaatggctgaactactttacattcccaccagcaatgtacaagtgttccataaaaggagaattttagaaggactaaagatataatcacagagttaagcactaaagtattaatgatcatatttggatattacagaaattaaatcagtgttatggaratcaaacttgaaaatatttcagaattgaggaaaga

SEQ ID NO: 550676 - DNA, 544 bp, Homo sapiens
tctgttaacttatttagtttaagccaagattacttcttttcctgcagrcttggaacactaaagaatactccaggtttaaattccaggttatttgcttgataagcctgggtagattgtccttcttaaataacttacaccaaagcactatcaaagaagctctccctttgtagagccctcagattcacagaaggaatttttcgaattgccatttctataggaataaaggctatcaggaaccacaatactaggagaaaataattctgaaggggaggtagcagtgaagactcttatttctattttcttgactatatttataaaaaattgttgccgaaagaacagaagaccaagagccaaaaatcacactgcagtcttactcttggatgtaatgttactatcagtttcagtgacacaacatcagaggcaatctgatattgacaatggtaaaaatatgcagacgccaatattaggagggtgcagttagttgacagtagagcctataagtattcatctaagttttctctgtttgaagagaagaaaagagaac

SEQ ID NO: 550677 - DNA, 544 bp, Homo sapiens
tctgttaacttatttagtttaagccaagattacttcttttcctgcagacttggaacactaaagaatactccaggtttaaattccaggttatttgcttgataagcctgggtagattgtccttcttaaataacttacmccaaagcactatcaaagaagctctccctttgtagagccctcagattcacagaaggaatttttcgaattgccatttctataggaataaaggctatcaggaaccacaatactaggagaaaataattctgaaggggaggtagcagtgaagactcttatttctattttcttgactatatttataaaaaattgttgccgaaagaacagaagaccaagagccaaaaatcacactgcagtcttactcttggatgtaatgttactatcagtttcagtgacacaacatcagaggcaatctgatattgacaatggtaaaaatatgcagacgccaatattaggagggtgcagttagttgacagtagagcctataagtattcatctaagttttctctgtttgaagagaagaaaagagaac

SEQ ID NO: 550678 - DNA, 551 bp, Homo sapiens
ataaattatctctatagtaatgttttgtggccatatgttattctactccctaaaaagcttctgccaaatgggtagcatttatagatgattcttgaatgtgccaaatattttggattgcaaaataatgattttaaaaatagatcatatcttgtatatttattagctgctattctttaccaccatgtcttaataactaataattgaaagatgtgtcgtcgtaaatccaatgtgaataatttatttccacaacttgcaataaaatgtataatagaggactaaaaggaaacttagagaacattttgctcattgtaccttccaaaaagagttgtgcattagatggataaatgacttttgtttttatgtttgtcaccggagacacaatgaggagtaaagcatgacccatccctcgtctctggatactcagatgtatatagggacactttacctgtattattttgatttatcttcagaaaaactccacaaaatatatgttattgtcaaatgcttamaaatgagaaaactgaggcaaaatgtttaagcaacttgtccaa

SEQ ID NO: 550679 - DNA, 633 bp, Homo sapiens
tgaaatttgcatttctacttagaatactggaaggtggattttagttttcccagaaatataaagtttcttggggcaaaatatagaatactgggggcttctccacactcggkgctttggaagccacactgtataagactattgtgtgtttttacccaagtaccactaatgtggaacagtggcactgtttactaaacggtaagttttttatattctaaatcttatgatcacagtgggtctgctttaagtttgatatatttataaacaaatgtattttcttctggtttattcttcatatattctaaaatatttagatttaaatatgaactatatgctcataagcttggctgactctagcaaaaagtagtcttctataggaaaattgtctttgtttcccagacttctctttgctgtcattcccccccattggtggttgcctagtcctcctattcttcagtttctcagtgctctcatagtcctgcctcctgtgactctaactcaatataatcacatatttattatattcacaatgagttataaatatctagaagttgttcttccctggacataactatgttaagaagcatcagatgctgctaaaggctttcggaagagaaatgaggaagttcattgtca

SEQ ID NO: 550680 - DNA, 654 bp, Homo sapiens
cactccagcctgggtgacagagcaagactctgtctcagaaagagaaaaaaaaaaaaaaaaaaagtaagagctaaataaaaacagggaaatccttagagttcggttgctctagtaatttttatgtactccatgaattccaacaaaagcatgagaccaaaaaaaaaaaaaaaaaaggaaagaataataaaatcagatgacttaatttggaggctgctacctctcaaaagttagcatagatgaagcattacattgtttgctgcaaaacaacatacataaggagtcatttgccaacaaaaacaaaatcctattattacgtatcatgctacatgctaagtatactatctcattaactatggcaacagtcctctgacatcagtgtttataacctttttgtttgaatggaagaggagacttatgaaatatgaagattaagaagttttctgacacatgcacagctaggaatgggaacattggcatctaaygtcactctctgttgccccaaagcctgtgctttttaagaaagagaaatgttgtgactacactttgccatagaggagaattgtttgatatccccatataaatagtcctagactcactttatcatacatagcagtctcatagagcaattccttcgccaccacaggaatggagtca

SEQ ID NO: 550681 - DNA, 796 bp, Homo sapiens
gaagtacaggctgagtacacagtggctcatgcttgtaatcccaacactttgggaggccacgttggcttggagacgggagttcagaacagcttgggtaacatagcaagactctgtctctacagtattaaaaaaaattagctgggcatggtggtgtgcacctgtagtcccagctacttgggaggctgaggcaggaggatcacctgagcactggagcactccagcctgggcaacagagcgagaacctgtctcttctcaccaaaaaaaaaaaaaaaaaaaaaaggaaagaaatggatggatttgagaattcttggtgattagatgctcctaggcagtctgacaaacttaaattaggaatgggtttgacaggatctactgtactgcatttgttaaggctctttagggaaaatcacatatacgcagtttagattctgtgcatttcaaacatatttttgcgtattgctcctaatttctgctccaatgtattcattattccctcaattttttgtgttgtagttgtgtttgagtgcttgctaggcattgacaattgaatcctttcctcaaagaactttataatttgtgcgacagaacacaagtacttaaatgaaagaaatgtttcctatctgttggatccatttatgctattgtcatcttagagatatgtaggggatgtataggtaagtaaaggtataagattatgtaacatggagrggaacctcgaaaaatagcttaagctgagaaagggggtaaacaaaaaaagtattgagcccagaaatggtggcttaggcctgttatgttt

SEQ ID NO: 550682 - DNA, 612 bp, Homo sapiens
cttagagcaattaggcaagaaaaaaaggattctaaattggaaagaaacaattcaaattatctctgccaatgatataatctcatatgtagaaaggcctaaagattccacamaaaaaagtagcactaataaatttagcaacatagcaggatacaaggtcaacacacaaaaatagttgcattttcatacactcacaatgaacaattcgaaaaggaaatcaggaaaacaattccattgacaatagcatcaaaaaatatttaggaattaaccaaggagatgaaagacttataaaatgaaaagtacaaaacattgaatggaaaacatcgaacaatacaaagaaataagtggaaagacatcttatgttcatggattggaagtcttaatattgttaagatgtcagtactactcaaagccatctacagattcaaggcagtccctatccaaattctaattatggtttttgcagaaagactaactcattctaaaattgatatagaatctaaagacactctgaataaacaaagcaattttgaaaaagaaaaagctgtaagacagttctccaaataagatatacaaaaggtatacacctttgaaaaatgaaagcaaaataaggac

SEQ ID NO: 550683 - DNA, 538 bp, Homo sapiens
aactcaaagcaacgtggtctacttctrtcgagcatttgattaatcatagggtcatgtcaaaaacaatgctagtcttaaggataaatattaaagcattgtgtttgaggagtccacttccctctgtctgtgtctctctttacatatatgcgtgtttatatgtgtacgtgtatatatatatatatatatgaatgtgaatacttccgtattgaaatatattgtttcctacaggagcaaaataccattgtagtatgttaatattttaaatatgtcgtataagttttgaaacataaataagatgatgaattttctagaattctgtatcatcaaaatgttgacaataaaatgagtcctaggcatttttctctagtgattaatgaaataccctgagttaatttaagtccccttttgacatgctactcaagagacaaataagcaatatactttttaaaaatcatttagtaaatttttagcttgatattctcctagtgattggcagagatttggacaatatcaacattgtagaatacaaaaatgaatg

SEQ ID NO: 550684 - DNA, 538 bp, Homo sapiens
aactcaaagcaacgtggtctacttctatcgagcatttgattaatcatagggtcatgtcaaaaacaatgctagtcttaaggataaatattaaagcattgtgtttgaggagtccacttccctctgtctgtgtctctctttacatatatgygtgtttatatgtgtacgtgtatatatatatatatatatgaatgtgaatacttccgtattgaaatatattgtttcctacaggagcaaaataccattgtagtatgttaatattttaaatatgtcgtataagttttgaaacataaataagatgatgaattttctagaattctgtatcatcaaaatgttgacaataaaatgagtcctaggcatttttctctagtgattaatgaaataccctgagttaatttaagtccccttttgacatgctactcaagagacaaataagcaatatactttttaaaaatcatttagtaaatttttagcttgatattctcctagtgattggcagagatttggacaatatcaacattgtagaatacaaaaatgaatg

SEQ ID NO: 550685 - DNA, 538 bp, Homo sapiens
aactcaaagcaacgtggtctacttctatcgagcatttgattaatcatagggtcatgtcaaaaacaatgctagtcttaaggataaatattaaagcattgtgtttgaggagtccacttccctctgtctgtgtctctctttacatatatgcgtgtttrtatgtgtacgtgtatatatatatatatatatgaatgtgaatacttccgtattgaaatatattgtttcctacaggagcaaaataccattgtagtatgttaatattttaaatatgtcgtataagttttgaaacataaataagatgatgaattttctagaattctgtatcatcaaaatgttgacaataaaatgagtcctaggcatttttctctagtgattaatgaaataccctgagttaatttaagtccccttttgacatgctactcaagagacaaataagcaatatactttttaaaaatcatttagtaaatttttagcttgatattctcctagtgattggcagagatttggacaatatcaacattgtagaatacaaaaatgaatg

SEQ ID NO: 550686 - DNA, 557 bp, Homo sapiens
atcaactttagtgtttcattctgcagtggtggattatttaacctctttaagtctcaytttcattgacaataaaacggaagtaaatggtagtaccaacttcccagaatcttggtttcataaagcccttaacagtgtgctaagcactcaggaaatgttatctcttgttattattacttgtcacactgactaatatcagaaaatcatgaaggagttgtgaattcaagatatctttcctctctcctcgtctttgcctcagttgaaaagcctcaacctagtttaaggatctagcctctaagactgatgaatcatgctgtagcaaaagtgaatagacgtgattggcattcactggtgctagccagagaattaggttccccatgataaaaatggaatggattgggctggcctcatctgattagagaaatctgcccttattgctgctatgtgattatgaggctggacttcttggacagcctggtggaggtcttgggagatgtgggtaggagtaagagctaaaattcgttgaagtacttggtgtgtgctgggcacaatactccttg

SEQ ID NO: 550687 - DNA, 557 bp, Homo sapiens
atcaactttagtgtttcattctgcagtggtggattatttaacctctttaagtctcattttcattgacaataaaacggaagtaaatggtagtaccaacttcccagaatcttggtttcataaagcccttaacagtgtgctaagcactcaggaaatgttatctcttgttattattacttgtcacactgactaatatcagaaaatcatgaaggagttgtgaattcaagatatctttcctctctsctcgtctttgcctcagttgaaaagcctcaacctagtttaaggatctagcctctaagactgatgaatcatgctgtagcaaaagtgaatagacgtgattggcattcactggtgctagccagagaattaggttccccatgataaaaatggaatggattgggctggcctcatctgattagagaaatctgcccttattgctgctatgtgattatgaggctggacttcttggacagcctggtggaggtcttgggagatgtgggtaggagtaagagctaaaattcgttgaagtacttggtgtgtgctgggcacaatactccttg

SEQ ID NO: 550688 - DNA, 1170 bp, Homo sapiens
ttgggcattaaggtggcagtcatggtgcttgtcctgcctaccatgcacggtcattctgagagcaagggaatcaggtgtcccaggggcacgccgtccatcagggggctgatgtgtacaggggctgctggcttccctccatcccaaggttctctatccccgttcctctgattcccggattagcttgtttggactaactggctcatgtcttcatcctccagataaaatcttatgttgaaccgtagccttctggggacctgatttctttttcttcttttctgcattttactagaaaaaatctcaaacatacagaaaatttgaaagaattgtagagtgaacacccacatcataaactggacaaaaaacattgtgctgtatttgggtggctgcatagacataatttcttcatgccaaggaataactgtgatgaggggagatcgagggctcctagcagccgagagagggaggcatttgaggataagaagttaaggcagcaatccctggagtgccaccagtgagcggccatatgtctgctactcctgatcctacagtccttgtatttggggggtggggcagggggtagggcagttatcaaacaagtcaacaataaataaataacatgaaaataaaaagggctaactggaacacatggacttcctactaatgatgcctcattgagggttagagcaaatggctggctctcttgcgaggaagctgagacctgagaaatgtgcctttcatagacaaggtagggccagacaggtctagaacctttttatatccagagcctggagcaggaccctcaggacagctgtcagaaatgatggcagaagggccgggtgcggtggctcatgcctgttatcccagcactttgggaggccgaggcgggtggatcatgaggtcaggagattgagaccatcctggataacacggtgaaaccccacatctactaaaaatacaaaaaaatagccaggcgtggtggcgggcgcctgtagtcccagctactcgggaggctgaggcaggagaatggtgtgaacctgggaggtggagtttgcagtgagctgagatcgcaccactgcactccagcctgggcgacagagtgagactccgtctcaaaaaawaaataaataaataaataaaaaagaaacgtcatctctactaaaaaaaaaaaaa

SEQ ID NO: 550689 - DNA, 510 bp, Homo sapiens
tggcatgctcatttggcccagattcaggcagcaaagtgtgtggtttcttatctgagatcctaagagtcttacaagctttattacaagctgtacagctgcaggaacatcaacaattttgtcacctctttcaagttcactaaatagtaataaattttttgtttgtttgtttagttaagaacagctttgttttcgwtaagccagtaagtcccacaacatttttaagcactggactgaatatcactcgatagctaatctttatggttaatcactgaattaggaacgatttgcattacttaaaagcaagtaaataattaccttccactggggaagtagctaaaagttggaggtgggtttggacttaagttttaaaatatagtagggaaatgaactgaattctgttgctgaacaaattcatcacacctcttcaaaaatatatgagtaacattgttttctaacttaattttattattctgtgatggggtgccatattactttgaaaataattgtctt

SEQ ID NO: 550690 - DNA, 510 bp, Homo sapiens
tggcatgctcatttggcccagattcaggcagcaaagtgtgtggtttcttatctgagatcctaagagtcttacaagctttattacaagctgtacagctgcaggaacatcaacaattttgtcacctctttcaagttcactaaatagtaataaattttttgtttgtttgtttagttaagaacagctttgttttcgttaagccagtaagtcccacaacatttttaagcactggactgaatatcactcgatagctaatctttatggttaatcactgaattaggaacgatttgcattacttaaaagcaagtaaataattaccttccactggggaagtagctaaaagttggaggtgggtttggacttaagttttaaaatatagtagggaaatgaactgaattctgttgctgaacaaattcatcacacctcttcaaaaatatwtgagtaacattgttttctaacttaattttattattctgtgatggggtgccatattactttgaaaataattgtctt

SEQ ID NO: 550691 - DNA, 2507 bp, Homo sapiens
ctgtggcctattcctgtgctacactcgagccaaggtggcctcttccctagccccacacatactctttgtttttccattcttccaagcaggcccggagaaggaatgggctccacgatgcagggcccgcggtagagaacagccaggcagagcagggggcctggctggatgtggccagcatctgcaggggttcagcattgagatatgacactgtcacctccatctcaagaagccttacggatgcctcccttcccttcatgactcactgtgatctacaactcctcagagccagccttaaagtggtctgtggatcagtctcatctccccactggagctccatgggcagaaagcactctttctcttctgcctacaacatcctcctcccatcggtatgcaccccttcctaggagccccacaggcaatgacaggaacccccaaccccatgtgtgcacatatacacattcccacatgtgtggggaatgagaggctacatagcctgctccatcctcttcttttaacctgcaattactgggtgaaaagagtaggatatagtaaaatgcaaatgctagtttagtaaatggcataaagacattgaagtgtccctggacatcagtcacgtggctgtggaagggagacttagggtgtggctttccccatggaccatggtgggtctttgggatccctctcttccccaccccagtcctttaaagacccaccagcgactttgtgagattctagactcctttccctcgtacctcctagccttattggatggaaaagagggaacagtggttcctttctttctgccacgcctccaccttccattggagactcctatttctccctccgtgacatctttgctgaacagaacagctcttaaaccagaccttatctgttccatgggtgcagaagggtgcaatgtgaacagaaacagcaagtctctggaaaagagctccttcagctgcaaagaacacagaggtcaggaggaataaagctaatgagagagcagagagtcctttgtctccccaggtgttattcccagaggccaactagggaaaatggagatggggtataaacatctgaattcactgttaaacactccatgaactgttgataattccctagaagcagcatattcctgaggtagcttcatatgatctccagaagcaacttacatgtagacatttttctgagaattccagaaagaatattgataattttcagacaccatggcttccacgcctcatcaacataagcagtattaggctttatctctgacatcaatcaaacttgaacaccatcagcatgggctttaatgaaattctcacatatgtatcagaacttgtattttttcctttagtcagtgtcttgatccatttgtgttgctgtaaaggagtacctgaggctgggtaatttataaagaaaagatgtgtattcggctcatggttctgcagggtgtacaagaagcatgatgccaggcatccgctttgggtgagggcgtcaggctgattctactcatggtggaaggagaaggggagccatcgtgtggagatcacatggtgagagaggaagcaagcggggagtggaggtgccaggctctttttaacaaccagctgttgtaggagcacagtgagaactgactcactacctagagaatgcaccaagccattcacaatggatccgtccccatgacccaagcacctcccatcagacccacctccaacactggagatcagatttcagagtgagacttggtggggccaaacaaatcatattcaaaccatagcaattagaatcttaaaatcaaaattgatggctttatttttctaaaaatgggaaaatatctccaaaacattgttcaaaaacaaaacaaaacaaaacaaaaatgtttgtccttatatcccatcagtttattcaactaacattcactgtggactttttataaggcagtaactgttttatgaataggagatataaaactgggtgaaacagtgaggttcctggccactgtattgtaataatagaggcacatataccaaagagctaaaatacaggcagcaaactctagggactgaagtaaatttccttaatttaatgaaatgtatcaagcagaaacccacaataagcatcatacttaaaggattcatttgaatttttttatttatttttattaaatcagatatacttttctagtttttttaatttttattttttgcatttcttgatcatttcaaagtgaggtcagttacagagtgaatgggttcatcctgtcattgtaaataacagtttttcgtttaataatggcattttgtattaccaagaccttgcttcacattaggtgtttygtatacattatctcatttaatcaaaaccagcactctatatcatgggtgccaccattcctctgatttttgctaaggaggaaactgaggttcaaaaagggtaaataagttgtccaagaccacacagccattgtttggcagagctggggcaaaggtctatactgctgc

SEQ ID NO: 550692 - DNA, 1009 bp, Homo sapiens
catctccccgttctctgtacctccagactggagccccctccaggcagggacccatcttctctgctctatcacatctcaaagctgggccaagaatgagtaaaaaaaacgaagcaggagtagcatctgcttttcagccatctctcttgtttcttgaagaaggggtcctcaaagcccctgaaggaggtgccaagagggaaacaggaccagagaagggtagggatgccagagccctgtctctcatctgccggctttcataggaccagaaagtgtgtgagcagggccccgggggtgtgctgaggcagctcttttccctccgggtcccttctttctggctgcagtctccccagggtctcccagcccagtgcggccctgcgactgcgttaagcaggccctggtcaggctctcaccagtctcgctgggctcgtagtgctcaatgagggagagggccagcgcaggctgccgccctcctcccgctgctggtgctgcaggaacgtcactaactgatccaccgacagagtctcccctgagcccgcggctcggcgaaggtgcggtcgatctccacccgctggtcagcatcttgtagaaggcctcaatctcctcgtcctccagggagtctgtctgggagtggtcacactcttggcagagccaggacagccgagtgggctcagagcaggccttgggsggtggtcaagggcccatggacaggcagccccagcccccacttcctgcctcaccctgaagatcttccgggcatagctgtcgtccacctggatgttgagctccttcaggaagttctgcagctccttgaagctcatcttgttgtccttgtttttgtcagcttttcgcaagcaggagtgaatccagctgggcaagaagtaaggaaagaacccaggaaccctggaacctaccaaggtcccagccagagccatggatggctccagctgaagccacctatagccacagctccctgcaggcctgacttactacacatccatgtttcagtggcctc

SEQ ID NO: 550693 - DNA, 799 bp, Homo sapiens
  misc_feature 278, 305: n = A,T,C or G
cctcagcctccagagtagctggaaccacagacgggcaccaccacacccactaatttttgtattttttgtagagatggggtttcactgtgttgcccaggctggtcttgaactcctgggctcaagcaatccgcccacctcagcctcccacagtgctgggattacaggcgtgasgtaccctcacctggctggcaacatgtcttaagataatgttggctaatggagcaaacaacaaagtttgaaaacttccaacaagtcttctgttcgggcgctggtgacancgggactgatcgctcagcgcagtggcnagaggcctcctccctggtccaccgcggtccccacccaaccccacctgtccctgctgcctgctgccgtagcaggagctggaggctgctgctgccagagggcaatgagttccagtggtgcttctcccaagtcaatggggccatcgaggaggacatggctgaagatctgccacaggggagaggccagaagaggctttgacgaccatcagtgagtgaccagggggctacacagctcactctgcagcagatatcatttccactgttgagtttaattactctggagatcctgtggcaggagacaaggacggtggagtcgtttttcagcagactagagaataaaagccgccctcattctaggggagaatataatgtttacagtacctttaaaggtcatgaaccagggtttggctattagaaaagtctagaaattgagcaaaaaataaaattaggtggttacaacagaacactgctcattttctactctctacaaatgataa

SEQ ID NO: 550694 - DNA, 799 bp, Homo sapiens
  misc_feature 278, 305: n = A,T,C or G
cctcagcctccagagtagctggaaccacagacgggcaccaccacacccactaatttttgtattttttgtagagatggggtttcactgtgttgcccaggctggtcttgaactcctgggctcaagcaatccgcccacctcagcctcccacagtgctgggattacaggcgtgacstaccctcacctggctggcaacatgtcttaagataatgttggctaatggagcaaacaacaaagtttgaaaacttccaacaagtcttctgttcgggcgctggtgacancgggactgatcgctcagcgcagtggcnagaggcctcctccctggtccaccgcggtccccacccaaccccacctgtccctgctgcctgctgccgtagcaggagctggaggctgctgctgccagagggcaatgagttccagtggtgcttctcccaagtcaatggggccatcgaggaggacatggctgaagatctgccacaggggagaggccagaagaggctttgacgaccatcagtgagtgaccagggggctacacagctcactctgcagcagatatcatttccactgttgagtttaattactctggagatcctgtggcaggagacaaggacggtggagtcgtttttcagcagactagagaataaaagccgccctcattctaggggagaatataatgtttacagtacctttaaaggtcatgaaccagggtttggctattagaaaagtctagaaattgagcaaaaaataaaattaggtggttacaacagaacactgctcattttctactctctacaaatgataa

SEQ ID NO: 550695 - DNA, 571 bp, Homo sapiens
tgagaaatgtgtgtgctgtttctggatagaaaggcttaagttcttctgggacaaaaaatgtcaaagaaccgagacatttttagaaagaaaataaggaagacagcttggtatctttgtagatgaaatgatatgaggaaatggcatggcagccctggaagctttcctggagtactcagccgtatctatcaggaaatagaggcctttagaggcagttcctccagcagagctgagctcacttggagttactgttcattcatgaacttccttctattaacatttgtcaagatggctttttaaagaattatgttaactttgagttaatttaataatccaaagtggggtgatacgtcatttccataacacttgtactagatcatatctggtgagaccagatcgccaaagaaagtagccctgtcagagtagggcagcgaatttcccagaggaggaccctctacctacttagcamcctgacttgctgcaggacatttcggaacacaaagcccaggcctattagatgtggaagcagattgccaggcccatttctactagctagagtccttaatgtatctat

SEQ ID NO: 550696 - DNA, 603 bp, Homo sapiens
atgaaataatctgtgcactaaacccccatgacatgcgatttacctatataacaaacctgcacatgtacccctgaacctaaaataaaagtttttttaaaagtatgtcctccgccaagtatgtctgtaggggcagtgacctactcttgagtccctgtattaggaataatattatttaagagcttctgaaatgaatttatctgtgcaagttcttgaaaactttgatttatttgattgcattgtctgttggagagcagcatagctctgccttgagtgatgtcagaaggaagcttaaaatccttaagacaagccggaaatctgaaaaaggaaggaactgtggagatcatctcaagaggaaatgatacttgctcttatgctgcagaggtgatgactaggggttggagataatcaagaagttgctaaatagttcttagtgtcaaaacagagctcagaaaggtgccaggcagctgccattgcgagccatcaggtttggccccttcacgtgagacctcattatcactgtamcccccttaataaaaatggacacaccttttcacaaatcccttcagtgtacaaggcatgaagcagtgcattgccttattaggc

SEQ ID NO: 550697 - DNA, 603 bp, Homo sapiens
atgaaataatctgtgcactaaacccccatgacatgcgatttacctatataacaaacctgcacatgtacccctgaacctaaaataaaagtttttttaaaagtatgtcctccgccaagtatgtctgtaggggcagtgacctactcttgagtccctgtattaggaataatattatttaagagcttctgaaatgaatttatctgtgcaagttcttgaaaactttgatttatttgattgcattgtctgttggagagcagcatagctctgccttgagtgatgtcagaaggaagcttaaaatccttaagacaagccggaaatctgaaaaaggaaggaactgtggagatcatctcaagaggaaatgatacttgctcttatgctgcagaggtgatgactaggggttggagataatcaagaagttgctaaatagttcttagtgtcaaaacagagctcagaaaggtgccaggcagctgccattgcgagccatcaggtttggccccttcacgtgagacctcattatcactgtaccccycttaataaaaatggacacaccttttcacaaatcccttcagtgtacaaggcatgaagcagtgcattgccttattaggc

SEQ ID NO: 550698 - DNA, 998 bp, Homo sapiens
cctgtaagtttttcaaagctgcatgcttaaaaaacaggccccatcttttttccgggctcagccttttggatgcaaatccactgggcaagtggtcaytttaataaaatcctcctgtctcacccattggtctctccagtctcttgactccctcaacactgagacggctccaaggtagcatgtgagatttaagtaataacttttttgtttgtttgtttgtttttatttttgtatgagactgggtctggctttttcacccaggctgaagtgcagtggtgcagtcacagctcactgcagccacttcctgggctcaagccaccctcccacctcagcttcccaggtaacttaggactacaggtgtacaccactatcattggctaatttttgtattttttccagagacaaggtctcactgtctcactgagctcaggctggtctcaaattcttgagctcaagagatttaccagtctcagccttccaaagtgctaggattacaggcatgagacactgtgcctggccagtaattttgttttattatattaaggtcaggtttataccactttcttctgattacagaagtaatacatgctcattgtataacactgaaaatgtaagcagtataaagaagaaaataaaaaagaatatgaaaatcactagtggtcccattgcctaccgatacactatgtgctgctttctaatctttacttactctccctccatgtgtgtctttgtgtgtgtgtgtgtccgtctgtgtgtttttttttttggcacataggacaatagctgacatttatagctcccctaccagtgttgagcattatgttaagcaattgaaaaagtgtattttaactcctacagaaaacctataaaggggaagggcagtataattaacagaattttccagatgaaaagactgggacctgacttcaggtcacattttatatacagcattacattttacttcagacacttaacaaagtaagtgtcctggagaatcttgg

SEQ ID NO: 550699 - DNA, 998 bp, Homo sapiens
cctgtaagtttttcaaagctgcatgcttaaaaaacaggccccatcttttttccgggctcagccttttggatgcaaatccactgggcaagtggtcattttaataaaatcctcctgtctcacccattggtctctccagtctcttgactccctcaacactgagacggctccaagrtagcatgtgagatttaagtaataacttttttgtttgtttgtttgtttttatttttgtatgagactgggtctggctttttcacccaggctgaagtgcagtggtgcagtcacagctcactgcagccacttcctgggctcaagccaccctcccacctcagcttcccaggtaacttaggactacaggtgtacaccactatcattggctaatttttgtattttttccagagacaaggtctcactgtctcactgagctcaggctggtctcaaattcttgagctcaagagatttaccagtctcagccttccaaagtgctaggattacaggcatgagacactgtgcctggccagtaattttgttttattatattaaggtcaggtttataccactttcttctgattacagaagtaatacatgctcattgtataacactgaaaatgtaagcagtataaagaagaaaataaaaaagaatatgaaaatcactagtggtcccattgcctaccgatacactatgtgctgctttctaatctttacttactctccctccatgtgtgtctttgtgtgtgtgtgtgtccgtctgtgtgtttttttttttggcacataggacaatagctgacatttatagctcccctaccagtgttgagcattatgttaagcaattgaaaaagtgtattttaactcctacagaaaacctataaaggggaagggcagtataattaacagaattttccagatgaaaagactgggacctgacttcaggtcacattttatatacagcattacattttacttcagacacttaacaaagtaagtgtcctggagaatcttgg

SEQ ID NO: 550700 - DNA, 998 bp, Homo sapiens
cctgtaagtttttcaaagctgcatgcttaaaaaacaggccccatcttttttccgggctcagccttttggatgcaaatccactgggcaagtggtcattttaataaaatcctcctgtctcacccattggtctctccagtctcttgactccctcaacactgagacggctccaaggtagcatgtgagatttaagtaataacttttttgtttgtttgtttgtttttatttttgtatgagactgggtctggctttttcacccaggctgaagtgcagtggtgcagtcacagctcactgcagccacttcctgggctcaagccaccctcccacctcagcttcccaggtaacttaggactacaggtgtayaccactatcattggctaatttttgtattttttccagagacaaggtctcactgtctcactgagctcaggctggtctcaaattcttgagctcaagagatttaccagtctcagccttccaaagtgctaggattacaggcatgagacactgtgcctggccagtaattttgttttattatattaaggtcaggtttataccactttcttctgattacagaagtaatacatgctcattgtataacactgaaaatgtaagcagtataaagaagaaaataaaaaagaatatgaaaatcactagtggtcccattgcctaccgatacactatgtgctgctttctaatctttacttactctccctccatgtgtgtctttgtgtgtgtgtgtgtccgtctgtgtgtttttttttttggcacataggacaatagctgacatttatagctcccctaccagtgttgagcattatgttaagcaattgaaaaagtgtattttaactcctacagaaaacctataaaggggaagggcagtataattaacagaattttccagatgaaaagactgggacctgacttcaggtcacattttatatacagcattacattttacttcagacacttaacaaagtaagtgtcctggagaatcttgg

SEQ ID NO: 550701 - DNA, 655 bp, Homo sapiens
tgttaatgagtttgccatttattttggcagatctgaaatagtatttcaaaggcagtgcagaagcagatggggacattacttgtaattgtttaatactgttatgacatgacatttgcttacagaaagagaggcaagccaccatcttcaagggagggcatagtcatcgactgtgatcctggtgtccatgttggaatatcatggcaactatctcccagcactggacttgattacttctactgcattcccagtgatagctgagttgcttaatttactttcttcaacaccgtttgtgaaagggaagctagaaaactgcactatgtatggcttagtgcactgaaaatttgacgttatcaaaggagccatgatctcgtctttctctatccctcttcaaatgttttctataattatattcaaaggctcatgggtcttaccatgggtcatcgaggaagggctggtaactctttaaaccacaggtaaaatattacaaacatctgaaacctgcatttttacaggtgagagaaatgaggccagaaaagttaagtgcatcatgttgaatacaattttatttggtgrtcaggcagccctgggttcaaatcctggctcgattgctaccaattaagccacttaactccatctgagcctcaggttgtccatc

SEQ ID NO: 550702 - DNA, 3078 bp, Homo sapiens
tgcatacaaaaatactacttatctttataaatgaatgaaattctgtcatttgcaaaaacgtggatgaatttagaggacattatactaagtaaaataagccagacacagaaagacaaatatctcatgataccacttacatgtgaaatccaaaaatgtgcactcatagaagttaagagtagagtggtggtttatcagaggctgagcaggtcgggtggcgggggtggaaaaaggggaaatattcaatgggataatgcttcagttaggagaaatacattctggtgatatggtacacagcaaagtgactgcagttactcataatatagtgcatatcttaaaagcgctaaaatagtacattttaaatatttcaccataatgtaataaatatctgaggtgaaggatatgttatttagcctaatttgtccacttcacaatatttacatgtattgtaccacattgtaccccatatatatttatcaataaaaacaaaattttcaaaagttagaaaaacagatgtgctagatcttcatctaaagacatttctgagaaaaatgtatctgttttctttcagaagaaatttacacttaatagatattatggtaactaaagtaaggcagataattttggccatcagcttatattgtgggataatctctttttgctgaccttgaaaagctgtggcatattcacaacaagtaggaaaatttttttatcatgatcaggtaaaggttctgcatgcttctattttgaataatattttccccttagaatcacaaagtgtgaatgccttttatttcagaggtctagccctaaatggtttagtcaattacatcatgcattctgaaataagtactggtgcatttgtgaaggtactatatataattgtgtttttaatttaaccatcatgtaagtctacttttctagttaagagtctatattttatagaggccctccatatatatagaagagcttttctgacagtatatccwttaaattgcaaagataaataaaggaacaattttgctttcattttttattattgttattatttttcaaggctagtcaagtgaagcagtgggagtggagaaggaactgctttcatttttatatgttggtgttacaggctctatgtgacaggctatatatttgtctgctgaattttagaaacaaagtgaaatatttatttcatatttcattagatagggatgacgattacattgagggattgggactagactgaaggcaccacatcatcaatcacttggaaacaaaattttgcctatgtgttatgttatattggcaaaaacttttattgtgtcaggcgatatagctccctattgaaatatgtgaaaaatgcagagaaaaaaaggcaggattggttatcaagggatatttaggcctgagatacatgatgcaaatattgaaaacgtacactttttaaaaattagatttaaaatgtaaattgaagcagagcatttagaaaaagacataatatctactataaaagtcctgggttagaaaagttaaaatactaaatgaaaaaataatgcttcttgggtggcttaaaatcaaatatgagacaaaaaattactcagaaatttttctaagattaaaaacatgtatacagtttctttgatacaaaatgaaataaatgtctggatgtaactttaatagaatagaatagggagacaagggcaaagagcaggtgtatgcagaatgaagtgaacatattattgtaacaatgagagggacagagttgaatgattgctcttggagacaaggagttctgatgtctaagttaatgacaaatcttttgtttgcaagttaaaaaaatgtaacttaaacttggtgaaggaataaagggtggttggggggatgactctttgtacattaaacttgttttaatgactaatgaattaatcataagttcaaatgattttatggaggccctttcttttttatttgatgtttctggactccttttttctttgtatttgctccatttttacctacttgaacaatttttaccctcgaagtttaggaaacactgtaaccaaatgttccaacaagatgtgatccctgaaagcatttgcagctgggggattagaaaaaaagggctttctctttcaacaaatgcatgttaatctcgatgaaaactcagaagtttaaacatggtcctccttgggtcatgtggctaccccaggaccaatcattgcacaaacataggagatactctcaaaagccaggctggagtcaaggttatccagtggagtttccactttaaaaatcagttttgtcagcctttgtgtttgcatattacagacatgatagctgtctattccacttctattagagatgaaaactaagagcatatgcccattcagaggattttacatgaatcttcatagcagctttacttgcaacagccaaaacctgaaaacattccaaatgtccatggcaggtgaatttgtgacttataaacttactatggtatacgtatataatgaaataatactccctagtaagaacagaacaattgatagatgtagcaacatgaattaatctcaaaaatagtgatgctgagtgatcagaaagtatacataccatatgatttcatgtatttggaaataaaaactcatggatagtgactggaagtggatcagtggttacctgtggaagagatggggggataggcaggaaaaagtgagtagaaaaaacacaagaaaactttggtggtaaaggtaatggatatgtttgctattttaatatgttgctggttttatagagctacaaatgccaagaattaccaaaatgtacaattgaagtatgtgcagtttattgcatgtaaataaaccttttaaaaattaaccgatacaagttgacttacatgaccagaaagctcttgaaaaactctcctgttttctcccctatttttattcttgcatgcccttatagactgtgttaacacatttctcatcttacggttcttttgtgtctacatttctccaggtcaatataactatcaccataatttcttggtttctctttagttcatcagtaattatgagtaatgtattgaaa

SEQ ID NO: 550703 - DNA, 2002 bp, Homo sapiens
ccacccaggggactcggcctgctgtggtccgcagtgccgtacgaactctgaggcatggactggtgccatgtgctttatagaaaaattaacttaagatccattaaagagttaaacgtgccatctgatttacctcaggcctctgctccatcagccatcaggtggcagccactcaggctgttgtaatctcgccatccctgcttccttgagtgggtgagcttggtggctggtccaactggtccaggcacacccttgcacaggtggctggtggctctttgagccagcttggccttgcctgccatgcacaggccccaggtactaacacgctggtccaagtgagtttgtcctgccttggaacaaattctaagtccggacagggccacagaaggccgagtgccctgggtggcaatcctggctgctttctacacttgaacataaagtcctcctctagacagcctgtggtctgcctcttggcaaccaagaagcccacagtgccatatgacgcctgaggcatggactggagccccaaaggcagtgcacaccctgctcctgagcctgctgctcgtttttatatggcgccatttgtagcacagttgttgcactgaagcttgggcatgccggccaaggccaagytgcctcaaagagcaaccagccgcctctgcaagggtgtgccttgagcaggtgcaccagtcaccaactagcagccagacatgtgcttcacttcttctaccctaaaggtagggccacagtgccatctgcttttcctaaggcctctgctccatcagcaattaggtggcagccaatcaagctgtgggaagctggccatccccacttccttcagtgggtgaggtggtggatgctctgcctgctctaggcgcacccttgaacaggtggctggttgctctttgagccagcttggccttgcctagcatgcataggccccagcgactggcacgctgctccgagtgagcttgtcctgccttggcacaaattctcagtctggccagggccacagaaggccgagtcccccggacggtaatcttggctgctttctgcacttgaatgtaaagtcctcctcaagacggcctgtggtctgcctcttggcaaccaagaagcctgcagtgccatatgacccgagtcatggactggagcccgaaaggcagtgtacaccctgtcctgatcttgctgcttgtttcctctctgtggctccattcatagcacagttgttgcactgaggcttgtgcaggccgagcaaggccaagctggctcaaagagcaaccagtcaactctgccacggtgtgccaggcaccggttctccagccaccaacctcactcactcccgcaaatggcacatcagttcttctaccctaaaggtaggaccaaagggccatctgcttttctgaagtcctctgctctatcagccatcacgtggcagccactcgggctgtgggaaccaggccatgtatttccttggttaagtgaggtttgtggttggtctacctgctgcaggtccaccctcgaataggtggcttgttgctttttgagccagcttgcccttgcctggcatgcacacgcccgagcgactgccacacagctccgagtgatcttgtcctgcattggcccaaattctaagtctggccagggccacagaaggacaagtaccctagatggtaatcctggctgctttctgcagttgaacatgaagtccttctcaaaacggcctgtgatctgcctcttggcaaccaagaagctcgcagtgccataccatccctgaggcacggactggagccccaaaggcagtgtacaccctggtcctaagcctgctgctcatttcccctatgtggctccatttatagcacagttgttgcactgaagcttgtgcatgccaggcaaggccaagctgcctcaaagagcaaccagccacctctgtaagggtacgcttggagcagatggaccagccaccaacctcacccactcaaggaagcagggaatgcgcgtttgtacc

SEQ ID NO: 550704 - DNA, 1628 bp, Homo sapiens
aaatttttaccagcgattgattgagctgattcaaattacttcttaccatcttcaattccatatcttgtatattcggagagcgagttcaagttgcttcacttctaactttttcttttgcagctcttcgaattttcctaattctttcctattttttcttttaatatattggcatttcttctcttattcttgttttaaagtcaatctgccattaaatatacttatcttaaaattcattttgttagaaaatagaattcactttgagatctacttcttcctatatcggtttattattccaatgaaattcttatattcttgaatacgtttttcctttctagttctgaggtattttattactgaactctcttccaaatgacacacatgcttgaacaatagtgagaaaagaatatcttctagttagaaagattctgttactagtaacttcaacaactgttatggaaaagaatactggaagctatccagtaaagttataagttgaaaattattatttwaaaaatataacagtcaaaattactcctcaatgaggacagatcatttagagttaactaattaaaatgacgttactttttataaacaagtttacatatttattagacataaatattcatcttcataaaataaggcaagtatccttaaaaataattataatattaaaatctgagactaggctagagaatctaatatctgttatcccatatatcttttgtttctttttttagtaatactttaaatgtatctgttgattattatatattttatcaacaaattttaaatctcttttagaataagacagaatataatatttaatttaaaataaaaataataagtatttttaacatagaactcggaattaattttatttatttaggagagagagagatgttgaatatactagtcataaattactctgtatttttctttatactccatgcatattaagattaaaagtgtataattaaaggaaaatgattattgggggtagaggaatggccgtttcacactccctttgttgaactataaatgaatataaattttcttgggaacaatttagaagtaatgaacaaagaacttcttaaaaacttcctataatttaaccaaatatttttatattgaagaatttattccaagtcaataattagaatggtacaaaaggatttacatgcagttatgccttgcaacacttattataacacaaaaaaattaaaaataaaaaattaatttgttaagtaaataatggggtttccgaataatggccttctatgtagccattaaaattgtgatttaaataaataagtatttaattatcaggagatgtattcacagttaagaacttgtattatttaaatgaatttgacactctacaagacagagatttctttctccagttaaacctcagaaggtaagtcagctagtacaaaaagtatcctatatactagtatatcatacctcagactgcagagctcttgttctcttttaactttttgattctctatgattttatttcttttggttctgatagttcattttgtagtacacgaagcttatttttcatttgtttcatttttgctgtaagttgttcacagggattttttttcttttttatctttttt

SEQ ID NO: 550705 - DNA, 1628 bp, Homo sapiens
aaatttttaccagcgattgattgagctgattcaaattacttcttaccatcttcaattccatatcttgtatattcggagagcgagttcaagttgcttcacttctaactttttcttttgcagctcttcgaattttcctaattctttcctattttttcttttaatatattggcatttcttctcttattcttgttttaaagtcaatctgccattaaatatacttatcttaaaattcattttgttagaaaatagaattcactttgagatctacttcttcctatatcggtttattattccaatgaaattcttatattcttgaatacgtttttcctttctagttctgaggtattttattactgaactctcttccaaatgacacacatgcttgaacaatagtgagaaaagaatatcttctagttagaaagattctgttactagtaacttcaacaactgttatggaaaagaatactggaagctatccagtaaagttataagttgaaaattattattttaaaaatataacagtcaaaattactcctcaatgaggacagatcatttagagttaactaattaaaatgacgttactttttataaacaagtttacatatttattagacataaatattcatcttcataaaataaggcaagtatccttaaaaataattataatattaaaatctgagactaggctagagaatctaatatctgttatcccatatatcttttgtttctttttttagtaatactttaaatgtatctgttgattattatatattttatcaacaaattttaaatctcttttagaataagacagaatataatatttaatttaaaataaaaataataagtatttttaacatagaactcggaattaattttatttatttaggagagagagagatgttgaatatactagtcataaattactctgtatttttctttatactccatgcatattaagattaaaagtgtataattaaaggaaaatgattattgggggtagaggaatggccgtttcacactccctttgttgaactataaatgaatataaattttcttgggaacaatttagaagtaatgaacaaagaacttcttaaaaacttcctataatttaaccaaatatttttatattgaagaatttattccaagtcaataattagaatggtasaaaaggatttacatgcagttatgccttgcaacacttattataacacaaaaaaattaaaaataaaaaattaatttgttaagtaaataatggggtttccgaataatggccttctatgtagccattaaaattgtgatttaaataaataagtatttaattatcaggagatgtattcacagttaagaacttgtattatttaaatgaatttgacactctacaagacagagatttctttctccagttaaacctcagaaggtaagtcagctagtacaaaaagtatcctatatactagtatatcatacctcagactgcagagctcttgttctcttttaactttttgattctctatgattttatttcttttggttctgatagttcattttgtagtacacgaagcttatttttcatttgtttcatttttgctgtaagttgttcacagggattttttttcttttttatctttttt

SEQ ID NO: 550706 - DNA, 1628 bp, Homo sapiens
aaatttttaccagcgattgattgagctgattcaaattacttcttaccatcttcaattccatatcttgtatattcggagagcgagttcaagttgcttcacttctaactttttcttttgcagctcttcgaattttcctaattctttcctattttttcttttaatatattggcatttcttctcttattcttgttttaaagtcaatctgccattaaatatacttatcttaaaattcattttgttagaaaatagaattcactttgagatctacttcttcctatatcggtttattattccaatgaaattcttatattcttgaatacgtttttcctttctagttctgaggtattttattactgaactctcttccaaatgacacacatgcttgaacaatagtgagaaaagaatatcttctagttagaaagattctgttactagtaacttcaacaactgttatggaaaagaatactggaagctatccagtaaagttataagttgaaaattattattttaaaaatataacagtcaaaattactcctcaatgaggacagatcatttagagttaactaattaaaatgacgttactttttataaacaagtttacatatttattagacataaatattcatcttcataaaataaggcaagtatccttaaaaataattataatattaaaatctgagactaggctagagaatctaatatctgttatcccatatatcttttgtttctttttttagtaatactttaaatgtatctgttgattattatatattttatcaacaaattttaaatctcttttagaataagacagaatataatatttaatttaaaataaaaataataagtatttttaacatagaactcggaattaattttatttatttaggagagagagagatgttgaatatactagtcataaattactctgtatttttctttatactccatgcatattaagattaaaagtgtataattaaaggaaaatgattattgggggtagaggaatggccgtttcacactccctttgttgaactataaatgaatataaattttcttgggaacaatttagaagtaatgaacaaagaacttcttaaaaacttcctataatttaaccaaatatttttatattgaagaatttattccaagtcaataattagaatggtacaaaaggatttacatgcagttatgccttgcaacacttattataacacaaaaaaattaaaaataaaaaattaatttgttaagtaaataatggggtttccgaataatggccttctatgtagccattaaaattgtgatttaaataaataagtatttaattatcaggagatgtattcacagttaagaacttgtattatttaaatgaatttgacactctacaagacagagatttcttyctccagttaaacctcagaaggtaagtcagctagtacaaaaagtatcctatatactagtatatcatacctcagactgcagagctcttgttctcttttaactttttgattctctatgattttatttcttttggttctgatagttcattttgtagtacacgaagcttatttttcatttgtttcatttttgctgtaagttgttcacagggattttttttcttttttatctttttt

SEQ ID NO: 550707 - DNA, 1429 bp, Homo sapiens
atgcggcgcctcccccctccccccagtccccgtggggcggaacctggggactggagtccaccggagcagtaggcggcacccgcggggagacaggtgtcggcgcagcctgggaggctcaggtgctacctttgccgggtggggtttgtgaggagtgagctcttcgtccccggaggcgagcaaatctgtcggtggctcatcacagagcgctgttttggaaagcgttccacccacctcagcttcgtgctgtgtttgggccactagtcagggggaaggatgctgagcgacatggactttagaggtggggctcccgctggacgggatggctctgggctctccagcttacccccacccttgcctcccaaacccgttagagcgtaggaatcattgggagcacgtgataaaaatgccacggattgtggctcaccaaagcagggaagcggatttggaacttaggctcccaagttgtgatccgtcgagcttggcaagcactgttttagagagtaggcttcctgcaagcaggagccggttttgtgtatacctcaccatggcatcttggtacctggcatggtgcctggcacaccgtagatgatcagaaaatatctgtagaaagtctaaattattagggatagtgcagcataggagttcttgagacattttcaggagcttcttgagattaatatctgtcagatttgttttacagtatatgatttttctcagctcccaacttttgtgattgtttttaatgccatgttttcagtatgttctaggcaaaagcagggtatatgttgcttagtatacactatccactaggccggttgcggtggctcactcctgtaatctcagcactttgggaggcagattgcttgagcccaggggcttgaggctatagtgagccaaggagttagaggccagtgtgggaaacatagtgaggctcgtctccgcaaaaattagctgggtgtggtagcatgcatttgcagtcccagctactctggaggctgaggtgggaggatcacttgrgctcaggaagtacaagttgcagtgagccaaggttgtgccactgcattccagcctggataacacagagaaacccagtctcttaaataattaaataaatacataaatgattatgtatactccagctaggttaaaattaattctgaatcaaaattctaaattaaaatatgcatgtttctttctcttcatcatttgagaacactaggcttttaggatttcattccgttggggcaggtaaatatctacatttttgacaaagcaaatatgaatcactgttaattcaagaaaggtgggaatttgcttaaacctgagtatttgtagtctttgtgatttttttaaactttaaatataagttttcttttttttctttttttttttgagatggagtctcactctgtcatccaggctggagtgc

SEQ ID NO: 550708 - DNA, 616 bp, Homo sapiens
gtatatacagagaactaatgacgttgggcaacaaatggcttattaatcaaatgccagaatgcatgaagaagaaaagaaaagaaaaataaattagactgtattaaaatgaaaaatcctaggcatcctaaataaaggttaaatgcaagccagaaaattgggtaaaatatttacaaaatatataattgaaaagtataatatccattatataaagaggatttctacaaattaatgatataaaataaataatatagtagaaaaaatgattaagaactactacacaatattcacaacagatgataaatagtgaattattgtgaaaagacaaytgaaaagagcaaggtacaattcaacagcaataagactttatgcccttttctataaaaacacaaaactatgccaagggctttaggaaccgtgaatttatatacggcgaaggggagtttaaatctgccactttgaagagttttttggaaatatatagtaaagttgaaaatatatacatatgtgtatatatatatacccacacacatacacatacacactagaaattccacaaggtaaaccttctccaggagaatacacacacatttgcagaagagatgtccaaaggtgtttg

SEQ ID NO: 550709 - DNA, 616 bp, Homo sapiens
gtatatacagagaactaatgacgttgggcaacaaatggcttattaatcaaatgccagaatgcatgaagaagaaaagaaaagaaaaataaattagactgtattaaaatgaaaaatcctaggcatcctaaataaaggttaaatgcaagccagaaaattgggtaaaatatttacaaaatatataattgaaaagtataatatccattatataaagaggatttctacaaattaatgatataaaataaataatatagtagaaaaaatgattaagaactactacacaatattcacaacagatgataaatagtgaattattgtgaaaagacaactgaaaagagcaaggtacaattcaacagcaataagactttatgcccttttctataaaaacacaaaactatgccaagggctttaggaaccgtgaatttayatacggcgaaggggagtttaaatctgccactttgaagagttttttggaaatatatagtaaagttgaaaatatatacatatgtgtatatatatatacccacacacatacacatacacactagaaattccacaaggtaaaccttctccaggagaatacacacacatttgcagaagagatgtccaaaggtgtttg

SEQ ID NO: 550710 - DNA, 616 bp, Homo sapiens
gtatatacagagaactaatgacgttgggcaacaaatggcttattaatcaaatgccagaatgcatgaagaagaaaagaaaagaaaaataaattagactgtattaaaatgaaaaatcctaggcatcctaaataaaggttaaatgcaagccagaaaattgggtaaaatatttacaaaatatataattgaaaagtataatatccattatataaagaggatttctacaaattaatgatataaaataaataatatagtagaaaaaatgattaagaactactacacaatattcacaacagatgataaatagtgaattattgtgaaaagacaactgaaaagagcaaggtacaattcaacagcaataagactttatgcccttttctataaaaacacaaaactatgccaagggctttaggaaccgtgaatttatatacggcgaaggggagtttaaatctgccactttgaagagttttttggaaatatatagtaaagttgaaaatatatacatatgtgtatatatatatacccacacacatacacatacacactagaaattccacaaggtaaaccttctccargagaatacacacacatttgcagaagagatgtccaaaggtgtttg

SEQ ID NO: 550711 - DNA, 909 bp, Homo sapiens
tggccacacaggagacacagtcacctacaatcgcagagggccctgaccctgtctgcccaggagtatgcttaaatacactattataaagtaattaagatatttcagttcaaggggaaaattagaataaagaactttcaataggtaaaatgacaattatttgtaggtgacatgtttatttacctagaaacccaaaataattacatgaaaaaaattacaaattagaagagattacagtggcaggattaaatgtaatacacagaaatatacaatctttccatacagacaatcttaggtggaggacatcaaggaagaaatacgtccatttattgcagcaacaaaaacgataaactgcttaggaataaacttcgtaagaaggacgcaagttctacataaaggaaaacttaaaatgcaattacaggacaggaaatatttgagtatgggaacagcttactatggtcaagttcacaaagggtaaaattaaaagttaaatcataaatttattgcaatccaaaaattaaccaactggaatggaaaaaagttgtaccagaaaaactgatattaaagttcatttggaaaaatgaacgagtaagggtagctgaggaaaygccgaaaaggattagaataggatagattcacacacagaatctatcctgtagattctcacaagcatgagtgatgagtacagaagacactttttattttccagtcaagctgacacctacagaagacactttgaagcctcctttacacagcaacatgaaaaccatccagatggccatgggcagggactggtcacttatagtgtgccgctccatgtgttaagaactgctcgtcagattttattgctaaaggacacgaggaaactgtttaacaatgtatgtggtatgccatcacttgtgtaaatacaca

SEQ ID NO: 550712 - DNA, 909 bp, Homo sapiens
tggccacacaggagacacagtcacctacaatcgcagagggccctgaccctgtctgcccaggagtatgcttaaatacactattataaagtaattaagatatttcagttcaaggggaaaattagaataaagaactttcaataggtaaaatgacaattatttgtaggtgacatgtttatttacctagaaacccaaaataattacatgaaaaaaattacaaattagaagagattacagtggcaggattaaatgtaatacacagaaatatacaatctttccatacagacaatcttaggtggaggacatcaaggaagaaatacgtccatttattgcagcaacaaaaacgataaactgcttaggaataaacttcgtaagaaggacgcaagttctacataaaggaaaacttaaaatgcaattacaggacaggaaatatttgagtatgggaacagcttactatggtcaagttcacaaagggtaaaattaaaagttaaatcataaatttattgcaatccaaaaattaaccaactggaatggaaaaaagttgtaccagaaaaactgatattaaagttcatttggaaaaatgaacgagtaagggtagctgaggaaatgccgaaaaggattagaataggatagattcacacacagaatctatcctgtagattctcacaagcatgagtgatgagtacagaagacactttttattttccagtcaagctgacacctacagaagacactttgaagcctcctttacacagcaacatgaaaaccatccagatggccatgggcagggactggtcacttatagtgtgccgctccatgtgttaagaactgctcgtcagattttattgctaaaggacacgaggaaactgtttaacaatgtatgtggtawgccatcacttgtgtaaatacaca

SEQ ID NO: 550713 - DNA, 557 bp, Homo sapiens
tacctatgtaacaaacccacacatcctgcacatgtatcccagaacttaaagtaaaaataaaacaaaaattttttaaattaaaaaaatttaagtcattttagctaagaacatcaaaaaattttcactatctcacatagtcatgagtgaatatatttgcctaattttcttccttttgtatctaaaaatgcctataggctggacgtggtgtctcatgcctgtaatcccagcactttgggaggctgaggcrggcagatcatgagctcaggagttcaaaaccagcctgaccaacatggtgaaacgccatctctacacacaaaaaaatacaaaaattagccgggcgtggtggcactcacctgtaatcccagttactcaggaggctgaggcaggagaattgcttgagcccgggaggcggaggtcgcagtgagctgagatcatgccactgcactccagcctgggcaacagagtgagactccgtctcaaaaatatatatatatctatagatactaagtagaaattacaagtaaatgtttatctcgcatagtatttagtaaatattt

SEQ ID NO: 550714 - DNA, 569 bp, Homo sapiens
ttccttgggtaacttctaatttattmtttatttgtgtggtaattttctcattttcttccatttctccctgagttcaatgaaatattttgaaacttctccctgtttttagtctgtttggcctttcagttttttgaatttctgatttaagggtaaatcctgatatccttaaggacttctttgagtatatttaattgaatttggagtgtagacaatcattttctttgttgcatggttgtttttcaagggagttttatgtatttgtgtgaaattctattttctgcttttgggtttttgggaggttttgttgttttgttttagttttttgaaatagttctctacgaatcttactttcctgctgttcattttcatgatattggagtgttttacaagattcttggtttaatgacttttctagtagcctagcaaaatctaggtctttcaggaggcttttgttgttcattttggtttcactggtggggaaatatgttatgaacaattttatggttctttttggtcactcaggactctaaaattgtctcatttctccctgatttaccaccagattccca

SEQ ID NO: 550715 - DNA, 569 bp, Homo sapiens
ttccttgggtaacttctaatttattatttatttgtgtggtaattttctcattttcttccatttctccctgagttcaatgaaatattttgaaacttctccctgtttttagtctgtttggcctttcagttttttgaatttctgatttaagggtaaatcctgatatccttaaggacttctttgagtatatttaattgaatttggagtgtagacaatcattttctttgttgcatggttgtttttcaagggagttttatgtatttgtgtgaaattctattttctgcttttgggtttttgggaggttttgttgttttgttttagttttttgaaatagttctctacgaatcttactttcctgctgttcattttcatgatattggagtgttttacaagattcttggtttaatgacttttctagtagcctagcaaaatctaggtctttcaggaggcttttgttgttcattttggtttcactggtggggaaatatgttatgaacaatkttatggttctttttggtcactcaggactctaaaattgtctcatttctccctgatttaccaccagattccca

SEQ ID NO: 550716 - DNA, 876 bp, Homo sapiens
acctcaggggtttgtttttgaagtgcctgcatatgttgctgcaaaatgagcagggcttctatcattttggaagaaggtgagaacacattctggtgaatgagtagtctctgcttaaaaacttacattcctgggatcattttgacctgggggctttgtctataattagaattattcgctataaagagggtagtagtatactgcttgtgaccgatgtctcatacagccaggcttcccatagttttggggattagcatgtttttcttctgaattatatccttttattgtaaaaaattataaatcataatcatacctttatattcatgttattcttattgtatttattttaaacactgtagctatagaaataaataaggctcctgatgtagagctctcctgtattgatayctatttattattcctctgaggctaatatatagctgattttattctaggctttagttgaactttctttcaattttcatctgaatccatgaatatctaaaactttgtttgatggtgtcacacttccaaatagtttagcagtgtgcagtccgctgtttttgtaaacatgtgtttttctttctggcatcttctctgtcacaactgtgggccggtccagctggctgctctggcactgagtctcatctctgccttggtggagtccaacagtagacccagacatatgcctcatatgcctattatgtcccttcattccgatgacaaggtagttgcactgctcagccatttgagtcaacaattaacatgtttaaaaataatgccacaatgatttctcaaagacctaaagacagaaataccattcaacccaacaatcccactactgggtgtacacccaaaggaatataaatcattttatca

SEQ ID NO: 550717 - DNA, 639 bp, Homo sapiens
tcaagcaattcattatcctataacatcttggctgtgtggaaatatcttcatgacttgattttgcatacgaagaaactgaagcccaaaggtataaggaaaaacattcttaaaagtcattaaaatctcaaggacaaataaaattttgagcaaaaacaagatttccttaggtacagagcagttgctttttggagctctggatgagccacaatgctcattctcattgctgtttggaaaacttcactgaatttcttttattgtaaactggatctattccaattaagttgggagagatgaaaaaaggacaaaaagacttcaataatttgtacattgaacaycgaatacacatatttacctctctattactatctcagaaatgcagtgttttttctttgacctcatgattttcctacctttgaagcatagatttgtccatgaagattgtgtgaatgaaacattcacttctgtcttgtgtgtgtgtgtgtgtttaaacacttatatggtggaataattgacatacaatggactgcacatatttaaaatgtaccagttaagttctaatgtatgtatacacctgtgagactatcaacacattaagatagcaaatatatcaatcacacccgaaagtgtcatttttatttt

SEQ ID NO: 550718 - DNA, 639 bp, Homo sapiens
tcaagcaattcattatcctataacatcttggctgtgtggaaatatcttcatgacttgattttgcatacgaagaaactgaagcccaaaggtataaggaaaaacattcttaaaagtcattaaaatctcaaggacaaataaaattttgagcaaaaacaagatttccttaggtacagagcagttgctttttggagctctggatgagccacaatgctcattctcattgctgtttggaaaacttcactgaatttcttttattgtaaactggatctattccaattaagttgggagagatgaaaaaaggacaaaaagacttcaataatttgtacattgaacaccgaatacacatatttacctctctattactatstcagaaatgcagtgttttttctttgacctcatgattttcctacctttgaagcatagatttgtccatgaagattgtgtgaatgaaacattcacttctgtcttgtgtgtgtgtgtgtgtttaaacacttatatggtggaataattgacatacaatggactgcacatatttaaaatgtaccagttaagttctaatgtatgtatacacctgtgagactatcaacacattaagatagcaaatatatcaatcacacccgaaagtgtcatttttatttt

SEQ ID NO: 550719 - DNA, 1450 bp, Homo sapiens
tggactaaggccctgacagggctcctaggccccaggagatggcattttgtcctaagcacagatgttgaaagacagtttctacatctatattagatgtgtaaactatatttcatcaaaatacaagggctccgagaaaattagtcaatggtttgggctttagcaggcatgtttgggtggcacgcatctctatgctaaggtgggagcatgtctctgctcggtgttggtggtgtgacccacgaaggcacaatcctcactccggcgaacacggagcctattgtgtgtgtgacgcctgaacactgcgagtggatttaaaggtgtrattgtgaaactgaaagtgttactatagttcagcgatacatgaggcaggacttggaaaacaaatgaccagcctgagaaaccatttcaggattccacgaggagcatgaggaaggggccagcgactgctaggctgtgtgaggtgggcacaggcatgcttcacagattctcacctacgggcagtgcctgggacatgcgtttctctatgctgtgagctcagcagcagtctccacactagggaatggatcacttagcaaaatgtatagattttttttcgactaggccatatttatagtggctttaaaaaatcatgtacacgtcttatacctttaattaatgtaaaggcgtcacatacatatttaatacatgtgtttagtatttactgtgtggttatattttctcaacagcagacatccatatgttgctatttctagcagatctgcggggctcgcgtcttcattgctgcataggttgtctgtcatgcatgcagctttcaccttttgtgttgacggacaaactcaatctgtaccaccattaaagagcaggccattttgtttttgtggttgcatgttctcatgtagttctaaatttcttgtaaagaatatgatgtttaaaatgttattattattatattttgacagtctagctctgtcgcctaggctggagtgcagtggcacaatctctgttcactgcagcctccacctcccaggctcaagcaatcctcccacctcagcctctagaataggtaggaccacaggcatgccactccatgcctggctaattcttttatattttgtagagacggggtctccctatattgcccaggctggtctcaaactcctgggctcaagtgattgagccttccaaagtgctgggattataggcatgagccactgcacccagatgatatgttcaattttatcatattttaaaaagtttcttcctaaatgaatttaatttgaagtgggacaaagagaattgagtctacatgagctattttctatgttctcctttgtttagagtttcataattatctccctgatggaatacataaataatactgacattattatcacattgtaattcttcagctttcattgttaattgcatttgtcagtgccttcagtatatgaga

SEQ ID NO: 550720 - DNA, 1450 bp, Homo sapiens
tggactaaggccctgacagggctcctaggccccaggagatggcattttgtcctaagcacagatgttgaaagacagtttctacatctatattagatgtgtaaactatatttcatcaaaatacaagggctccgagaaaattagtcaatggtttgggctttagcaggcatgtttgggtggcacgcatctctatgctaaggtgggagcatgtctctgctcggtgttggtggtgtgacccacgaaggcacaatcctcactccggcgaacacggagcctattgtgtgtgtgacgcctgaacactgcgagtggatttaaaggtgtaattgtgaaactgaaagtgttactatagttcagcgatacatgaggcaggacttggaaaacaaatgaccagcmtgagaaaccatttcaggattccacgaggagcatgaggaaggggccagcgactgctaggctgtgtgaggtgggcacaggcatgcttcacagattctcacctacgggcagtgcctgggacatgcgtttctctatgctgtgagctcagcagcagtctccacactagggaatggatcacttagcaaaatgtatagattttttttcgactaggccatatttatagtggctttaaaaaatcatgtacacgtcttatacctttaattaatgtaaaggcgtcacatacatatttaatacatgtgtttagtatttactgtgtggttatattttctcaacagcagacatccatatgttgctatttctagcagatctgcggggctcgcgtcttcattgctgcataggttgtctgtcatgcatgcagctttcaccttttgtgttgacggacaaactcaatctgtaccaccattaaagagcaggccattttgtttttgtggttgcatgttctcatgtagttctaaatttcttgtaaagaatatgatgtttaaaatgttattattattatattttgacagtctagctctgtcgcctaggctggagtgcagtggcacaatctctgttcactgcagcctccacctcccaggctcaagcaatcctcccacctcagcctctagaataggtaggaccacaggcatgccactccatgcctggctaattcttttatattttgtagagacggggtctccctatattgcccaggctggtctcaaactcctgggctcaagtgattgagccttccaaagtgctgggattataggcatgagccactgcacccagatgatatgttcaattttatcatattttaaaaagtttcttcctaaatgaatttaatttgaagtgggacaaagagaattgagtctacatgagctattttctatgttctcctttgtttagagtttcataattatctccctgatggaatacataaataatactgacattattatcacattgtaattcttcagctttcattgttaattgcatttgtcagtgccttcagtatatgaga

SEQ ID NO: 550721 - DNA, 1450 bp, Homo sapiens
tggactaaggccctgacagggctcctaggccccaggagatggcattttgtcctaagcacagatgttgaaagacagtttctacatctatattagatgtgtaaactatatttcatcaaaatacaagggctccgagaaaattagtcaatggtttgggctttagcaggcatgtttgggtggcacgcatctctatgctaaggtgggagcatgtctctgctcggtgttggtggtgtgacccacgaaggcacaatcctcactccggcgaacacggagcctattgtgtgtgtgacgcctgaacactgcgagtggatttaaaggtgtaattgtgaaactgaaagtgttactatagttcagcgatacatgaggcaggacttggaaaacaaatgaccagcctgagaaaccatttcaggattccacgaggagcatgaggaaggggccagcgactgctaggctgtgtgaggtgrgcacaggcatgcttcacagattctcacctacgggcagtgcctgggacatgcgtttctctatgctgtgagctcagcagcagtctccacactagggaatggatcacttagcaaaatgtatagattttttttcgactaggccatatttatagtggctttaaaaaatcatgtacacgtcttatacctttaattaatgtaaaggcgtcacatacatatttaatacatgtgtttagtatttactgtgtggttatattttctcaacagcagacatccatatgttgctatttctagcagatctgcggggctcgcgtcttcattgctgcataggttgtctgtcatgcatgcagctttcaccttttgtgttgacggacaaactcaatctgtaccaccattaaagagcaggccattttgtttttgtggttgcatgttctcatgtagttctaaatttcttgtaaagaatatgatgtttaaaatgttattattattatattttgacagtctagctctgtcgcctaggctggagtgcagtggcacaatctctgttcactgcagcctccacctcccaggctcaagcaatcctcccacctcagcctctagaataggtaggaccacaggcatgccactccatgcctggctaattcttttatattttgtagagacggggtctccctatattgcccaggctggtctcaaactcctgggctcaagtgattgagccttccaaagtgctgggattataggcatgagccactgcacccagatgatatgttcaattttatcatattttaaaaagtttcttcctaaatgaatttaatttgaagtgggacaaagagaattgagtctacatgagctattttctatgttctcctttgtttagagtttcataattatctccctgatggaatacataaataatactgacattattatcacattgtaattcttcagctttcattgttaattgcatttgtcagtgccttcagtatatgaga

SEQ ID NO: 550722 - DNA, 1450 bp, Homo sapiens
tggactaaggccctgacagggctcctaggccccaggagatggcattttgtcctaagcacagatgttgaaagacagtttctacatctatattagatgtgtaaactatatttcatcaaaatacaagggctccgagaaaattagtcaatggtttgggctttagcaggcatgtttgggtggcacgcatctctatgctaaggtgggagcatgtctctgctcggtgttggtggtgtgacccacgaaggcacaatcctcactccggcgaacacggagcctattgtgtgtgtgacgcctgaacactgcgagtggatttaaaggtgtaattgtgaaactgaaagtgttactatagttcagcgatacatgaggcaggacttggaaaacaaatgaccagcctgagaaaccatttcaggattccacgaggagcatgaggaaggggccagcgactgctaggctgtgtgaggtgggcacaggcatgcttcacagattctcacctacgggcagtgcctgggacatgcgtttctctatgctgtgagctcagcagcagtctccacactagggaatggatcacttagcaaaatgtatagattttttttcgactaggccatatttatagtggctttaaaaaatcatgtacacgtcttatacctttaattaatgtaaaggcgtcacatacatatttaatacatgtgtttagtatttactgtgtggttatattttctcaacagcagacatccatatgttgctatttctagcagatctgcggggctcgcgtcttcattgctgcataggttgtctgtcatgcatgcagctttcaccttttgtgttgacggacaaactcaatctgtaccaccattaaagagcaggccattttgtttttgtggttgcatgttctcatgkagttctaaatttcttgtaaagaatatgatgtttaaaatgttattattattatattttgacagtctagctctgtcgcctaggctggagtgcagtggcacaatctctgttcactgcagcctccacctcccaggctcaagcaatcctcccacctcagcctctagaataggtaggaccacaggcatgccactccatgcctggctaattcttttatattttgtagagacggggtctccctatattgcccaggctggtctcaaactcctgggctcaagtgattgagccttccaaagtgctgggattataggcatgagccactgcacccagatgatatgttcaattttatcatattttaaaaagtttcttcctaaatgaatttaatttgaagtgggacaaagagaattgagtctacatgagctattttctatgttctcctttgtttagagtttcataattatctccctgatggaatacataaataatactgacattattatcacattgtaattcttcagctttcattgttaattgcatttgtcagtgccttcagtatatgaga

SEQ ID NO: 550723 - DNA, 1450 bp, Homo sapiens
tggactaaggccctgacagggctcctaggccccaggagatggcattttgtcctaagcacagatgttgaaagacagtttctacatctatattagatgtgtaaactatatttcatcaaaatacaagggctccgagaaaattagtcaatggtttgggctttagcaggcatgtttgggtggcacgcatctctatgctaaggtgggagcatgtctctgctcggtgttggtggtgtgacccacgaaggcacaatcctcactccggcgaacacggagcctattgtgtgtgtgacgcctgaacactgcgagtggatttaaaggtgtaattgtgaaactgaaagtgttactatagttcagcgatacatgaggcaggacttggaaaacaaatgaccagcctgagaaaccatttcaggattccacgaggagcatgaggaaggggccagcgactgctaggctgtgtgaggtgggcacaggcatgcttcacagattctcacctacgggcagtgcctgggacatgcgtttctctatgctgtgagctcagcagcagtctccacactagggaatggatcacttagcaaaatgtatagattttttttcgactaggccatatttatagtggctttaaaaaatcatgtacacgtcttatacctttaattaatgtaaaggcgtcacatacatatttaatacatgtgtttagtatttactgtgtggttatattttctcaacagcagacatccatatgttgctatttctagcagatctgcggggctcgcgtcttcattgctgcataggttgtctgtcatgcatgcagctttcaccttttgtgttgacggacaaactcaatctgtaccaccattaaagagcaggccattttgtttttgtggttgcatgttctcatgtagttctaaatttcttgtaaagaatatgatgtttaaaatgttattattattatattttgacagtctagctctgtcgcctaggctggagtgcagtggcacaatctctgttcactgcagcctccacctcccaggctcaagcaatcctcccacctcagcctctagaataggtrggaccacaggcatgccactccatgcctggctaattcttttatattttgtagagacggggtctccctatattgcccaggctggtctcaaactcctgggctcaagtgattgagccttccaaagtgctgggattataggcatgagccactgcacccagatgatatgttcaattttatcatattttaaaaagtttcttcctaaatgaatttaatttgaagtgggacaaagagaattgagtctacatgagctattttctatgttctcctttgtttagagtttcataattatctccctgatggaatacataaataatactgacattattatcacattgtaattcttcagctttcattgttaattgcatttgtcagtgccttcagtatatgaga

SEQ ID NO: 550724 - DNA, 550 bp, Homo sapiens
taaaattcacttttctttggctctactcaagaaacacctaccagtcctttaaggttcaacttaagcatcctctctactataaaaatcktctccaatactacattcagattaaacttcttcatcctctacatcttcaaaagactttcttcatacttctattatgacatttatgtgattctaactggttttatactaaacttggtaaaacacttatccatttattaaacttgttttctagtagtgagcacagagtattacacttgcgtatgaagttgtttttctcccttctgttattcttccacaagattcattcttgtatcctccacaagatccattcttgcgtatagtacacaacacatgctcagtaaatatttctgaataaaaaaagtttctcaatggactaagtgttattcaaggatgagcactgtgccttattcaattatatttctcacagtgactacaaaaaactgagtaacacaaactgctagaggttgaagaaaatattgggcttagattctggccatcaatattcgactaaaactaagacaat

SEQ ID NO: 550725 - DNA, 809 bp, Homo sapiens
gaaataggaaggtaacataattcagcataaccatgttargtttctttcctatgttttcttgtctgaggtacaggagaagataggtagagatgtctaagtctagaagtttggatgtgcatattaagaagcttcagtggttggtggaacttaaaaaaactctattttagaaaacataatttttcttttccttgtgataaatatatcgctagaatgatacctctaatcctggatctggtaaaggtcatcaatgggtggctgaagggggaattgttatagaaggatcaaaatagatgattgtatcagaggaaagcacttaaacaaggggaaactatgaattcagaattaaatacgtgaaccttccatttactgacactctttgtgttatcatcatacgatggctccatctaaccataacatctcctccttttcttctctgcacaatttagcatttgccagtatgacagaagtcactattatttctatgagccactcactctaccatgtgctttcatcctattacctcagctaattctcggatcaatcccaggagcaagatactattatttcccacattttctagataatgaatttaagattcagagaggagaagtggcttgctagagacagcaggtgagtagcaagaattcaaaccagggcatgtccgtgcccagagcccaaccttgtgtctatccctgcaccatctcagtgcaaggccacaaaggcccgtactgcctctgtgacggcagaataatatggcaactttaactgccattcagcaccaaacaacactcataaatgaatattccaga

SEQ ID NO: 550726 - DNA, 824 bp, Homo sapiens
aagcacataagcagtgagtgaagcgggaaaattcctcggatacagtcagacagcatgttccaaccatgtcccttccctggggtttactggttactgattacaatgatcaactacgagccaataagtgctcttgccccaactctctgacattcgttctagaattatttatgttgaaggttttattttttttccatgccattccacaaggctgtgaggtagccattccgttcatcggattcctttgtactttatctgagaaatgtggcccctaccctgactttgctgatggggtgtcggaagcatttgttgtctccggtctcgctgagtgttatggcatagaactgtcctttgttgaggtaggtcatggggccctccccctgcttctgacggagagatttggtggcttccagggtgtactgaaatgtgccactgtgaaagaaaacaaacagcggtcagatccactcacttggacatttctgctcttttgaccaatttcacatcatagcatttcacatgaayattaaccaatgtttactgttttagagacaaaacacagcatatggcaaaagagatgagaccagatcaaaggtcattgctagtacaatgtatacaacatttctaacagtggcccataaaccagatggtttggaaggggataaagtccacgatgtgcctggccaattgtgcaaaaaacagctctaccaggagaacccctggtagatcttagctggcaattaggtaatgcttgaagcttaagaattaatagaatttgccatttttaccctaacaacaaaacaactaaataaataattttgttcaattca

SEQ ID NO: 550727 - DNA, 330 bp, Homo sapiens
aggtctatttttgctgacattcctatgggatctcctaatggtagatggttcctcagctcactttgtgatggagaactggcgtgaactcacaatgaaaagtgtgtcaagggccctttgtgtgctgtcatgatgcatgcttttgtgtcaggtcagaaaaaaagacactgacattggtaagatatgtttggggtggggcagatgggaaatgcacgtttagcagagtggaattccrgtcgctaggcctctgagtcaggctctttgagccagtggtttggtgaaactgattggaaggaaagagagaacattgactcaattgcaaatgagttagat

SEQ ID NO: 550728 - DNA, 510 bp, Homo sapiens
aaataaagtcacttttaaaaatgttaagtaaatatctttaaaataatttttaaaattatttttccatgataatattttcaggacttcaacacttggaactatggtgttcataattgtgtcttttgagatcatgattggctccagttttgttcaccactgtggcccagtttagcatagtatttgtcacataraaggtatgtgattggccaggtgcggtggctcatgcctgtaatcccagcactttgggaggccgaggcaggcagatcacctgaggtcaggagttcgagaacagcctggccaaacatggtgaaaccccgtctctactaaaagtacaaaaattagccgggcgtggtggcggacacctgtaatcccagctactcaggaggctgaggcaggagaattgcttgagcctgggaggcggaggctgcagtgagccaagattgcaccactgcactccagcctgggtgacaagagtgagactccgtctcaaaaaaaaaaaaaaaaaaaaaa

SEQ ID NO: 550729 - DNA, 1157 bp, Homo sapiens
ggcctgcaccaggccttcctcacacccaccaggatgtggactcagcctcccgggacgtgccccatagaggatgatggtggcatgtggggccagaggaacagggtgggctgcaccccccatagctcacagcttccttctcataggtctcctccgtgctttctcactggccacagcttcctccttcttcctttacgcagcagcctcccactccccagctcctgctaccagctcctccatgcttacatgcccacaacccgtgctgagcccagcagacaagagccttcagctaccaagacccacccttcttagaaggcaggaagagaattagaaataataaggtctttttcttgagatttgargtcaaaagctagctagcggctgcatagggaatccagctcagctctctctgacatcagagcctgaggcttccaagcctgtgccctcggcagtgaggctggtaggtgggatcacaaacccctcctcctccccgtccctgccctctgcatccctgctcgccgctcgctaacactgcttctagtttctagaggcagttgcagagccaagtttaaggctaaggagtccaaaggagtccggcactgagggtgaatttcaggcatgtggcaggctgtggggagagatcatcagtcttcaggtgacagccttgtctccacctgtgagcaaggttgacaagggcagaggtagcctcactgccttcagcttgtcttcattcaggctgtggtcatttctatagactagtggtacccagaccatcagcatgatcatcatctaggaacttgttagaaatacgaatttctaacagcagagctatggacagtttgcctggtctgttagggcctccggcctggactcacgccaccatcatgtcccactacctgcacactcctccaaaacatgtctctgtccatcaggaacgtggccaatgacaccaggtctgcagatagacaggataaatttggtcatgatggtcctacaggaaatgtttatgttccacttgatttccacacccaccgtccaagaggatttgcttgtgttcaatttgaggatgtttgtgatgctgaagatgctttgcataatttggacaggaaatagatttgtggacatcaagttgaaatacagtttacacagggggatcagaa

SEQ ID NO: 550730 - DNA, 1157 bp, Homo sapiens
ggcctgcaccaggccttcctcacacccaccaggatgtggactcagcctcccgggacgtgccccatagaggatgatggtggcatgtggggccagaggaacagggtgggctgcaccccccatagctcacagcttccttctcataggtctcctccgtgctttctcactggccacagcttcctccttcttcctttacgcagcagcctcccactccccagctcctgctaccagctcctccatgcttacatgcccacaacccgtgctgagcccagcagacaagagccttcagctaccaagacccacccttcttagaaggcaggaagagaattagaaataataaggtctttttcttgagatttgaagtcaaaagctagctagcggctgcatagggaatccagctcagctctctctgacatcagagcctgaggcttccaagcctgtgccctcggcagtgaggctggtaggtgggatcacaaacccctcctcctccccgtccctgccctctgcatccctgctcgccgctcgctaacactgcttctagtttctagaggcagttgcagagccaagtttaaggctaaggagtccaaaggagtccggcactgagggtgaatttcaggcatgtggcaggctgtggggagagatcatcagtcttcaggtgacagccttgtctccacctgtgagcaaggttgacaagggcagaggtagcctcactgccttcagcttgtcttcattcaggctgtggtcatttctatagactagtggtacccagaccatcagcatgatcrtcatctaggaacttgttagaaatacgaatttctaacagcagagctatggacagtttgcctggtctgttagggcctccggcctggactcacgccaccatcatgtcccactacctgcacactcctccaaaacatgtctctgtccatcaggaacgtggccaatgacaccaggtctgcagatagacaggataaatttggtcatgatggtcctacaggaaatgtttatgttccacttgatttccacacccaccgtccaagaggatttgcttgtgttcaatttgaggatgtttgtgatgctgaagatgctttgcataatttggacaggaaatagatttgtggacatcaagttgaaatacagtttacacagggggatcagaa

SEQ ID NO: 550731 - DNA, 1071 bp, Homo sapiens
aaaattattaaaaatataatataagaggtctcatccatgacctaatggatgtctactggtaacctttatgaactaagcatggtcaaattaaaccattgttaaccaatgactctcctgagtcatgggcaatgatgatgaaatcaaaacactgcctacagattaagaggggaaaagtaagttattttctttcatcatttcgaatattatgtagttcattcaaaaatactgtcagtatacctgagaaaattgatttaggacagccaggttgtttatttcctccatttggataaaaatctatatgtcccaagggctcttgaatgcctaaacctgagaagaaaggcacccaagaatcacaacatgtatataatcaggtgagtatcttgcataaaacaaaatagcctataaaatccattgaaagttactctttaaatattagaattgaaaataagtgctgtttttataaagataagtttttcttctataattccttcatgaaaagtatatttcattaatttaatatatttgccagtcagcagtttactatcggtcagtcacagttttttgtggtatgaccgcataagtgaaaaaagaaatagagagggcagccaagatggccgaataggaagagctccagtcttcagctcccagtgtgagtggtgcagaaggcaggtgcagaaggcagcatttccatctgaggtaccgggttcatctcactagggagtgccagacagtgggyggaggaaagtgggtgcagcgcaccatgtgcaagccgaagcagggtgaggcattaccttactcgggaagcacaagggatcagggagttccctttcctagtcaaagaaagggtgacagatggcacctggaaaatcgggtcactcccaccctaatactgcgcttctgcgatgggcttaaaaaacggcccaccaggagattatatcccacacatggctcggagggtcctacgcccacggagtctcactgatggctagcacagcagtctgagatcaaactgcaaggcggcagcaaggctgggggaggggtgcctgccattgcccaggcttgcttaggtaa

SEQ ID NO: 550732 - DNA, 1184 bp, Homo sapiens
ctaggaagcaataagataatttayaagattgccagttacaaaatcaacttaattttagttctctacaataacaaaaaacagctattaagttataataaaaatatatccattgataatacccataaagcatctgaaattaatcatagttatttgaagaataattctttggagaaaatcttaaaactctaatttaggatgtgatggttaattttatgtgtcagcttggctaggccatggttctgagacatttggtcaaacattattctaaatgttgctatgaagctattttttagatgagattaacatttaaatctgtagactttgagtaaagcaggtttatctctatagcgtgtgggggcctcattcaatcacttggaagcattaatagaaaaaagactgatctctctcaaagaagttgagattctgccagcagatagatggcctttgggcttgaatggtaacaactcttcccttggtctccaacctgctggcctactctgtagatttcagatttgcctccacaactatgtgagccagttccttaaattcaatctctctctctctacattatatatttacatgtatttatatatctgtaacatatatagatataagtaggaatatatctataagtaggaatatatcatagtatttatagatatttatagacacataataaatatataaaaatatataatatataaataatacaaatatcagtaaaattgatattcttaaattaaaattctcttcaaattaatctacatagcaaaatccaattaacaattccaaattgattattaaatagcttgatacattaaaattttatgttgagtaacaaatattgaagtaaaatgataaaacgtcaaaaaaaataataatgaagaataagaaagacaaggtagttgctttgtagttaataaactgttccatcaagaatgtggtaaaatagtggatgctgtctgaagaatagataaatagtccaacagataaaatagaaacaaagatatttgattaaagaaaacagcaccacaaattaatggatcaagcagatttgtaagtatgtggtggtgtaaaaaatagctcatgacatagagaaaaaaataaaactagcaacacctctaacaaagttagactctagataaagacataattaagatatatcatgatataaaattaataga

SEQ ID NO: 550733 - DNA, 988 bp, Homo sapiens
taccaaaaaaacccccaaaaaacaaaaaaaaaattgctaactcctggtctaggtagtgtgaggttcagtttctggctccagcactcactattggggagkcattaagccagtgccattctcctaggaagtgctccacatagcagctattggcacacaagtcatgtggagatggggaatcctaaggaaaagaacgatcgactttggataaacttattgaacttttaaattctgacagtatcctgcttatataatttctgcacatatggaatctgcatcctgagtttttttctatccagttcatgtttgtacaagtatcttatatgtgcagatgatgaaacagtgcctttaagcaaatgcctttaagcaatgcctttaaacaatgccttgagcaaaatgatgtatttgagtgagtttattgtcagtattaccaagcacaatgtttgactcctgctttggtaatgtcaggaagtgtggcagatggtggggagacaagaggagtcattcaggaagaagccaggagctcccaggataaaagaagcaattaaaatgcaacccttggatgggctcaaatgcagtctgcctcctcttccttatcacgggccagatccagtctttcttaattgaaggggtcaagctaaagttcttatcaacaaaagtgatgttgcttaggaaagtcatattccttagctaattttaggtgctgttttgtgcttcctgtgttaccaaccttctaaacagtaaataagagaacattgctgtctataaaaaaatcttttagttgtagtgtcaacttacaaaagaattgacaaaaaggagtggaagttcttttaagtccttgccaggctgcagagcagagctagaagaacataaagtcttaatcctttccctgctctttaccttgggggtggtggatgtttttcagggctctgtgggggactggcgtggtgtttggtcatgctgactggggagccagatgatctatctgagc

SEQ ID NO: 550734 - DNA, 553 bp, Homo sapiens
aattccagcactttgggaggctgaggcaggtggatcacctgaggtcaggagtttgagaccagcctggccaacatggtgaaaccccgtctctactaaaaataaaaaaktagttgggtgtggtggcacgtgcctgtagtcccagctactcgggagaatcgcttgaatccgggaggtggaggttgcagtgagccgagatcacaccagtgcactgcagcctgggcgacagagtgagaccccgtctctaaataaataaataaataaataaataaataaataaataaaagacacaaaattcataagccaaaagaaaacgcaagaggatagacacagtaaatataatacattcagcaattacaatctaaaatatgacagaattgacatcaaacatggtagttatatcaaaactagatcggcttaatttgcctattaaaaaagattattttcggattggctcgtatagcaaaaactcaactgtgtgctgcacacaagatacacaccgaaaatgcagcaattgaaatagctaaaaataaaggaatgaacgaaaatttaccag

SEQ ID NO: 550735 - DNA, 553 bp, Homo sapiens
aattccagcactttgggaggctgaggcaggtggatcacctgaggtcaggagtttgagaccagcctggccaacatggtgaaaccccgtctctactaaaaataaaaaagtagttgggtgtggtggcacgtgcctgtagtcccagctactcgggagaatcgcttgaatccgggaggtggaggttgcagtgagccgagatcacaccagtgcactgcagcctgggcgacagagtgagaccccgtctctaaataaataaataaataaataaataaataaataaataaaagacacaaaattcataagccaaaagaaaacgcaagaggatagacrcagtaaatataatacattcagcaattacaatctaaaatatgacagaattgacatcaaacatggtagttatatcaaaactagatcggcttaatttgcctattaaaaaagattattttcggattggctcgtatagcaaaaactcaactgtgtgctgcacacaagatacacaccgaaaatgcagcaattgaaatagctaaaaataaaggaatgaacgaaaatttaccag

SEQ ID NO: 550736 - DNA, 1545 bp, Homo sapiens
tggtcccttccttccacccatcgtcagtattgtgttggtttgttaatttgttgatttggtcatagtatttaatatgatttgtgtttccttatttatttagccaccgttttgattgccttttttttccgaatggtaatttctgcatgatacacttctgtacgttgtcttctgactgttacagactttctactacctctcccgatctgctgtttccttgtttcttaacaggattttttacagtgttgcgtctaatgtaacttagacaataaagggtttggttgtctacactgcagcttctcggtgtctctcccctgctttccgctcgctgcttcccgctctgcccctgctggggcctggctgcaccctggcctgccttcctatactctcctgtttcccgctcatatctcttcctcatttttgcgttcaaataacacacagctaatgagcttctaaaaatcttttcaggttgttcacttgtattccttaatttgaagaatgaatatttaaattctctcaaaagtcagatattgaggatcttttctgggaaattggccactgtacctgcccacctttctgcctggttccctggaaggtcttattgtcatcttagacggacagatttcattctcagcaccatacagatttggcttcaaagccaggtgaattttgcctttgaggctctgaaaagtattaagtgttttaagaggtcccccaatatttacttatttattttttaaaccaagaaagacactggttccctgaaaagcaggtgcttcaggaagtagcaattgggagttgcatacagttacttcgtcagagaaaggagcgcccagtatgacaggcccccacccctgatccggccactgtgcacaggtcgctgagggtgtgagaacacctctgcaggggctccggcacatgtgggtttcatcgtctcacactccttcaggctgcaggggttgagtgcagaaagggcaagcttcatctccatggtgcctctccaggctggcaactctggtcggcctctgttctttggacagagagggtgtaggttacagggtcagtagggatgctttctggatcaaagaaagtgggtgyagtgcttagtctgttgtgtggaagagggcacctcctgggctttcgtggctggagactgtctaccaacattccttccttcaaactagacaaaccctcctctgccacccccagcaaattctcagaggtttccaagctgtagaaaaaggaaggaaggaaggacggcattcacatagctttactttccgcttcaaaatgtcttaagtagcatatgttgttttactgcttttaactttggtgagttctaatttcagaacgttttgttcactgagcaaaaaaacagatgaaacaaccacaggccaggacttcaagtgaggaggacgcctttgtttgccgtggttggtgggagcacacgccggagcccggtaacgtgcctgtgggagtgaccaagggccacccgcccaagggaaaatgttcattcttcatcagctttgctaattctgctttgaggca

SEQ ID NO: 550737 - DNA, 626 bp, Homo sapiens
tagggtccttttcgctcttggttgggttccatgaggcacacttataatgacctcctctccacatgcttaagccagtttgagtcacttcctgtcacaactgaaagagccttaggggaaccgggaaataattcatagtcaatctattttactctcttcctctttcttttcttttgtctgtttccaacttcagagttcaagtcactatcccgctttccccagtgctgcatgttgttgagtgggcagtattgcttggaagtggaatccattgcactggaagaaggaaaatatcatggcgaattagtaaaactaaagtgagttgaggcagtggctttaggaaagaacatgtggcttgatgcaggmtgacacaggcatagatgggaaacgatgaactctagaatgttttgtgcccttccagttggaggattagggagaactaagaacgctattagagtttgaccaagtagagttaaggcccgttggccaaaggccacctggattgcccaggaaatgatgctgtaaccttacgataatgatcctacaggaaattcatatgcaaatgaagtgcaaagtaattagagtaattagtggcaaagcaatatgtggttccaacagctctgccttggggg

SEQ ID NO: 550738 - DNA, 626 bp, Homo sapiens
tagggtccttttcgctcttggttgggttccatgaggcacacttataatgacctcctctccacatgcttaagccagtttgagtcacttcctgtcacaactgaaagagccttaggggaaccgggaaataattcatagtcaatctattttactctcttcctctttcttttcttttgtctgtttccaacttcagagttcaagtcactatcccgctttccccagtgctgcatgttgttgagtgggcagtattgcttggaagtggaatccattgcactggaagaaggaaaatatcatggcgaattagtaaaactaaagtgagttgaggcagtggctttaggaaagaacatgtggcttgatgcaggctgacacaggcatagatgggaaacgatgaactctagaatgttttgtgcccttccagttggaggattagggagaactaagaacgctattagagtttgaccaagtagagttaaggcycgttggccaaaggccacctggattgcccaggaaatgatgctgtaaccttacgataatgatcctacaggaaattcatatgcaaatgaagtgcaaagtaattagagtaattagtggcaaagcaatatgtggttccaacagctctgccttggggg

SEQ ID NO: 550739 - DNA, 626 bp, Homo sapiens
tagggtccttttcgctcttggttgggttccatgaggcacacttataatgacctcctctccacatgcttaagccagtttgagtcacttcctgtcacaactgaaagagccttaggggaaccgggaaataattcatagtcaatctattttactctcttcctctttcttttcttttgtctgtttccaacttcagagttcaagtcactatcccgctttccccagtgctgcatgttgttgagtgggcagtattgcttggaagtggaatccattgcactggaagaaggaaaatatcatggcgaattagtaaaactaaagtgagttgaggcagtggctttaggaaagaacatgtggcttgatgcaggctgacacaggcatagatgggaaacgatgaactctagaatgttttgtgcccttccagttggaggattagggagaactaagaacgctattagagtttgaccaagtagagttaaggcccsttggccaaaggccacctggattgcccaggaaatgatgctgtaaccttacgataatgatcctacaggaaattcatatgcaaatgaagtgcaaagtaattagagtaattagtggcaaagcaatatgtggttccaacagctctgccttggggg

SEQ ID NO: 550740 - DNA, 1078 bp, Homo sapiens
tgaatgtgctcaagtctcagcctcaatgttattcaccatattccagaagtaaagactttaaatatagactgtgatagtgaagaacaaacaacttaattatctgttcttatcaaatggagcttgtcaccaaataaagcaaaatgagagttaaaaaaaaaattcagcaactgctttttggaaattgtaaataagtctctttctctctctctctccctactccccccaaccccccatgtccaggtrttagttctcatgatttctctcatgattttgtttttgttggatgcttcctttgttaaattttatttatattgtttcttttttctaatcattgcatctattttaattcatttattagttgatgacccttatatttgtagaaattttagctgttctatgtctttcacatgacaattttttttgaaataagttttatctgaaatttgtcagaagctcatgagaaagaaaatatctcattttataccattgtatatgattttattatggtcttcccttaaggaagatctccctcacacaaatatgcacacacacacacacacacacacacacacgcacatgcacacacaatctcgcaagagcaaaatcgagacgagttactgattagtaaactagaaagtgaaacataatttctctattagcatggttccatactatcagtgctcaagttatcttttctataaaatgtcattcctctgggatgaatgaccgcccataatccaattatatttcaaagtcacagtttcttttaaaatatttaataggttgatttttaaagttgaggaatagttatggaaactttttactgttagcctttactcaaactacacagcttgagatttagtttctaaaataaaagtaacatcatgtaattttactgtatacagttagtaatataaataaagtgtgtgataaatgttccatatgtatgctccacatgtgtgcatattagaaaatgttaattttctcccctagaagaatattttatatattctacatcatgcttcattaaattatgggtaatgataaagtatatgtacattttataaattacacttca

SEQ ID NO: 550741 - DNA, 1236 bp, Homo sapiens
tgaaagagtaaaagaattcataaaattgtgtctctttctgatttagtgccctcagtgttctgttgatcaagtttctctgttctcatcagggtaaagtagatttttcaaaacatgatatttgaactaattcatacrtgtttgcagtaaaattctatcagtgcatatcaactagaaaagatgttattatttcattaaacccctttcaacaaaatcaagatttaaattgctgcttttctcataccattcaaactacaaaacctctgataagaaaaagaagaaatcttgaaagctgatttttatatcgcagatgttgcatgagtatttatatagaagggggtgggagagggagagaagcaaatacaagacagcagaggagagagggagggaaggagagagaagaggaggcacatatatgctttcgtgctttcctttcaacaaaaaatattgcctgccctttcttctatgtgtagtagctagaataatgctaaatttaattcaatgtctaatgctagatatcgtaatctttcagcagaaaaatctactgaaaccagcccttcctgtagcatttttttcatgtacagggattctggaactcacaattaagtgaatatgtaacaagacaagcataaatcttgtcaagtcataactttacagaaatcatagtagatttgcagactgaaacaagctttgaacattcagaatattgctggttttgctcactttattcaggctcaaaggtctctgtaggacaaataaaattttctttgaatatcctgaagcatgaataataatttaagtttattctgcatgcctccttctcgacatagtaatagaataaaggtttgaggcactgttctttgagcctcttgtataatatatcttcaacagtaaagtatatcatatgtttggattctggacatagacaagcaatttatgcctcagtcacatctgtttgttccagttgtatttttattgatatatgagattgcaatattattaattaaggtaagagacttaaaaattacaatgataatgcaactcattacttgctcaaaataattatttatgttttatactacctgattttaatcaaaattaaattattctgtattttcacattttcaaaaattatatgtttaaaaatcataaattaaatatctaggattatagaaagcatgtatgtttcaatacaacaatggctcaataaaaccttgtaaaaccaatacaacaatgtat

SEQ ID NO: 550742 - DNA, 592 bp, Homo sapiens
ccatgaagtcctgtgatttgctttaaagacagataccctgtgaaggctgacacgttagactttagatatcagtcacttagcagtcatttcataccagggaatcatttaatttgcctggtctttagagaataatagaataatacctctcttatacractgctttcaattaatctcacacacacacacacacaatatgaaaatactttgaacactgcatgacacctgctaatgatttattacatgacaacagcacatttctgacctagcgaatacgaagatggcactattagcaaaccaaagtctctctttgcttaatataattttaacaaatatatttataggaaaaatttagctactgataaacgttcttaacaattcttctgacggtttgtggtaaagtaattatgaacttgattaaatcaaacttattcttcatttaatatgataatttttttcttaaaaaattattcaaacactctgtttggtatttgggatgttctgtttcttcatgttgccaaactagatagacaggaaaaaataggataaattaatcattactagaaataatttgaaagactgtttaactttatct

SEQ ID NO: 550743 - DNA, 592 bp, Homo sapiens
ccatgaagtcctgtgatttgctttaaagacagataccctgtgaaggctgacacgttagactttagatatcagtcacttagcagtcatttcataccagggaatcatttaatttgcctggtctttagagaataatagaataatacctctcttatacgactgytttcaattaatctcacacacacacacacacaatatgaaaatactttgaacactgcatgacacctgctaatgatttattacatgacaacagcacatttctgacctagcgaatacgaagatggcactattagcaaaccaaagtctctctttgcttaatataattttaacaaatatatttataggaaaaatttagctactgataaacgttcttaacaattcttctgacggtttgtggtaaagtaattatgaacttgattaaatcaaacttattcttcatttaatatgataatttttttcttaaaaaattattcaaacactctgtttggtatttgggatgttctgtttcttcatgttgccaaactagatagacaggaaaaaataggataaattaatcattactagaaataatttgaaagactgtttaactttatct

SEQ ID NO: 550744 - DNA, 592 bp, Homo sapiens
ccatgaagtcctgtgatttgctttaaagacagataccctgtgaaggctgacacgttagactttagatatcagtcacttagcagtcatttcataccagggaatcatttaatttgcctggtctttagagaataatagaataatacctctcttatacgactgctttcaattaatctcacacacacacacacacaatatgaaaatactttgaacactgcatgacacctgctaatgatttattacatgacaacagcacatttctgacctagcgaatacgaagatggcactattagcaaaccaaagtctctctttgcttaatataattttaayaaatatatttataggaaaaatttagctactgataaacgttcttaacaattcttctgacggtttgtggtaaagtaattatgaacttgattaaatcaaacttattcttcatttaatatgataatttttttcttaaaaaattattcaaacactctgtttggtatttgggatgttctgtttcttcatgttgccaaactagatagacaggaaaaaataggataaattaatcattactagaaataatttgaaagactgtttaactttatct

SEQ ID NO: 550745 - DNA, 592 bp, Homo sapiens
ccatgaagtcctgtgatttgctttaaagacagataccctgtgaaggctgacacgttagactttagatatcagtcacttagcagtcatttcataccagggaatcatttaatttgcctggtctttagagaataatagaataatacctctcttatacgactgctttcaattaatctcacacacacacacacacaatatgaaaatactttgaacactgcatgacacctgctaatgatttattacatgacaacagcacatttctgacctagcgaatacgaagatggcactattagcaaaccaaagtctctctttgcttaatataattttaacaaatatatttataggaaaaatttagctactgataaaygttcttaacaattcttctgacggtttgtggtaaagtaattatgaacttgattaaatcaaacttattcttcatttaatatgataatttttttcttaaaaaattattcaaacactctgtttggtatttgggatgttctgtttcttcatgttgccaaactagatagacaggaaaaaataggataaattaatcattactagaaataatttgaaagactgtttaactttatct

SEQ ID NO: 550746 - DNA, 618 bp, Homo sapiens
cacagtcttttgttattaagtttagcaaaaagttctgaaacacagttctagatttctctcattgaacaatagacttaattatcttaattttattyatccaaagtttgagagttaatttagaaacacgatgaattattaataagtttgtatcaaaaagcactcaaatacataaacttgagtttcttagtataatacttatcttttaatgtctatgcattaatatctattaatgcatgataataatataataacaaccacaagacaagacaaatttactgcctataaaaagttcattgcttaataaaatgtcattttgtattactcattcttatttaaatcttggtctagacaattaaatatcaaaccctacaaatttattgagaatactgactaattaacgaccaacacaaaaccttcagtataaatagtacttgtctttcatctcctcacctagatgattagttattgttaactggtgaaaaaatcaggagcacatacattagtatgcatggtgtcataagcgaatacaacatatacattctgtttcctctctttccactcctggtatttccttatatggactgcctcatatccaacctagaagacatgagacaaaaa

SEQ ID NO: 550747 - DNA, 618 bp, Homo sapiens
cacagtcttttgttattaagtttagcaaaaagttctgaaacacagttctagatttctctcattgaacaatagacttaattatcttaattttatttatccaaagtttgagagttaatttagaaacacgatgaattattaataagtttgtatcaaaaagcactcaaatacataaacttgagtttcttagtataatacttatcttktaatgtctatgcattaatatctattaatgcatgataataatataataacaaccacaagacaagacaaatttactgcctataaaaagttcattgcttaataaaatgtcattttgtattactcattcttatttaaatcttggtctagacaattaaatatcaaaccctacaaatttattgagaatactgactaattaacgaccaacacaaaaccttcagtataaatagtacttgtctttcatctcctcacctagatgattagttattgttaactggtgaaaaaatcaggagcacatacattagtatgcatggtgtcataagcgaatacaacatatacattctgtttcctctctttccactcctggtatttccttatatggactgcctcatatccaacctagaagacatgagacaaaaa

SEQ ID NO: 550748 - DNA, 1103 bp, Homo sapiens
tgtctggccatgccttcccagttcccaaatttctggtcccagaaagtacatacacaacacagaacagacaccattactgatcaagggtagaagcaaacacaatcaggttccaccaccaagtggccaagagaatttaatcaaactgtgtgggcatggtgtggctctgatgcagcttctctactgggactcctgaatggcttttgctagaaccttgcccagataagtcaattgggaaattccaatttttgttttaaacaagccagacacattcactctttcctagtcgcctttcacctaaaaggaggttcttctttagtacctttatcaatctgttctcacattgctataaaggaatacctgaaattgggtaatatataaagaaaaaaaggtttaactggctcatggttctgcctgtacaggaagcatgatgctggcatctgctcagcttctggggaggcctcaggaaacttacaatcatggcagaaggcaaagggggaacaagcgcttcacatggctggaacaggaggaaggtgggggaggtgccacacacttttaaacaaccagatctagtgataactcactcactcgctatcacgagaatagcaccaaggagatggtgctgagtcattcatgagaaactgcccccatgatccaaccacctcccaccaggccccacctccaacactggggattacaatttgacatgagatttgggtggggacacagatccaaaccatatcagtaccctattacataagcaaagggagatcaatccaagkttaaatgatggagaataaatgaacactttttcacattaaataatcaaaaatagctttttgctacacaaggatagaatctttactttgattcgttactgtagtagttttaaaatatgcccacaagttccttgctactcctgccttcaaaaggtggggcttaatttccctccccttgagcatggttgtccttcaacagaagtgagcatgtgagattcctgagaggtcataaaaggcattgtgacttccttctcactcactctcttgaatcactctctttcaggaaagctggctgccatgttgtgagacactacagcaatcccatgg

SEQ ID NO: 550749 - DNA, 570 bp, Homo sapiens
tcaaagacaaaatgtggccaaggttggcaataaatacatttttgccaataatctgatgggaaatgtatgttacttcttataaatcaaaataaattggatctgctggcaatctggttaacctgcaatttagattatgacaatggtgttcttattttatgcattttcacatgctccaaatctccttctgtatccctttctaaaattttgctgagagtccatcttttctgaccaaaggtgatttgattctccactaaagtagttattaaaaatatctccttgtagataaagaaaaagtggttcatgtataccactggaattctacacagccataaaaaagaacaaaattaggttatttgcagcaaaatggatgcatatggaggccattatcctaagcaagataacatggaaacagaaccaaatactgcatgttctcacttataagcaggagcaaactattgggtattcatggtmataatggtggaaaggatagtcactggggactactagaggatggaaagagggtgagaggcaagggccaaaaaactattttttgggtcttatgcccactac

SEQ ID NO: 550750 - DNA, 594 bp, Homo sapiens
cccactatttcataactatacacaagctgagaggcacattcttacccatatatctttgcacgccgtgtgattatttccttaggaaaactctaattgcctgtcaaatggcatgtgcatttgagaggtgtttttcatttaggtcgacggatggcatccagaatgcttattcccagtgacacctccaatgccattatcrctctcttattctttaccaagctgtgaggtggaaagatgacctctcccttttgctgaagtttgcatgactttacttatttctgaacatcttttcagaagtttatggccattggtagctctggcttttgtatttccagttcaggaattttgttcagttttctaaggcagctgtcatcttttcattcatgatttataaaagctatacacacacacacacacgggaaattttcttccattactttttctaattgttcattttttaaggattagattatgattaattttaatactttggtactcagctaattcattaaatgattatgtctattagtttttaaaatattcatttctaccttatatcaattattctttctaatagcttgggttgattttcttgca

SEQ ID NO: 550751 - DNA, 594 bp, Homo sapiens
cccactatttcataactatacacaagctgagaggcacattcttacccatatatctttgcacgccgtgtgattatttccttaggaaaactctaattgcctgtcaaatggcatgtgcatttgagaggtgtttttcatttaggtcgacggatggcatccagaatgcttattcccagtgacacctccaatgccattatcactctcttattctttaccaagctgtgaggtggaaagatgacctctcccttttgctgaagtttgcatgactttacttatttctgaacatcttttcagaagtttatggccattggtagctctggcttttgtatttccagttcaggaattttgttcagttttctaaggcagctgtcatcttttcattcatgatttataaaagctatacacacacacacacacgggaaattttcttccattactttttctaattgttcatyttttaaggattagattatgattaattttaatactttggtactcagctaattcattaaatgattatgtctattagtttttaaaatattcatttctaccttatatcaattattctttctaatagcttgggttgattttcttgca

SEQ ID NO: 550752 - DNA, 548 bp, Homo sapiens
tttcttgtatttaataatcacaacaatcaaaaagttcttatccatgtctattttctgtttaaaatgaagttcctttggtctttttctctggcatatgtgctctatgattctagtagtttctctaacatacgaggagtcactctttaggttattttcttttaaacagattcacaatctttacctttttatatacacacatatgcattacagaaatatttacttttctatagaaatgttgcagaaaatcaagaggcaaacattttgcctaccatttccagatagtttagttggttcctgacattacaatatatggtaagattgtattggaagaaaaaaatctacataatgttttacaataattttatgagaaattactaatgagagcagtgaggaaggaaaaatccaaaagtagttggaagaaaaaaatgtaaaaataatcacaagcatttatcagaaaaaagttcctatwcagtctggagagtgctgtatggaaaaataattaacattaacttactcttttcccattgcctataataggtcatcacaag

SEQ ID NO: 550753 - DNA, 525 bp, Homo sapiens
cagagcacccagaaaatttaggcaaagacttctccttccttcacttcttttgtccttcctccacttcttttggtaaacattttccttcacatattttccagtagagaacactattcttgttcatcccagaccaaagaaatagcttgaaaacttgatatrctgcttcctactgatacagacaggaaaacggtaaatactgggtagaagtgggccattccctggcaaaggccccacccttaagcctggactcctgtgaccccaaatgggaacaggcattcctgtttttgtacccaaaaagttaccggttggccccccatgactccgtatcctgtacccatatacccatataaactgcaaagcccagctccagaaggggataagaagatgaacagaaaagcagaagaatggcagaacaacacagcagaaagaagaagtgtctgaacaccaagaggagttcagctgtgggctgtcagagaggagattgtctgctggagggccaaactctaggggaagattatcttccca

SEQ ID NO: 550754 - DNA, 627 bp, Homo sapiens
gagagtacacttaaactgtgatctctcttacctctgtcttgtgaataactgtatataccacaatactagcaatattttgaatgattatcttttcagttgtattggtttgcatcttagtttcatcagtaagacaagtagatataaatgttactgattgctctgtacctattaacatwatttaaataaggaaaaatgagaccttttagtaacagtggtcaatgtcagtcatttatatcaatacagtaatctatgcgtatataagcataaccagcatcaagtgctatgagtatatatattgcaaattcccagcaatctttctgtagcatattcactgggtaaattatgtgcttaacttttaaattatttactgaaatcaagattctgttggaatgatgttacatattcactgattccaagtcaacaacttgttctggtctttctgaaatagctcctaggttgttagctggccagaaatccctggatttaagttttgcttttcccatctgtccttctaatcagtcagctttctctgccaatgaatgttttcctagttgatttcccttagttctgacattgtgttataagctgaggatttgacatggcaaaagattcctaaaatgaggttca

SEQ ID NO: 550755 - DNA, 627 bp, Homo sapiens
gagagtacacttaaactgtgatctctcttacctctgtcttgtgaataactgtatataccacaatactagcaatattttgaatgattatcttttcagttgtattggtttgcatcttagtttcatcagtaagacaagtagatataaatgttactgattgctctgtacctattaacataatttaaataaggaaaaatgagaccttttagtaacagtggtcaatgtcagtcatttatatcaatacagtaatctaygcgtatataagcataaccagcatcaagtgctatgagtatatatattgcaaattcccagcaatctttctgtagcatattcactgggtaaattatgtgcttaacttttaaattatttactgaaatcaagattctgttggaatgatgttacatattcactgattccaagtcaacaacttgttctggtctttctgaaatagctcctaggttgttagctggccagaaatccctggatttaagttttgcttttcccatctgtccttctaatcagtcagctttctctgccaatgaatgttttcctagttgatttcccttagttctgacattgtgttataagctgaggatttgacatggcaaaagattcctaaaatgaggttca

SEQ ID NO: 550756 - DNA, 627 bp, Homo sapiens
gagagtacacttaaactgtgatctctcttacctctgtcttgtgaataactgtatataccacaatactagcaatattttgaatgattatcttttcagttgtattggtttgcatcttagtttcatcagtaagacaagtagatataaatgttactgattgctctgtacctattaacataatttaaataaggaaaaatgagaccttttagtaacagtggtcaatgtcagtcatttatatcaatacagtaatctatgcgtatataagcataaccagcatcaagtgctatgagtatatatattgcaaattcccagcaatctttctgtagcatattcactgkgtaaattatgtgcttaacttttaaattatttactgaaatcaagattctgttggaatgatgttacatattcactgattccaagtcaacaacttgttctggtctttctgaaatagctcctaggttgttagctggccagaaatccctggatttaagttttgcttttcccatctgtccttctaatcagtcagctttctctgccaatgaatgttttcctagttgatttcccttagttctgacattgtgttataagctgaggatttgacatggcaaaagattcctaaaatgaggttca

SEQ ID NO: 550757 - DNA, 627 bp, Homo sapiens
ttccaaaaggcacataaaaaattatcatattaattacatgtaatgttgctttttaatgatttattctgctcaatgaaatgaatatcatcttcataataaagtgttgcctaacattctattttagggactacagaaatggggaacatagcttccttttaaaatagaaaaaaggccacattttagaaagtgcattactaggacattaattatagtctatgaaagtttgtaatgctaatttcataataaagtctttcttcactgacattgacattcacattaatgatcattcttttatttactatgatagcgtaagggcactgtagaatccagtttaagtcacatacacatgtgcaaacacacacacacacacatacacactcaagagcgttctcagcaggcattgattatacaaaaagacatatgctctcacatctttctgtgttcctgatcctggaaagattgatcaaagaagatcctcttctactttaaaagccaaggtcctttccagatttccttccgctttctttccagtagttgtcagggccttagaaattgtaactcctctaagcattaatgccccgcacagtagcacctctgtaagacrgcagatgctgctttgagagaagg

SEQ ID NO: 550758 - DNA, 785 bp, Homo sapiens
tgtaagacacaaggagtgccattgaaaaacatttattgctatattaaacagaacaggttttcactactagtagtctaatttttatagaaaagctacaaaatctactctgtgtgagacctggagatttaatcagcagccacaaaacagcactcagtctaacttttaagcacagaaataaacattacatatattcaagtagttcagagagcaatgtaagaatgtgatttatgtttaatcataaaaatccttaggcttagtttgaagaaacttaaagacatataagagagggttactttagtatactaaccctgcttgtcaatatcatgaactagcatttttgtggcagctttaatttttgagacttcttttattttaattagaatatagacatatgttgaaggtggaaaaagttaaattgagcatcaataataaacacaaataccagatgattcaactgttatgaaatgacactatttgtgaatgttcatcactgtgaaattttaaatagtctgaaatattagtttgagaataaaaggcatagattaatgcttttctttttctagtaaattttaagaactgttttaaaaaatgtacagaaaaaaatawgaagataaaacatggagttctcataacccccaaatccagattcctctattactaacatcttatactagtatgatgtgtttgttacaatgaataggccaatgctaataccaatcattaactaaaatctatagtttattcacattttcttagatttcacttaatgacctttatctgttcca

SEQ ID NO: 550759 - DNA, 577 bp, Homo sapiens
ctgcgacatctcctaccacatccggcactggattctcctctgtgcgttggtgttggtgtgtcagcttctttataaactgcaatcagttactcctgccaggtgagccttatgaagagacagcagcaatttgagcaaacgcttgtctaatttgttgatrtcatttagcaagatgaaatgactggaacaaggaatatgtttctgaatgtacatgctctgaatgaagatctctagatggttgggaataagttaccacacacctggaaaaaataatctgtgttttctttttgcctgtcatgaatgaatgaagaggctagaataagtctcccacatggtctccttcatcagatccaaatttgggtttttattctttgcagttattccaaactctgaatacaaatgtcttctgtaggtcaacaagtatgatatgaaccacaggtgttatgcttattggtgtacggtagtatgaaattaaaacagttctctttagaatgcagtatttaaaattgcgcagtctttaaattaaaagttcaaaaatccaagaagaaattgggaggagacacagaacagagggaggtta

SEQ ID NO: 550760 - DNA, 577 bp, Homo sapiens
ctgcgacatctcctaccacatccggcactggattctcctctgtgcgttggtgttggtgtgtcagcttctttataaactgcaatcagttactcctgccaggtgagccttatgaagagacagcagcaatttgagcaaacgcttgtctaatttgttgatatcatttagcaagatgaaatgactggaacaaggaatatgtttctgaatgtacatgctctgaatgaagatctctagatggttgggaataagttaccacacacctggaaaaaataatctgtgttttctttttgcctgtcatgaatgaatgaagaggctagaataagtctcccacatggtctccttcatcagatccaaatttgggtttttattctttgcagttattccaaactctgaatacaaatgtcttctgtaggtcaacaagtatgatatgaaccacaggtgttatgcttattggtgyacggtagtatgaaattaaaacagttctctttagaatgcagtatttaaaattgcgcagtctttaaattaaaagttcaaaaatccaagaagaaattgggaggagacacagaacagagggaggtta

SEQ ID NO: 550761 - DNA, 634 bp, Homo sapiens
ggaagcggctttaatagcattgcttgtggagttcgttttgaagtccttaacttccacgccaatctgatgtgagaaaaatagatgcttccctttggagtccttgttccaaccatggaaacctgggacacacacttaattctgctggtgacagaatgacaaatctgttattgtttaggataagtgaggcatggcaatactcttctgaatttyggtgaaaattagatgtgaaaatctgtaatggtactattcaagcttccccttaaacaagaaacattgagcaaataaaaatatggagtccctggacctattctagaagcctggtgccaaggaatagattttgcatggatcagcttaagctcacccaggaatggatttaactttctcctggaaaatttatttgaaagtccaaaaaaaagagtattcattatttatggatttagtaatgactagattttacaaatatttggatccacatgagccatggaattcagaataatattatttcctgccatattggtaactgatttttcaaagaagattttacttgatagttaatttaatccattttgcttgattattcaaatgttccaaaacacccagtggtggcctatttttttttgtctcttttcactat

SEQ ID NO: 550762 - DNA, 506 bp, Homo sapiens
gctgcatcatgccccgatgactaccccagagcaagattgggcaaatgattgcaaaaagcataattccaaattaaaattaaaaacaacaagcacataagaaagcattagctttactctgaagagtaatggatttcaggtctctagctacagatgatggatgtaagggaagggaaaatgtcatctggtactctaaggctatatgctgttaaaatgttaagcctttactgggccttaraaaatctctagtttggcctcttcaaatttatcaccaagaaactgagacacttttaggtgaaatgatattattaaagttccatagctaattagagaagatttgactggtacccaagccacctgatatcaagccaggcagttttcctgctgttctgtgctactctagtctgcttccagcatactgtcaatctactaatttcacaaagctggaaataactgtcctgagcagctaatatataaaataggaagacagtggggtgtgactagggtgg

SEQ ID NO: 550763 - DNA, 1088 bp, Homo sapiens
tgttctggatgcttcttaattgacatcacttgaggtcagtgcatttcaaactttaatgtacacatgagtcacctggggacctagttaaacttgattctgattcagtaagtctggggtggggcctgggactctacatttctaacaagctcccatgggtgctaactctgtctgctgctaggggactgtccttagagcagaggcccgggtgaccatcaacccaccttcagtgatactgatgcactcaggaaggaatgagttgcttttctctttcttgaagccctttgacactctgcacatgtatccattggagcactttgtgttgtaatgatttgtgcggggcccatcttctctatgaggctgaaggctcttatacacagtagctgcatcttatttatctccatttgctcttgacttccacctctcctcactttaacactgtggttggcacaaaaaaggcacttaatgtatgatgaggaacaggcccagacaggcctgatggtgatcgggtgagctcataaatgatgtgggctgttacgtggcatctctgttcctgcgtggccagatggcataaaccagtgatttccaaccctgactacagatcaggggaatttaaaaaaatactgatcccaggcccactccagtgttctgatttaattgaactgttttgaagcccaagtatgaatgactttaatagccctccaggctcttacagctcaaaaataaaaagacaacccaattaaaaataggcaaaatatttgaatggatattttcccaaggaagatttacaagtggcccataagtacagaaaaagatattaaatatcattaaggaaatgcaaatcaaagctgagagatacacttcacacctaataggacggtgtgggagaatttcaaactttccctctgaagatttgagtctaaggctgttgaagtgaattgacagtagatggattaacaggaaaaaaggcatacaaatttgcttgatgtgcctaagcatgggggaatcrcaggagaataattacccaaaaacccactgaggtccagatgctttcatactcttttacatagggtaaggggagacagggggcg

SEQ ID NO: 550764 - DNA, 1177 bp, Homo sapiens
tgagaatgaacagcagggacagtattggcctctaacacacactaagccttggacgccttgctggttctcaggacagctgatgtggatgctgcgcatggcrttattgggcccagacatcaggagcctgactgttactgtaatcctgggagccagtggagctctggcttctgcacagcatacttcacttttgagttttcccttttccactgagtccttcttagcaattttttgactgcagcaatcggttagaaattcgagggcctcctcttgcttcctctcccttagaaaaccccgagatggcagtgtgggcatgagctctggcaaacatggtgttaggcatgctgctttaggtcatgacaacaaatattccacctttcccagggcaacctttccatcaatccaaagatgtcttactattcagggaattaaagataccttctacttaataaaacgtatgctttctagtaatgtgctgtgcttgcctatgacacaccgctgacccctggaagaactcattcccacccttgagaagcaatcatcatctcaggaagaggtcccaaagtccactcgccacgcctcaggcactgaaggagtgcttgacctcaccaccatccgaccagcccatcagtgccaagaaccgaaccacacttatgggtcaaaaggaccggccaggaacccagcaccttcttcatgtcttgttagtgcctgggtctcactcagggatcagtggtgcctgcagtagtggggatggtgagcagctccctgaagatgcaggactatggtggtccaaccatctccctaagaagctctgttctgaaaatctgattaacaaatgtccaaatgcacttttaacattattatattataggaatgattccattctggagtacaatttcaccaccacgctatacctcaggtacacgatggggtaaaaaggatgctgttggcaggaacagaaaaccaaacacacatgttctcattcataaatgggagctgaacaatgagaacacatggacacagggagaggaacatcacatactagggcctgtcagggagtgggggactaggggagggatagcattaggacaaatgcctaatgtagatgatgggttgatgggtgagcaaaccagcatggcacgtgtatacctatgtaacaaacctgcacattctgcacatg

SEQ ID NO: 550765 - DNA, 1177 bp, Homo sapiens
tgagaatgaacagcagggacagtattggcctctaacacacactaagccttggacgccttgctggttctcaggacagctgatgtggatgctgcgcatggcattattgggcccagacatcaggagcctgactgttactgtaatcctgggagccrgtggagctctggcttctgcacagcatacttcacttttgagttttcccttttccactgagtccttcttagcaattttttgactgcagcaatcggttagaaattcgagggcctcctcttgcttcctctcccttagaaaaccccgagatggcagtgtgggcatgagctctggcaaacatggtgttaggcatgctgctttaggtcatgacaacaaatattccacctttcccagggcaacctttccatcaatccaaagatgtcttactattcagggaattaaagataccttctacttaataaaacgtatgctttctagtaatgtgctgtgcttgcctatgacacaccgctgacccctggaagaactcattcccacccttgagaagcaatcatcatctcaggaagaggtcccaaagtccactcgccacgcctcaggcactgaaggagtgcttgacctcaccaccatccgaccagcccatcagtgccaagaaccgaaccacacttatgggtcaaaaggaccggccaggaacccagcaccttcttcatgtcttgttagtgcctgggtctcactcagggatcagtggtgcctgcagtagtggggatggtgagcagctccctgaagatgcaggactatggtggtccaaccatctccctaagaagctctgttctgaaaatctgattaacaaatgtccaaatgcacttttaacattattatattataggaatgattccattctggagtacaatttcaccaccacgctatacctcaggtacacgatggggtaaaaaggatgctgttggcaggaacagaaaaccaaacacacatgttctcattcataaatgggagctgaacaatgagaacacatggacacagggagaggaacatcacatactagggcctgtcagggagtgggggactaggggagggatagcattaggacaaatgcctaatgtagatgatgggttgatgggtgagcaaaccagcatggcacgtgtatacctatgtaacaaacctgcacattctgcacatg

SEQ ID NO: 550766 - DNA, 1177 bp, Homo sapiens
tgagaatgaacagcagggacagtattggcctctaacacacactaagccttggacgccttgctggttctcaggacagctgatgtggatgctgcgcatggcattattgggcccagacatcaggagcctgactgttactgtaatcctgggagccagtggagctctggcttctgcacagcatacttcacttttgagttttcccttttccacygagtccttcttagcaattttttgactgcagcaatcggttagaaattcgagggcctcctcttgcttcctctcccttagaaaaccccgagatggcagtgtgggcatgagctctggcaaacatggtgttaggcatgctgctttaggtcatgacaacaaatattccacctttcccagggcaacctttccatcaatccaaagatgtcttactattcagggaattaaagataccttctacttaataaaacgtatgctttctagtaatgtgctgtgcttgcctatgacacaccgctgacccctggaagaactcattcccacccttgagaagcaatcatcatctcaggaagaggtcccaaagtccactcgccacgcctcaggcactgaaggagtgcttgacctcaccaccatccgaccagcccatcagtgccaagaaccgaaccacacttatgggtcaaaaggaccggccaggaacccagcaccttcttcatgtcttgttagtgcctgggtctcactcagggatcagtggtgcctgcagtagtggggatggtgagcagctccctgaagatgcaggactatggtggtccaaccatctccctaagaagctctgttctgaaaatctgattaacaaatgtccaaatgcacttttaacattattatattataggaatgattccattctggagtacaatttcaccaccacgctatacctcaggtacacgatggggtaaaaaggatgctgttggcaggaacagaaaaccaaacacacatgttctcattcataaatgggagctgaacaatgagaacacatggacacagggagaggaacatcacatactagggcctgtcagggagtgggggactaggggagggatagcattaggacaaatgcctaatgtagatgatgggttgatgggtgagcaaaccagcatggcacgtgtatacctatgtaacaaacctgcacattctgcacatg

SEQ ID NO: 550767 - DNA, 1177 bp, Homo sapiens
tgagaatgaacagcagggacagtattggcctctaacacacactaagccttggacgccttgctggttctcaggacagctgatgtggatgctgcgcatggcattattgggcccagacatcaggagcctgactgttactgtaatcctgggagccagtggagctctggcttctgcacagcatacttcacttttgagttttcccttttccactgagtccttcttagcaattttttgactgcagcaatcggttagaaattcgagggcctcctcttgcttcctctcccttagaaaacccygagatggcagtgtgggcatgagctctggcaaacatggtgttaggcatgctgctttaggtcatgacaacaaatattccacctttcccagggcaacctttccatcaatccaaagatgtcttactattcagggaattaaagataccttctacttaataaaacgtatgctttctagtaatgtgctgtgcttgcctatgacacaccgctgacccctggaagaactcattcccacccttgagaagcaatcatcatctcaggaagaggtcccaaagtccactcgccacgcctcaggcactgaaggagtgcttgacctcaccaccatccgaccagcccatcagtgccaagaaccgaaccacacttatgggtcaaaaggaccggccaggaacccagcaccttcttcatgtcttgttagtgcctgggtctcactcagggatcagtggtgcctgcagtagtggggatggtgagcagctccctgaagatgcaggactatggtggtccaaccatctccctaagaagctctgttctgaaaatctgattaacaaatgtccaaatgcacttttaacattattatattataggaatgattccattctggagtacaatttcaccaccacgctatacctcaggtacacgatggggtaaaaaggatgctgttggcaggaacagaaaaccaaacacacatgttctcattcataaatgggagctgaacaatgagaacacatggacacagggagaggaacatcacatactagggcctgtcagggagtgggggactaggggagggatagcattaggacaaatgcctaatgtagatgatgggttgatgggtgagcaaaccagcatggcacgtgtatacctatgtaacaaacctgcacattctgcacatg

SEQ ID NO: 550768 - DNA, 1177 bp, Homo sapiens
tgagaatgaacagcagggacagtattggcctctaacacacactaagccttggacgccttgctggttctcaggacagctgatgtggatgctgcgcatggcattattgggcccagacatcaggagcctgactgttactgtaatcctgggagccagtggagctctggcttctgcacagcatacttcacttttgagttttcccttttccactgagtccttcttagcaattttttgactgcagcaatcggttagaaattcgagggcctcctcttgcttcctctcccttagaaaaccccgagatggcagtgtgggcatgagctctggcaaacatggtgttaggcatgctgctttaggtcatgacaacaaatattccacctttcccagggcaacctttccatcaatccaaagatgtcttactattcagggaattaaagataccttctacttaataaaacgtatgctttctagtaatgtgctgtgcttgcctatgacacaccgctgacccctggaagaactcattcccacccttgagaagcaatcatcatctcaggaagaggtcccaaagtccactcgccacgcctcaggcactgaaggagtgcttgacctcaccaccatccgaccagcccatcagtgccaagaaccgaaccacacttatgggtcaaaaggaccggccaggaacccagcaccttcttcatgtcttgttagtgcctgggtctcactcagggatcagtggtgcctgcagtagtggggatggtgagcagctccctgaagatgcaggactatggtggtccaaccatctccctaagaagctctgttctgaaaatctgattaacaaatgtccaaatgcacttttaacattattatattataggaatgattccattctggagtacaatttcaccaccacgctatacctcaggtacacgatggggtaaaaaggatgytgttggcaggaacagaaaaccaaacacacatgttctcattcataaatgggagctgaacaatgagaacacatggacacagggagaggaacatcacatactagggcctgtcagggagtgggggactaggggagggatagcattaggacaaatgcctaatgtagatgatgggttgatgggtgagcaaaccagcatggcacgtgtatacctatgtaacaaacctgcacattctgcacatg

SEQ ID NO: 550769 - DNA, 1177 bp, Homo sapiens
tgagaatgaacagcagggacagtattggcctctaacacacactaagccttggacgccttgctggttctcaggacagctgatgtggatgctgcgcatggcattattgggcccagacatcaggagcctgactgttactgtaatcctgggagccagtggagctctggcttctgcacagcatacttcacttttgagttttcccttttccactgagtccttcttagcaattttttgactgcagcaatcggttagaaattcgagggcctcctcttgcttcctctcccttagaaaaccccgagatggcagtgtgggcatgagctctggcaaacatggtgttaggcatgctgctttaggtcatgacaacaaatattccacctttcccagggcaacctttccatcaatccaaagatgtcttactattcagggaattaaagataccttctacttaataaaacgtatgctttctagtaatgtgctgtgcttgcctatgacacaccgctgacccctggaagaactcattcccacccttgagaagcaatcatcatctcaggaagaggtcccaaagtccactcgccacgcctcaggcactgaaggagtgcttgacctcaccaccatccgaccagcccatcagtgccaagaaccgaaccacacttatgggtcaaaaggaccggccaggaacccagcaccttcttcatgtcttgttagtgcctgggtctcactcagggatcagtggtgcctgcagtagtggggatggtgagcagctccctgaagatgcaggactatggtggtccaaccatctccctaagaagctctgttctgaaaatctgattaacaaatgtccaaatgcacttttaacattattatattataggaatgattccattctggagtacaatttcaccaccacgctatacctcaggtacacgatggggtaaaaaggatgctgttggcaggaacagaaaaccaaacacacatgttctcattcataaatgggagctgaacaatgagaacacatggacacagggagaggaacatcacatactagggcctgtcagggagtgggggactaggggagggatagcattaggacaaatrcctaatgtagatgatgggttgatgggtgagcaaaccagcatggcacgtgtatacctatgtaacaaacctgcacattctgcacatg

SEQ ID NO: 550770 - DNA, 670 bp, Homo sapiens
tattctcttatagagaaacatgaactgagacactgggattcaagtgtttcttcatttgtacaatgggaataataatatcctttctgatagagttctgaggaacagtgaaaatgtacatgggaaaagagtaaaatataaagtactatataaattttaggcattattcttatttttgagagcaaacagagaggcattaaaatttactstcatattcaggtagaattataaaaattttccactcacaaaaattctttcaattctttgcctcactctgtctggtataaatatatttgtcccttaatatgagctttcttctataacttgaggtttgttttccctttagtggatgaaatgatgttataaatccatgagagactgtatcacagtgattacgagtttagttcaatttcaaatcaaatatttcaggggccggtgtggtggctcacgcctataatcctggcactttgggaggctgaggagggcggatcatgaggtcaggagattgagaccatcctggctaacacggtgaaaccctgtctctactaaaaatacaaaaattagctgggcgtggtggtgggcgcctatagtcccagctactcgggaggctgaggcaggagaatggtgtgaaaccgggccaagatcgcaccactgcactccagcctgggcgaca

SEQ ID NO: 550771 - DNA, 541 bp, Homo sapiens
ctctgtgagcttagcactgtaagagattaattttctctatctataaaatgaaactagttatatctactttacagaacttttgtagcttatagtatgtcaacttcttagcacaaagcttgtacctaatgaaaaaagaaaagaaaaaaaatagggtgtttacgataccatctttctggccagaggtactggagstctataatctgtagaagtatactatagcagtctgacatatctgagaaagcctcttttttcccttctttaaatatgtcctccataggaccatcttcccttcaataacttatatctgtgaatctcaagagatccaagggccttattttctccttacaacaggctcttgggttcctcaaggtaattagagaaaggaaagacactcaggcagacagttaaactgtgaataaaatttacgctgtgaataaaacaaaacatacacttcaaatcctgacaatcttagaaaaaaatcactgtaatagaagggatttcaaaagagaaaaagaacaacgtgttgtatattgttcctttt

SEQ ID NO: 550772 - DNA, 1638 bp, Homo sapiens
caaccaatcccttcaatctgcagatgagaaaaccaaagcctggagctacccagatggtcctgggtacccagggcaacccagatggtcctgcccttgcccagcccagctgcagtttagaatggaaactcctggggggcagggatcatggctttgtctagcctggccccaagccccaggcctaccacagggcctggcaaatctccctgaataaatgaggtgtctgccaagatgccctgtgcatgaaagcacctctttaaatggagggtgaggggctggttgtgcaagcaccgcaaggagttcagggagtcgagaggcagaaccaagcactgaacagctgctttgtgtctgcagagaggacagcagcagtccttataatgtctgggaggcatgagggtttgtggggagctgggggtgacaaaggcagtgacatgggctgagccgccatccgctcacctcccccctgggctctggaggcccagtgtccagctgccacacaggcaggcacaccaatagcttggccaaaatgaagacatccagacacaagcctgcaccctcagagacggaatcctggctcttgctcctttaattaagaaaaacaaaagatatgagcagggtgagtttgcctcaaacatgctggggaggtacaaaggataggttcttggcttcctctaggagggctgtctgggaggaacacacgtggtggcttggctgtgcggtcactgagactgaggtcatgggttcacaccctacaaggtgtgggggaaagaatccaaatctcctatcccagactgaccccaatcatagactcagagtgatcctagttttctccagtcacccgcctcatccatgctgtctcttataaggacactggcaagaccgtgcagctgcattcactcaaccagggcttactgagcacctactatgtaccaagcttagtgcagaggacacagctgtgagcaatggaaacaccttgctctcacagcrgctcacctcatcagcctttatccctgactcactcaccctggtcttttatttgtttctgtttgtctgtttttaatccttctgaaaacctattcccatctaccatcttgagacatgttttcaatagccaaaaatttacagatggaaaaagggcagcacagctaggacaagaatttggatctcccatcttgcagcaacacattgttcaagctctgtagcatgtgctgtgtggtcacaggctgcacaagagcactgaggccaggggccacagtggcgtgtggctgttggcaaggcaggcagaggtacttgcaacctcacatccactagcacatccaaatgcatctttgctgagtcctgagagaaatgtgagaagtcagagtcttcttgcagtcttgtacttatggacagagagaaagaacccacagactagacagaatccttaatctggtcggggaccatgggttggatttacctagacaggcaagaatggggagagtatcagaaggggggacctatgaagaccaaagatgccaaggaggagtgagtgagacaaaattgccagggtccatgaagggagccgagcaagaagagagcaggtgtggcttagagcacgggagttagatggatcagtctagctggatgggactgggagggcct

SEQ ID NO: 550773 - DNA, 985 bp, Homo sapiens
actcttgtactttccaagatgtgcctggagagatattttcctcttaagtttaagactatagttttctactgatttcctttgttttcctgtcccagggcagaatatttgttcctgtcgatggactgcagatggtgcccactccgcctcccctgccagtctgtcctggactctctatccgttttccttagtctcagttcctcctttaccctcctcccccctcggcttgactcttctccctgcttccctcccctgttgggattctggcctagtgggagatggtttcatctgagcatctgaaaatatggggcttcttggtctttatatgcacatctgagcatgctactgaaggcagaggaagggagatctcttagggagtcagcacatgcaaaatgctgtgccttcagactgcctctgctacctcttacaaggagcctcacaccgcaggctgccctttagctgttcccttggaatgcagccttgttaagtcactgccagcgtttcccctcttggcgtccctttctcttacctaagttgttaactccagacttcgctgctttcttaaaggctaaagtaatgggcagagtaaaaccctgaaatgtttagaagctatgcagtattatattrtaaacctgtaaaaattcttaacaaagttagtggcttggaaagattttcatgagaacttcagctaaaaggcagtaaagtaaatgccttaaaataactaaactttggcttataacaaggccattgtttggcagtgtccactttttaaagactttccagaacttggaggaggaaatgatcctgagacaaagtagtgatttaaaaaatgaagacagtaaattaacattgacattattcgccaacaattgatttcttgtcttccaactttttaccctgcattctgaataaattggaccatgtgaggaactagaagattaactttagggtttttgtttgattgaaattggttttgcagaagtggaaa

SEQ ID NO: 550774 - DNA, 1741 bp, Homo sapiens
ggcagacaaaaaggcaggttaatgtgaatagtgtatcactcatgaattttgcattcattttatgtattttatttaatatgcatattttatatttgttgtaagaggaaatatgttataaagacacggtttctgtttcacactataaaaaatgtttttgattttcatgaccacaaagttgataataatattatcaacagctggttttaagtaaccaacacataaaagtaataatatacataattatgttattcaaattatataatctctatttataattacactattatatttatatactattaacatatttatactgctttccatatagaaatatacactgaatattaattgtaattctagtggcatttagtgaagaaagagtgaaagaggaattggaatggttaccttggagatcctggagaaagtagaaaaaygatgacagcaaatatctgtatggtacgcacaagtaaagctcttaggactgtgccaggcacagagtgagggctacataagcatctgatattgctattgttatcattgttgtcaatcttaacaagaaccaggatgtatgactctactattaacataccaattttgcagattataaaaccagaggattaggttttactcaggatacatgccaggttgtatcagacacctccaataccatagcttcaataggatataatgttttttcctctatcctaaaatattcaagcaggtagtccactgttggtagggcaactcaccattatctgggacctgaacccttctatctttttactctttcattctcagtgaggcttccactttgcagttccagatgactgctctagctctcagcttcatgtcgacattccaaaggaatatgggcaatactttcttttcattgaaggaaaaagctcaggaattgcacacaatttctgttgatttcacattgaccacaatttaatcacatggctatactcatctgcaagggacactgaagtgtactatttagctgagagttcaaatacccagctaaaaagtatatattcacgtaagaaggagaaaaagttattaggtggcaaccagcagtctctgccacagagatgttaaggagattgctcaagaaagcatgaatattaagtaataatgctaggatttgaatgtaggcagtgtcatttcagacaaactcccttgctctgaaacttcctctccagcctatgagttaagtcaaataggcatgatgatacaggcttgcacgcatctcaggcaagtacctaacaagcatttacagcagtttctcaatctttcttaacccactctcttctaataaatattacattgttactcccgtctcctcccttccctcattagtttcacaaacactagattctgatatgtcattccacagagtgccctttccatttcctcctatatataatcccatctgccatgcccttccctttgtaaatgcgtgctgtaatttaaccttgagattttgacatatatcctatttcttttttcacccttgataattactgatttaggaaatttaatatttactgaatgtctaagtatgtagtggctctgttgtttaattctttacataatattgctctaaataccatagtgttattttgaagtagacatcttattttttatattatagatgaattaagactctgagacatatgataacttaaacttattgacaagcatttgaaatctagtgtgtcagagataaggctacatgttt

SEQ ID NO: 550775 - DNA, 562 bp, Homo sapiens
gctcaataaatgtttgttgaatgactgaatatatctaacagagagggaaaggttgacatagctgaaagagcagattattccaggtgagaacgagtgaaggaatacagggataagagagaattggcttcggatgagaggaagaacacctccttcattgtaactggaaggaagaaggagaaaatggatgcagatacagggaggcacatagatttgagggtaggaagatgtagttcttctgccaagatttctrttttctcattgaaagtaagctcattggccgggtgcagtggctcacatctgtaatcccagcactttgggaggccgaggtgggtggatcacctgaggtcaggagttcgagatcagcctggccaacatggtgaaaccctgtctctactaaaaataaaaaattagcctggtgtggtggcctgtgtctgtagttctagctactcgggaggctgaggcaggagaatcacttgaacccccgaggtggaggttgcagtgagccgagattgcgccactgcactccagcctgggcgacagggtgagattccatctcagaaaa

SEQ ID NO: 550776 - DNA, 755 bp, Homo sapiens
ccttggcaaggtggacagaatatggccttcaaagtcagagggaccttcatacctgccttggctttaacgcttactagctggccaagttccctaacatccctgaaccttgatttcctcatctataaattgggataagaattcgtgcctctcaaagaggttgggaggaagtaaatgtgatatataagaagcacacagcacagtgcctagcatttagaaaacacactctaaaagctatttcccatttttttcatatacatcttctctccatatccaccctgtggataaaaatgtcattcaaaaagagtttcttgagctcctactcgccccaaaggagttgaggggaaatagtaggttctacctcttctctacttcagagaagtaagtttggccttatgttctgagggtacaagtgatggcccattcaccatagtgagtttgaagcaccggttttaggatcagacataccctatcctcagaaaccccaccctagtgctcactagctatggaccaagaccttcaatttcatctctaaaatggagaaaataaaagtcactttctgctgtgattatctattgctgcacaacaaacaaatgactccaaaatttagtggctttggaaacatccakttgattacacttcacagtgtgagtcaagagtttaggaagagctcagctaggctattcatccactccacatcgcgttgacaggggtccactggtagtattcagctggcaactggactcatttgaaggatc

SEQ ID NO: 550777 - DNA, 591 bp, Homo sapiens
tagaatacgagatctcaaagcgtccttagagagcatttagttccaaactgctcaaatgacagagtgtctagaggtgaagagagggcaactaatttgttcaagatcatgcagctgactggccaggctagaattaaaatcgaagtttcctgacttttgtgttttaaatgatgttgatggttatggtggtgatcatataaaaatcactttatgatttatagagtgcttttatatatatatatatgtggtatagaaggcccgtttattacatagggtcttagaatcrcatgaatatgaacccacaacattaatgactttagtctaaacgtggtcttggataagtaaatttaattttttgagcttcaacttctgcatcagtaaaatagaaataagacattcttcacaagattattatgaagattaagaatccacttaaagcatatagcatagtgtttggtacacaataagtacatattaaatgtctgttgaatctgtgactaataacttgttgctgccttctctgtgatcttcacaacagccctttggagacgtctaccatgctacttttatctcccgaaaactaaaatatcctaa

SEQ ID NO: 550778 - DNA, 555 bp, Homo sapiens
atgcgaagatgtgaccagatagagtctaaatgtattttgcagggagtcaacaggatttactaatgaattgaaattgcaatggaagaaacagaaattaagaatgactccagaggtttcagcctaagcaactggaataattgcctttaattgatgggaaagactaaagaagatgcaggtttggggagggcaagttgttggggaataactggagctcattttgggacatgttaaattttgcattcattttcaacgtcaagtggagatataaagcaatcagtaaaatatcagtctaggctgaaatcagatgtaaacatgggcatcacttctacatagatgctatctaaaaccacagaacaagatcagatcacgaagsgagtgagtataaacagaaagaaaagtccatgaagagagtcctgggacattttaatgtttagaactcaggcaagtgaggagaaaccagcaaagagagaattagaggaaatccaggatatatacataatgtaaacttcctatacattaaatttgttcacctaattatgcaggtagccatgcatc

SEQ ID NO: 550779 - DNA, 1251 bp, Homo sapiens
tagccactcaggaggccaaggcagaaaccaggtgtttaagcccagcctaggcaacaaagtgagaccccatctctacaaaattcttttaaaaattagccaggcatgctggcacacacccgtagtcccagctacttgaagttttcttacccctctctagaacctcaggatcagagttttagatctaggattctgagctctagaatctgaggacctgggggtgccagagcaggtaattttgagttcatgggaaggggcctttgaggctggctggccctgcttcacacccaatgcctactgcctgcagaggcatttctggccagtgggcatccaacagccccctgcaggcattacagagttctctccagctcattttcccactctctgggaggctctgggcccatgcctagtgttctggtatttgaggaagtatttccaagggtctccttcttcagttattccttcactttttacatcttcctctattctggcactttctatatctatcaacagcagtcctgcccctgagcctgtgaggctaccagggaatccccctgaagtaacccccgtgaagagtccagggaaatctgggttggagatagggatagggggccaagggatcttcttttgtgtggtaaatgcagcttcttccatgcctatccagtttctctctgcatatcgtcagtatcatggtgtcccccccaaccttgtccccactgagcatataacacacccatggggactgaccatccaacagacagtgagtgcccagggagcagcttgtcccctccctctcctccttacccctacccaggtgaccaattaagagctctctcgcagctgggaggtagaggacagacatcccggcctggaagacaaagacgtgcctaacgtcccaggaggcaggttggaaatcatagcagaagtcctgggtgggcaagtttgagaaaaacacaaaaaagcactttctagcagtgtgaaggggcaggaggagctaacatttttcaaaccctactactaagcatgctttctaaaagttattcacttaggccgggcgcggtggctcacacctgtaatcccaccactttgggaggctgaggcgggtggatcacttgaggccaggagttcaagaccaacctggccaacatggagaaaccctgtctctactaaaaatacacacacacmaaattagcctggtgtggtggtagtcccagctactcggaagtctgaggtgggaggatcacctgggcccag

SEQ ID NO: 550780 - DNA, 675 bp, Homo sapiens
gctgggactacaggcatgtgccaccatgcgtggccaatttttgtatttttttagtagagacgaggtttcaccatgttggccaggatggtctcgatctcttgacctcgtgatccacccgcctcggcctcccaaagtgctgggattacaggcgtgagccaccacgcccggccccttatgctctttttgtatttcaagggaatgctatcggttaactaagggacaaaactttaccacagagaggcaagctcgcttttcccaagccacacagcacagaggactaagaaggagattttcaaagctctgactgtgcagtcaggtctcattgggcagcattcacagaggaagagaagcagccagatgggacaggtactgtagagacaggcagggtgggcaagaatgttgctctggagtcagaagcagctgagttacaaacctggggaccttcacatagtgcactcctcaagagcaaggccaatgtcttaatgatgtctctgygtttatttggaccttaaacatggacctcaggtgctgaataaatgactcttgacttgtagcggttgacttgcatgactgtcgtgtggcctgaaacctcagtttcctcatctgtaataggataaaaatgactgctagcctgggagcccctcctgagtagtttgctatctgggacgattttca

SEQ ID NO: 550781 - DNA, 541 bp, Homo sapiens
atttcttttctttataaattgcccagttttaagtattctgttacaagcaatagaaaatagactaggacacacatagaccttgctttacggagtttataaccaatttgtagagaaagacaattattcattaaaaaaaataacatacaccagatggtaggtgaaaagacacacgtgagcagcacaaagtgctactgaagttgtgaaacaggtatcattagtctcctagttaccaagacwctaaattgtggagttatcttcacacctcaaacctaattcactcccacacaggttccttcaaaatgcctcttgcagcctcctctttctccgttccatgcctaatagcatcaccttactttaagtctttatcagtttatatttaaattgttaaaactttttacttgtctccttgccactggccacttcccactggaactcatgtggagcaaaaattaaacttccaaaagcaccactttgatccttttccttccctattcaaacacttccctggatgccaatttccaactgaaataaagtcaaaact

SEQ ID NO: 550782 - DNA, 651 bp, Homo sapiens
agaatgaagccaaggagcaacaaaacctagtgcatcaaagtggcttatgtgattgaaaaagagcttggtgggcccaggtggtctacaagtggaaccacccagccatcggaagccataaccaaaagtgcccttagagatcataaagctaggaatcttcatagaattttaaccccaaacctttcttcaaacacaggcttacttgccttgcctttattacagatatgaaaagacagagcagctatgctgaagtgggagtggaggacctagaataggtaatctgtcctagtatctcaccctaagtgaatagtaaggggacttctctgagaagcagaawttaaaaacactgagagtctgatctccttgggaccactgaggaaagcccccagggctgatattcaggagacctaggtacagatcctagcagtaatgctgagcttcagataaccagcttcaatttgttgtacaagtaaaacaaattttaatcccagttctggaccatattagttacatgttgagtgcctaaaatttctaattttcatgattattatttctatgttacatgggattattatgatgattcagtagcaaaaagtatcattttacagtgcctagcatcacagtaagccctttggaaaggggaagttataattc

SEQ ID NO: 550783 - DNA, 651 bp, Homo sapiens
agaatgaagccaaggagcaacaaaacctagtgcatcaaagtggcttatgtgattgaaaaagagcttggtgggcccaggtggtctacaagtggaaccacccagccatcggaagccataaccaaaagtgcccttagagatcataaagctaggaatcttcatagaattttaaccccaaacctttcttcaaacacaggcttacttgccttgcctttattacagatatgaaaagacagagcagctatgctgaagtgggagtggaggacctagaataggtaatctgtcctagtatctcaccctaagtgaatagtaaggggacttctctgagaagcagaaattaaaaacactgagagtctgatcyccttgggaccactgaggaaagcccccagggctgatattcaggagacctaggtacagatcctagcagtaatgctgagcttcagataaccagcttcaatttgttgtacaagtaaaacaaattttaatcccagttctggaccatattagttacatgttgagtgcctaaaatttctaattttcatgattattatttctatgttacatgggattattatgatgattcagtagcaaaaagtatcattttacagtgcctagcatcacagtaagccctttggaaaggggaagttataattc

SEQ ID NO: 550784 - DNA, 587 bp, Homo sapiens
tggagcctctgaaagaaatattagctgtctcactattgtcatgtattctaaataagttaaatagtaagcttcattccctctttaaatttaatttattatagaattttattatgtcaaagacttcattgtagaaattactttaaaataggtatttcaaactgaaartttgttatttctgaatttttgtttatgcttctgtaaaatgaatttgaaccagatcgcctttggagtctctcctagtttcaaaattctgtgttctacaaatcctctcatttttaccaatctgttataaagcaactatgttgtaaataataatattattaacatggtacttttgcttgccaaaatgtatactataatatttttgttttttctaacagtgttaaattaatcttcttaatctccttttaagtcaataaaagtcagatggaatttcttccattttagagattaggaaatgagaaacagtggttcatgacaaggagaggatacatttcattttgtctagtgaccctgaagtgtattattcttgtcccttttgtaatcattatacatctactattagataatcatgtatccaaaagtta

SEQ ID NO: 550785 - DNA, 1308 bp, Homo sapiens
atttgttaaattctcaaacattttattcattgtcttgtagattggtaggaaggtctgagcctctgagacctaatttgttttcttttctttttcaaagtagctaagattattagcagcttctaaactaagcatgcagtttggaagggagatgagcaaatgcaccttgacagaggtgccagctaatttagtttgaaagaaatgaaaaggattgagattttcatgtgaatttgaagcatgtggggccacgaggcatgagaatcaagtcagtctctctccctcagagccctggcagagagcttcagtggacatggttgctcaacctgtttcctaaagagcagttgtattttggaagactttaccaccgctccctgcagtaagcatgaagctgttgctggcctggagcctgaggggcttgtgaatcgggccctgtgtgttttgcaccatctcacagatgtgcctttgtgaagggtgggcagctccactctggctatgaagggcccccctccaaaccatttgctttggatctgaaaccccatttagatggttcttggagttggggtgaggaagcaggaagctgaaagagaataaacccagcaaaagctcagaacaaactgcaggttttggacaacaacctagagtatactcatggggttggggttcagcctccctcccgcaccccaacctcaatcagagtccaggccgtcatgaaatgcaggccccagaactcatcacgtgcccagccagaccacaagcacttcattgggcgaaggggactcatccttactttgttttcacacataactggtttttaattacatttgmcttttcctgatgtctgttcagaatgccggtcccctttggaaggggcaagcacaaaggcagggacaggttggcaagaaggagaagcaaattgagcagagccctacaatccttcctcttttggtggggaaacaggcacagggcaggcttctgcccagagaattgttctcatctgagggtcattgtccacggagattagtctcgcgagcctctggaatcctgatctgtcacagaagcccaggtatgtagccaagtgtgactttggtttccaacaataacttgctcaatacttgttgtttttctctctcctctctcccctgcccctctggccactgcctcccatcctggccctggtgtcctcccttcttctgctcctccccacagagatctgtgctgccgactgtggtggccatggcgtgtgcgtagggggcacctgccgctgcgaggatggctggatgggggcagcctgcgaccagcgggcctgccacc

SEQ ID NO: 550786 - DNA, 531 bp, Homo sapiens
tgcctggtctcccccagactctactctcatgcaccttttccctctgctgattttgrcttttatcctttccctggaagctgcagtttcctgagccttcttagtgaatcatcagacctgagggtggtcttgaccgtccccacaatagttatgcagaaaatcctaagaagtctacaaaaaaagctactagaactaataagtgaatttagtgaggttgcaggatacacggtcaatatcaaaaatctattttatttctattcttgcaaaaaagtaaacatatcaatttttcaataacatttactgtgttgaaaacacagcagacttagaatgaaattttaattaaaaatatggaagacttgctgtattttggaaaccacaattatttctgagagaaattaaagaagagctaaataaataaatgggtgtgccacgtttacatattggtgatgtgtttacatactggttacatatcggactggtgatacagcaccatttcaaccaagtgagaaatgaagaatcttttcaatgaaaaaa

SEQ ID NO: 550787 - DNA, 527 bp, Homo sapiens
ggataattttttgtatttttagtagataccgggttgcaccatgttagccaggctggtctcgaactcctgacctaaggtaatgtgaccacctcggcctcccaaagtgctgggatgacaggtgtgagtcactgcacctggtctggtcaacatttttagaacccaggaaagaaacacaccagcaagctcagcatgctttgccacctcgaatgttcctgcagctcagagtytctccctaaagcaagtagagggcagttccttgttcaccaattgattgacataattcattttctgataggaaaccccaagacggccggggacgtcaggaacaggtgtgcccccacaccacacgccctcctgccggctctggccctgctgcaggcctctcacctccaccccacagaagttgcctgggcctcagcagctggttgctctcctgggagccctggccatcgtggtgcaaggagccaggcactacagccaggagggctcacccttgcccaggaagaaaggctgagctctgaagcatc

SEQ ID NO: 550788 - DNA, 527 bp, Homo sapiens
ggataattttttgtatttttagtagataccgggttgcaccatgttagccaggctggtctcgaactcctgacctaaggtaatgtgaccacctcggcctcccaaagtgctgggatgacaggtgtgagtcactgcacctggtctggtcaacatttttagaacccaggaaagaaacacaccagcaagctcagcatgctttgccacctcgaatgttcctgcagctcagagtctctccctaaagcaagtagagggcagttccttgttcaccaattgattgacataattcattttctgataggaaaccccaagacggccggggacgtcaggaacaggtgtgcccccacaccacacgccctcctgycggctctggccctgctgcaggcctctcacctccaccccacagaagttgcctgggcctcagcagctggttgctctcctgggagccctggccatcgtggtgcaaggagccaggcactacagccaggagggctcacccttgcccaggaagaaaggctgagctctgaagcatc

SEQ ID NO: 550789 - DNA, 861 bp, Homo sapiens
  misc_feature 622, 623, 624, 625, 626, 627, 628, 629, 630, 631, 632, 633,634, 635, 636, 637, 638, 639, 640, 641, 642, 643, 644, 645,646, 647, 648, 649, 650, 651, 652, 653, 654, 655, 656, 657,658, 659, 660, 661, 662, 663, 664, 665, 666, 667, 668: n = A,T,C or G
  misc_feature 669, 670, 671, 672, 673, 674, 675, 676, 677, 678, 679, 680,681, 682, 683, 684, 685, 686, 687, 688, 689, 690, 691, 692,693, 694, 695, 696, 697, 698, 699, 700, 701, 702, 703, 704,705, 706, 707, 708, 709, 710, 711, 712, 713, 714, 715: n = A,T,C or G
  misc_feature 716, 717, 718, 719, 720, 721: n = A,T,C or G
caaagtcaaagcttatcatacattaggtaataactaacattcattgatggcctattttgtgccaggcactgttctaagaacttgacatgtagtgactcttgtagtctatgtcgatattattttttaacatctaacttattttaatatatttatacccattttaaagatgaaaaagttgaggagcagagatattaagaaacttgcccaagatcacacagtggcagagcctaggctcccaaccatgacattaaaacaagctgctcagaagctagagacttctctttttaaaatcttattatctctgttctcttttgattttaaacaaattactatggggtcttgcaataaaacttactaggggaacttatataaaaatcataacttctggctgatacttctgaaagcactattttttytttgttcttaaccttcttaaattttctctttaaagacctggattgatctcctcttaccctggagtttgcaatgcatggagcagaccccaggctcttacctcaagagaacctccaaacctcaagatcaggaaacaccttaagatcaggaagcacccactctcccatagcccacccagggcctgagcgctctcaatgcatatccaaannnnnnnnnnnnnnnnnnnnnnnnnnnnnnnnnnnnnnnnnnnnnnnnnnnnnnnnnnnnnnnnnnnnnnnnnnnnnnnnnnnnnnnnnnnnnnnnnnnnagcctgccatcatggtgaacaccgtctctactaaaaatacaaaaatcagccgggcgtggtggcctcgaagatagggtgtggttgttgaaaggtcaccatctaattttcgttcatatggacgcaccgtggaggatgaaaag

SEQ ID NO: 550790 - DNA, 612 bp, Homo sapiens
gagtwttttttttttttttttttttttttttttttttttttttttgagacagagtcctgctctgttgccagcctggagtgcagtggtgccagctcagctcactgcaacttctgccccccaggtccaggtgattcccctgcctcagtctcccgagtagctgggactacaggcgcctgccaccaggcccggctaattttttgtattttagtagagacaggatttcgccatcttggccaggatagtctcgaactcctaacctcgagatcagcccacctccacctcccaaagtgctgggattacaggcgtgagccaccgcgcctggccgagtgtcttctttaagaccacctgctgctcaggggtcaaagtttaggagttaaggtgcatgtcttcagaaagggatgctgtcagggagccctgacaccaactatctccttggcttcactctgtggacaggggtgtgtttgactcatcataatggacttggtggcacagagcactacctaattaaaggctttactaaaccctactttttccttctagataattctaccagtccaccttattctcattccaaataagcacatgggtcctccactgtggcatcaatttacc

SEQ ID NO: 550791 - DNA, 612 bp, Homo sapiens
gagtttyttttttttttttttttttttttttttttttttttttttgagacagagtcctgctctgttgccagcctggagtgcagtggtgccagctcagctcactgcaacttctgccccccaggtccaggtgattcccctgcctcagtctcccgagtagctgggactacaggcgcctgccaccaggcccggctaattttttgtattttagtagagacaggatttcgccatcttggccaggatagtctcgaactcctaacctcgagatcagcccacctccacctcccaaagtgctgggattacaggcgtgagccaccgcgcctggccgagtgtcttctttaagaccacctgctgctcaggggtcaaagtttaggagttaaggtgcatgtcttcagaaagggatgctgtcagggagccctgacaccaactatctccttggcttcactctgtggacaggggtgtgtttgactcatcataatggacttggtggcacagagcactacctaattaaaggctttactaaaccctactttttccttctagataattctaccagtccaccttattctcattccaaataagcacatgggtcctccactgtggcatcaatttacc

SEQ ID NO: 550792 - DNA, 612 bp, Homo sapiens
gagtttttttttyttttttttttttttttttttttttttttttttgagacagagtcctgctctgttgccagcctggagtgcagtggtgccagctcagctcactgcaacttctgccccccaggtccaggtgattcccctgcctcagtctcccgagtagctgggactacaggcgcctgccaccaggcccggctaattttttgtattttagtagagacaggatttcgccatcttggccaggatagtctcgaactcctaacctcgagatcagcccacctccacctcccaaagtgctgggattacaggcgtgagccaccgcgcctggccgagtgtcttctttaagaccacctgctgctcaggggtcaaagtttaggagttaaggtgcatgtcttcagaaagggatgctgtcagggagccctgacaccaactatctccttggcttcactctgtggacaggggtgtgtttgactcatcataatggacttggtggcacagagcactacctaattaaaggctttactaaaccctactttttccttctagataattctaccagtccaccttattctcattccaaataagcacatgggtcctccactgtggcatcaatttacc

SEQ ID NO: 550793 - DNA, 612 bp, Homo sapiens
gagttttttttttttytttttttttttttttttttttttttttttgagacagagtcctgctctgttgccagcctggagtgcagtggtgccagctcagctcactgcaacttctgccccccaggtccaggtgattcccctgcctcagtctcccgagtagctgggactacaggcgcctgccaccaggcccggctaattttttgtattttagtagagacaggatttcgccatcttggccaggatagtctcgaactcctaacctcgagatcagcccacctccacctcccaaagtgctgggattacaggcgtgagccaccgcgcctggccgagtgtcttctttaagaccacctgctgctcaggggtcaaagtttaggagttaaggtgcatgtcttcagaaagggatgctgtcagggagccctgacaccaactatctccttggcttcactctgtggacaggggtgtgtttgactcatcataatggacttggtggcacagagcactacctaattaaaggctttactaaaccctactttttccttctagataattctaccagtccaccttattctcattccaaataagcacatgggtcctccactgtggcatcaatttacc

SEQ ID NO: 550794 - DNA, 612 bp, Homo sapiens
gagtttttttttttttttyttttttttttttttttttttttttttgagacagagtcctgctctgttgccagcctggagtgcagtggtgccagctcagctcactgcaacttctgccccccaggtccaggtgattcccctgcctcagtctcccgagtagctgggactacaggcgcctgccaccaggcccggctaattttttgtattttagtagagacaggatttcgccatcttggccaggatagtctcgaactcctaacctcgagatcagcccacctccacctcccaaagtgctgggattacaggcgtgagccaccgcgcctggccgagtgtcttctttaagaccacctgctgctcaggggtcaaagtttaggagttaaggtgcatgtcttcagaaagggatgctgtcagggagccctgacaccaactatctccttggcttcactctgtggacaggggtgtgtttgactcatcataatggacttggtggcacagagcactacctaattaaaggctttactaaaccctactttttccttctagataattctaccagtccaccttattctcattccaaataagcacatgggtcctccactgtggcatcaatttacc

SEQ ID NO: 550795 - DNA, 612 bp, Homo sapiens
gagttttttttttttttttttytttttttttttttttttttttttgagacagagtcctgctctgttgccagcctggagtgcagtggtgccagctcagctcactgcaacttctgccccccaggtccaggtgattcccctgcctcagtctcccgagtagctgggactacaggcgcctgccaccaggcccggctaattttttgtattttagtagagacaggatttcgccatcttggccaggatagtctcgaactcctaacctcgagatcagcccacctccacctcccaaagtgctgggattacaggcgtgagccaccgcgcctggccgagtgtcttctttaagaccacctgctgctcaggggtcaaagtttaggagttaaggtgcatgtcttcagaaagggatgctgtcagggagccctgacaccaactatctccttggcttcactctgtggacaggggtgtgtttgactcatcataatggacttggtggcacagagcactacctaattaaaggctttactaaaccctactttttccttctagataattctaccagtccaccttattctcattccaaataagcacatgggtcctccactgtggcatcaatttacc

SEQ ID NO: 550796 - DNA, 664 bp, Homo sapiens
aaaagagatactttattaagtacataagccttacagatgctaaatgaatgggttattattaggagtcttttttgatgtttttacctcttaagatgctctactccctcttgtctcatttcctaaagcagctacataagtagctggcaaaggattgggctctgctcttcttcagaatccaaaatatcttaatatcttagctgtattgatgagccatcaaacaaacacatatcttatgcttttgtttccctccaaggagatgaatgagcaactkcaacatatgagggcacttagggtgtggcaggtagttttaaaaagataaaagaacttctaacaagctgggtaaattatgtaattgttcagcacttgaattctgctgtcaggctgtataggcaagtggaatgatgataaaaagttatgttataggtacgtagttgcatgcaagtaggtaattattatctactggctaaaagactgaaattcagtggcaaatacaagtcaggtaatttgaagtcatttgctctaataaataaaatattaggtggctaaaaaggctgggtattgtttcccttggaaaacctgcaagagaagaaacactttaccataaaatgtacatgcagaataccctattcctctgcagagttaagaaatggagggaatgtctgga

SEQ ID NO: 550797 - DNA, 1450 bp, Homo sapiens
gtacctgtcttgttgaaggggctatattaatcccagggataaaaattagaccattttaaaaatggataggctgcatatccttctgacagtcacttatgaagattttttttcttaaaacttttgatgagagctgggctacaatttgagattctattttctgggaagatcagagtgscagataatcagtgttactaatctaagggcagaattgtatatgcattctctgcagtacccccagtttctaataataacatacatctgactttgactttttttttctttaaaaaaaaaaacaactcttggctgggcatgatggctcatgcctgtaatcccagcactttgggaggccaaggcaagtggaccaccacctggggtaagagttcgagaccagcctgaccaacatggcgaaaccccatctttactaaaaatacaaaattagttgggcatggtcacgcatgcctataatcccagctactcgggaggctgaggcaggagaatcgcttgaacccgggaggcagaggttgcggtgagccgagatcatgccgttgcactccagcctgggcaacaagagtgaaacttggtctcaaaaaacaaaaagacaaacaaaaaaacctcttgatggtttttcccttgtttactatttgatttatgtatattccttaagctctaaatactttttgccccaacttgccttggcattgactcttagtagtaatgctgagttcccttagttcccttttacttttaccctcaaagctcactcagatgtccccctccatgaaacttttaccctttacttctaagctccctgtttgttctgaaagcactgtgcttacatctgagttcatatagcccctaaatatgattcattagtatatttgttcatttccctccttgaagttgtgagcctctcacaaaacattgtttgtaggtggtggtgattgttaacctctttatcctcaaagcctagtctaatgcctgtcatgtagtagcagatgctcagtgaatgtttactgaatgagtggggcctgtaggaagtggggttctgcagggagcagttcctcaccaggaaaatggccctgtaaactctgtcctcaggaatgcccatgtgcttcccctgtggtttggaatgaactctgcgcaactctgtaagttcagttattcagtaatagactaaaatgtctgatgtgtgtcccatgcttagcagccgaatagagtgatgactaggaccaggctcttgtcccagatcagggcaggcaaaatacaaacaaaccacatcctgaggccttctcatatatggctgcattgtataccaatggtctcagaggcaaatgtgtgttttcttggatctgtgtgaggcttttgagccttggcaaaatctggcagaagcattagagtaaaccagtgatggcagtatatagaatgaggggagagagagaacaaggcaaat

SEQ ID NO: 550798 - DNA, 665 bp, Homo sapiens
ttagacaaactgtagctcagataatattgtttggcttaggtttagtgcggtttttttggtggtatgsagagggttgggattgtggagagagaagctgattgacaggagacttgagttctagttctgcctctacgacccattagtgccatcacctcaggcatggttgagtgaccattatgagttttaattatgtacagagtgagggaggattgggctacaaggttaagaggagcactcatcccataagctgtgtatcacagctcacttaactgaggccagacaaccttattgaacacagctgtgtgtccaggaataaacagaagaggcttcagtgtaactgccagatattttccccataacttaagacagcagattagaaacagtagttaataggaaatgcccaacacctgggagtccaaatgaagaggtcctttcacttatctgtgaaggaacttttggcctatactgtctttattgatggcctggataagtgaactattattgtattcaatctggttcacatatagtcttcagtaaccatttctcaccgctaatgaaaagctatctgtaagatgctgatgaaacagctttgtagtgacttgtttctcaacctctgaggcattgacctgaaagtaatcatagatgctcttctaccagtgaccccg

SEQ ID NO: 550799 - DNA, 546 bp, Homo sapiens
aggggtgtctcagcagctcagactctagggaagtaatccagttccattactagagttgtttggcctgtagggtgaggtgtctcagctcagtcattgctctgtttccctgcaatgcagagtgctataccagctcagttttggactacacagctgctcagcttgacaaagacaccaattccccaggggacgaagtgccayttcagctcaggccctggggccttgagtgttctaggcagcccaggcaccatttttctgttatgtagggctccatcaaagcactatgtccctggcagataatgtgtagttttagtttaggccctagaggcagggtgcagccactgttgacagaggtagatgaagctgttctgtcaaagcatcattttccaggcgggagtgtgcagcttcacctcttgcctgaggtagccagtttggggatgcgggggtaggtggagcagtttcatcactgcttggtaccaccaagaagagtgtgacagttgcctgaagcttggtttggggatgctgagccatcaggtatgggtggtttaa

SEQ ID NO: 550800 - DNA, 634 bp, Homo sapiens
tgacatttctttcaaggttttgatctaatcagtgtcctcattcaacctgagtctccagcttttctaaacataatacaagcatgccatcttatctcatcctttcataatgtattgattagagtataagctaagctactgttacaagaggaacagaaaatatagcagctctaatgagatacaattctattttttctcatgtgacagtttagacgtagacaggcaattcagagtagacagataccaggtctcttctaattgggttgctcaaccatttcccaggacagagacctcacattcatggttaaagtttactcactatcaccttgtctgaatttcagtataaaaaagaggaaagggaagaagcaaaaaataagcaactttcttttcaaattttatttttattattactttttttagagacaggttcttgctctgtcatccaggctgcagtgcagtggcgtgatcatasctcactgcagcctcaaactcctgggctcaagtaatcctcccccctcaggctccagagtagctgggcttgcaggtatggaccactacacctggctatctttttaaaggatatgacctggaaaatgaaaacgtaactttcatttaccttctaatgtcctgaatatag

SEQ ID NO: 550801 - DNA, 558 bp, Homo sapiens
agagtaagaattctaagtgactttttgagtaacagcaaagattttcaatttcatcagtgcgaagggaaacaattgaagaaagggtaatgtgatctgatgtgttttcagaggaagcttgacagctttataggttaaaggtgcttgtaaagagaccatttaggaagctatttcattggatcatgatagtgtagtagatatcaagagaaatagactaatctaagatatattgtagggaaggaattcacaagaatttgcatttatttattcaaaacacacttgctgattacatgaagcataatgatatcctgtgtgggcagctagaatggatagaactataaactaaaatatctaatcagacttctataataaygccagataatttgacctggactggaattttcattgtcattcaaacagactaagctttttatttaaaaaaatatttaaaagatgatagaaaatttggctggacgcttgtaatcccactactttgggaggccaaggcagttggtggatctcttgaccccaggagttcaagaccaacctgggcaacatagc

SEQ ID NO: 550802 - DNA, 683 bp, Homo sapiens
gtattttcactccaatttactatcagatcacagaatatatattatgctcattagtaagatggaggcatattgaaaagcatttgttaggaaaggaagctactgcaaaaagaattttgccttcgtccccagtctcttaaatgggtttattgaagcttaacaaagaaaactgcttttccatagacatctctggatggaaattttcttttataagacagttttggcattctgtattaaaacctatactgcacatgggtgtattgttaggagacattcaaatgcagaagttttctaatgagggctttgcacatgtgtaaagaatatttaagggacaatgtcacaataagtcagcatgcaaagcaatgtatttcttctgttactggttacgttccaaagcagagctgagagcaaagacagctgataattgaaaaagccattctgtgcatttatacttcaatatggttaacgcaatttctattaaacacartatttttccttcacaacaaacaataacaaataaaatcttagtcactacttggtccttcaaaattcgtagttgttttttgtctaatgcagtttgctgctgttaaactattatttaatgattgaaacagctccctaggtaaaaataataataataataatatataattaatacaataatacaaacaggctcaagttgacat

SEQ ID NO: 550803 - DNA, 638 bp, Homo sapiens
tttaaaaattcagataaactaatatttaacctattttataacttctattctcctgttctcattttcccacatcaactttttcaaagaggcaaatctccacttgaaaattaaaagttaaaaattatgctgaatttatccagtgaactattatgtagctatttaaacttatggctagcaaacctatgcagcagtataacatgtgcttaggatatcacaatcaatgaaacgtatacatgtatcataatatactctgttacaactgtagagaaattgtcttagaaaaaaattggcagaaaacactcagattgtattaatacatatttaaatkctggatgtatgggtagttttttatgccttttccttattttggaatatttgtggtggaatattacttttatatttagaaaaacaaatgttaaagtaatagtgatgcagtcttactgtgaaatatggaccaatttacttttcaaaacactaaaccttttcataagaaaatataatagctaaagatttcaggaagtaaaataatggtttcactaaattggccttaagcgcaggccaatttataaatgatttgaagagtttaaatttatagggggtctccttattccaatacttgattctacattagcttctac

SEQ ID NO: 550804 - DNA, 1216 bp, Homo sapiens
ctccaggaagaggctggaatggtcctgcagacttggttggtatcacatttggaagtttctccagcagcagaaggaaacagggggtgcccacatggtatcatatttggaagttcctccagcagcagaaggagagagggggtgcccacatggggtgaggtcagagagtcagcaactaggattgaggttttggggtgcaggctttgctggcttggtgaggaaatatgaagcaatgctggagagctagccacggagctagatagagactcagccttaataatgacttaatgggcattggccgtgtgcctgtgtctcctgcacatagttaggaagcatggcaactcagaaaagatgcagcaggagccagggaatgccagtcgcttgtagcatgcttatcacgtaagcagaaagaagggaggatctgcctgaaaaacatactcaaagatgcatatctaggggcaagacactttgggtctgcctaacggttatggaaaacaactgaatcttgcactcccaggattttccaaagaagggtaatgatacattcactcaaccctaagtctactgcactggaaaacaaaaatgaataggtttctgtacaatgtgccaaatgttgaattggacactttatgtatcttatttaatttttactacaacccaggaaggtaattgtgttaatattcttaagttgtcaatttttaaaaaattgaaccacagggacattaagtaacttttccaggatgcacagctagaaaatgacgcggttggaattccagcctaagtctgttttgaaagcccaggctgcaccacaccaactccaaggaagctcagagtagaaggaaacagatgacgtatgtttcttctatactacagagagaaggcaattaatatgtaatcccaacactttgggaggctgaggcaggaggatcacttaaggccaggagttcgagaccagcctaagcaacatagcaagatcccatctctacaaagaataaaaaaaattaactgggcatggttatgtgagcctgtagtcccagctcctagggaagctgagatgagatgattgcttgagcccaggagtttgaggctgcagtgagccatgatcatgccattgccctccagcttgggtgacagaatgagamccttttcaaaaaaaagaaaaaagaattcaggagctcagtttgcaaatgttgagtgagtggtatcagcaagatattca

SEQ ID NO: 550805 - DNA, 1180 bp, Homo sapiens
tgccctcttgtgtctaatacctgtcctttgaacagcctctcccactaggtctggatggaggataccttaaagtgaaatgacagaccaggagaataacaacaacatctcaagtaacccctttgctgctctttttggctccctggctgatgccaaacagtttgcggcaatccaaaaagagcagctgaagcaacaatctggtaagtggaggagccaatagcagcaaataagatgacctagaatggggtcttcccaaattaagtattctttgagtccttaattgcaattggaatttaagtttggaacaaaagttggtttttgtttgtttgttgagagcagaaattggggttttttgtttgtttgcttttattgttggttttgttgtgagtccctcccctccgctgtcctctccactgtacaaaaagagaccaggtaacaggtggttccatagtaacagatgccagtcgtgatcccaaagctgtcaggctgttttctttaaaagaaaaaaaaaatcacctagtaaaagctatttaaataaatgtttttaacatgggacacagaggtggtaagtgtaggtgtagaaagcaagtcatgtgcagctatagaaagcagatgtaaaaggaagaactataaaagctttttgacctgtaggcaaatgagacttgttcttaagctcagcacttcaaaggccctcccaagcaaagtgcttcttctgttccgatgagtggcatcatttgtagcttagtcctgttaggacagacttttttaaaaaatctgatccttagccttactatgaaaaacatcagaataacatctcagtaatcagaaaaaatggttttctttcaggcaccgaatttaagatcaagtccagcttcctcctataaggagacatatacactagaagaattaggatttttctcaaatatgttagtcttctgaagatattcacaatctttcaaaccagaaattgctccccttctcctctctccgaaaagaataatagtgtttttyttttgagagaaggagaagtgtttgcattttccctttattttgtttatttaaaaaaaaaaaaaacactcaggtgcatagctgacttttggcctttcagttagaaagggctgaagaaaaaagaggtaaaggcaagacagataagtgattgatgcaagggaaaaacaaaatcaat

SEQ ID NO: 550806 - DNA, 1393 bp, Homo sapiens
  misc_feature 34: n = A,T,C or G
aagttctactctacagatagagacaaaagtggcnaatattaaggaaatgtttataagggagctaatgagatcaataggaccacaaaagacattagataaagaagattctagaaatgttaagattttagaactagaatgtatgacttccaaaaacagttctggttctggctattcattattctgtaatttgttttcctctgatttagctgattatgacaggtataagtagaggragaaaacagcaactcagtcatagaaagggacactaagaatagcaatttttaatgccttctcaagatacctgaattgatgcagagcatttttcaaaactactcagtcaacacattgccggaagaaggaaattatgtctttagagagaaatctccatcatagacattttaaataagacagtagataaaagttcagcatgtgcttaagctgctcagctgcctagattcaaacaaaaaatgaatatcatctagtttcccaatattagctagctcaagacattatctacagggccaaaggaaatgattttggactattatccataactttgaattatgtgtcttcctttcagtagagaatattaggctgaccttttctgaagaataatttaatttaatattgaacaacagagagctggaagctgctcttagattgcatctcaggtggctactagtttatatgtggtcattactaatctagagtcccttttcaccagcttagttttctactaaccaaagaaagactatccatataaccccatcaaagtatgatcattgcatcaaagtatgatcattgcccttgtgtgatgtaaaactatcctgctggccttcttgtactttgcctaataattattttatgtaataacaacccattctacaccctactcaaccaagctgcctttctttggatagtgcatttcaactgaaggctgctatttgcaattagcttcaattatgttgaatacttggcagcattttcccattgctgtgcaccctgcctgtgtcctgtcaaaaacttttgtgagtgccttctgtgtcattgcaactgcaactccctactatccttaaagagaaggctagataaataattgaggatttgtttttttgtgactttctgttttccctgacccagtctcttctgctttcttgggggcaggttgcatgatcagatggtaaaaatcaaccaaaatctgcatcggctgcaggttgcctggcgggatgctcagcaaagttctagccctgctgctgacaatcttcgtgagcagtttgaacgactgatgaccatctatctttctaccaagactgccatgacagagccacaaatgctacaaaactgcctaaacttgcaggtgtccatggctgttctactggttcaactggccata

SEQ ID NO: 550807 - DNA, 797 bp, Homo sapiens
aaaaaaaaaaaaaaaaaaagaaaaagcccacaatcctagttgctgctatttaatacccaagaggatgctggcattttagagcttccctgcaggtcttttctccacttagaagctgggatgccacgtgggtattaactgataccataggtaaacacatctgacacaggctcagcacactgtagttggaatcattttaaaacaaactcttgtaaagtccttcttagagagacagatcctttctaaggggaagatataatacacgacaggtagaacttgtgtgcagagcaggcggtccatgcccagtgtattgagaaggtgggcagaaaatctcctggaaaagcatgcatgggtaagtgtgattttgtgaggcgcacaggggagttacgtggragttatgaaggaacggaggcgggagggggaggaccatgcttcatggtaatagagggcccagtaccaggcattatgagaaaccacctctccatccatcagtctgtcttatcacgccagcgggagggcaaacttggaatctgagaggggcaggctctggcttggccgtgaatgatgggccaggattctgcaggcattttctaggggtggcaggagagaagtgatggaggattctgggagagctggtggttctaactgacaagataatggagtgagtagtggaagaaaaaaataaaggagaagaaggaagaaatccatgataaatccacctttcacggacagtggagaaagataaactctctttctaaccgttaaagatggcttttccttctttccgtttttcaagttca

SEQ ID NO: 550808 - DNA, 611 bp, Homo sapiens
tgagaaaaacgtctaaatggctgtaagggacatttgaaatttatgtggtttgacacttaaaatttttagaaacatctaaaccagcataaaaataaccaaactgtgaggttaaaatatactacactccagcctataactccatgtcaggagttatttatttttgagcaacatctcaaatacagtgctaaactctatagtcattctttttttcaaaagagaaacaaaacagtaaaawtatcaaggaaagaaacaattggcaccctcaaagttgaaaatttactcaggaatacatcagaatctgctgttgggtatttgaatgtgttagtccctaaccacaaacatgtttgcatatggcaacaggatttatctcaagtgttacttttaattatggttatatgtttataattttgtgataataacagtatctctttgtgattcaatttcaagatgagctcctttattttttaagtattttaccatctgttgcccatttaatagtgcacctataggtatatggaattatttttaaaatgacggttctgaatcagttgacaattacattgaaatagttcttaaaggtgccaataataaaaaaaaaaaacttgcaaaaa

SEQ ID NO: 550809 - DNA, 611 bp, Homo sapiens
tgagaaaaacgtctaaatggctgtaagggacatttgaaatttatgtggtttgacacttaaaatttttagaaacatctaaaccagcataaaaataaccaaactgtgaggttaaaatatactacactccagcctataactccatgtcaggagttatttatttttgagcaacatctcaaatacagtgctaaactctatagtcattctttttttcaaaagagaaacaaaacagtaaaattatcaaggaaagaaacaattggcaccctcaaagttgaaaatttactcaggaatacatcagaatctgctgttgggtatttgaatgtgttagtccctaaccacaaacatgtttgcatatggcaacaggatttatctcaagtgttacttttaattatggttatatgtttataattttgtgataataacagtatctctttgtgattcaatttcaagatgagctcctttattttttaagtattttaccatctgttgcccatttaatagtgcacctataggtatatggaattatttttaaaatgacggttctgaatcagttgacaattacattgaaatagttcttaaaggtgccaataataaaaaaraaaaacttgcaaaaa

SEQ ID NO: 550810 - DNA, 621 bp, Homo sapiens
atctctattagaactgaagaatagtaataccatctattatacaacattaacatttttttccaagtgctttttgatccatatagcacccctaaggtatatatagtgtgaatgttgcaatttccattttacagattaataatgaggcaaaatgatttcccaaagtatacatatgcatgtattctcaactagtgaaacttcgttcctgagggtaagggggtggggtgaaaaaaatcttaggtattacaatggtttatgacccaaacagcttagctatatatctgtgatattacaatttcatggcagggagtatgattaggaaaaagcctccttaagaaggagataatgaaaagaaggttacgaaatactgcattagtagtggaacaaaaaaaaaagtcagaacccctaagaatcccagcctggtattaattccattaattaattccaattacttgtgaacattctagatcccaaagttgtttgcaaaggggaccattattttctagggcagtattgatttcacattttatttttcttaacactgattaaatatataactacatmatttcagcagtatgccttcagctcttgcaccatcaaacccccatcatactattatactca

SEQ ID NO: 550811 - DNA, 1124 bp, Homo sapiens
tctatgcccccagcactatggccatgacagcctccagataggagaagggtctggcttcattgacatttccacggtagtgcatacagccctcgagacctactcaagagaggacaaaagagaggctcgggtagagcttatctagtggatgaacctgctcctagacacagagcactgcctggcatccctgctgcagaatcgggctaggatagggctgagtattctaattgcctgtgggataggatttcactatatccctgcacagctgttttcatgctgtggttggattttgacgctgtcgtaatttcccccgttgtttgatattctcgcatttacattaaagaagtacaggagaagaacagtgttcttgggagaagatttcagcatttaggattcatacaaataaatgcatggactgcccacgcttccctcacatccgtcaaacaactcagttaaaaacaccttttcaaaaggctcttctataattttacttcttttaaaaatagtgatggggttatgtctgatgccccggaacgtccgtcatgcattgattttatccagttcagtgccaggcagcaattagcaaaggtaacactaattaggttttacaatgtaatatgtgtccttctaaacttaagtcatagcattttaagcttctaatgattgcaaggtcattttgctattcttcataatagcagggatgctaatgagtgcatttggtatgcgtggggatgcccctgtttcctcctggggcttatcagcatttactggggacactttacttaatttgttgccgagctcatgacctaaacggaaacattgaaccggccacctgaaggtctagaagttttagactgtggaatcagcgctgtggaaggcccggctacccgggtyaccgtgagctgatcatttgttttcctctggacttagaagctccgcatccaccctgtccaatctccttagctggccaatctccctctcccacgtctgaatgcacttaaatttgctccttcctgctaagaaaaatgttatcctattaaacgatgcgtgttataaataccttaacattcatagtttcatgttttaatcttgctgctagcatattctgggcatgcttactggaatca

SEQ ID NO: 550812 - DNA, 1323 bp, Homo sapiens
  misc_feature 1074, 1075, 1076, 1077, 1078, 1079, 1080, 1081, 1082, 1083,1084, 1085, 1086, 1087, 1088, 1089, 1090, 1091, 1092, 1093,1094, 1095, 1096, 1097, 1098, 1099, 1100, 1101, 1102, 1103,1104, 1105, 1106, 1107, 1108, 1109, 1110, 1111, 1112: n = A,T,C or G
  misc_feature 1113, 1114, 1115, 1116, 1117, 1118, 1119, 1120, 1121, 1122,1123, 1124, 1125, 1126, 1127, 1128, 1129, 1130, 1131, 1132,1133, 1134, 1135, 1136, 1137, 1138, 1139, 1140, 1141, 1142,1143, 1144, 1145, 1146, 1147, 1148, 1149, 1150, 1151: n = A,T,C or G
  misc_feature 1152, 1153, 1154, 1155, 1156, 1157, 1158, 1159, 1160, 1161,1162, 1163, 1164, 1165, 1166, 1167, 1168, 1169, 1170, 1171,1172, 1173: n = A,T,C or G
agagaagctggttaacttgggtgtcctaaggaaagaggagaacaggtgtagtgggtggctcacacctgtaatcccagtactttgggaggctgaggtgggaagattgcttgagcccaggagttcgataccagcctgggcaaaggaagttaggtccgggagatcacctgccagggccagatgacagagggctctttactgtcttggccgggtgacagcgagccatcgsagggatggagagcagcatgtagcatcgtccagtgtgtgcttatgggaatcacttagctgccacgtgtgactctcttcccgtgggggcagcagctacagggtgagcaccgctaggagataatgcctgggaatatccttcttaaattcttgaatgtaaattcactttacaaggtgcgtcattgtgtcccctctctggggacagctgtgtggtgtggtggaaagacgagggcatgtgaagacggggaacagtcctgtgaccctgggcaagttgcttcatttttcaatccagtcgcccaatttgtaaaatagggattgtaacgtaccccacgacaagcctgttgcgggagtcaggcaggatgatgggggtgaaattgctttgatggtgtgaggtgctacatgccaggctgtgacctttaataaccaccgagggggtgggcttgctttgtgctgtacccaccctcccttcacccagccttcacctctgtaagtggctcttccattttacagtctcttcatttggaccagccaagatgattttgttttctgccaggatcctggctgataacaactctaatgaatattcatccatttccatgtttgggcatctgctgagggcctctaactctaaatcccattgttttctcttcttaaagacccagactggcatgtcgattgcctgtgggtctcgtgtttcggcacatttgggagcagaggcgaggactcctcttttccaaagtatcttttttttttttttttttttttcccaaaaggggtcccaagtttggtaaaaagggggggagggcgggggggcaatccccagcccagggaaactttggccccgggggccannnnnnnnnnnnnnnnnnnnnnnnnnnnnnnnnnnnnnnnnnnnnnnnnnnnnnnnnnnnnnnnnnnnnnnnnnnnnnnnnnnnnnnnnnnnnnnnnnnngagacagggtctctgtcacccaggctggagtgaagtggcgcaatctcggctcactgctgcctcgacctccccagctcagatgatcttcccacctcagccccccaaggagctgggactataggcatgtgccaccatgcccagctatttttt

SEQ ID NO: 550813 - DNA, 519 bp, Homo sapiens
ctttgtcggggggccagacattgctctaataactttctaatgggtatatcmaggagcttaattccaacaacaatctgactgtgtactgttcttaaactggtcctgaggctagagaggttaagtaacttgcccagggtcacacagttaatacacaataaatgggtgagtcagattgaaatttaggcagccaggctttcaagtttctgctttagcttaacttctactctttgtgctactccaggtgtcccatcgttggtaactaaagacgggtttagaataggttgagattttatgctggaaggcaaaggaattctgaggtggaaggaaacaaggccagagtgaggtgatgacttaacctaaaccaaaggctaccttgcctaaaatgttagtggctgaggacccaagccttctgcctctagcacagtgctctaaactaggccctgaaggatgtgtcgggtcaagcaactggggaagcatccgaaggataccacctaggcagtacagggaaaaagaggaaag

SEQ ID NO: 550814 - DNA, 519 bp, Homo sapiens
ctttgtcggggggccagacattgctctaataactttctaatgggtatatcaaggagcttaattccaacaacaatctkactgtgtactgttcttaaactggtcctgaggctagagaggttaagtaacttgcccagggtcacacagttaatacacaataaatgggtgagtcagattgaaatttaggcagccaggctttcaagtttctgctttagcttaacttctactctttgtgctactccaggtgtcccatcgttggtaactaaagacgggtttagaataggttgagattttatgctggaaggcaaaggaattctgaggtggaaggaaacaaggccagagtgaggtgatgacttaacctaaaccaaaggctaccttgcctaaaatgttagtggctgaggacccaagccttctgcctctagcacagtgctctaaactaggccctgaaggatgtgtcgggtcaagcaactggggaagcatccgaaggataccacctaggcagtacagggaaaaagaggaaag

SEQ ID NO: 550815 - DNA, 519 bp, Homo sapiens
ctttgtcggggggccagacattgctctaataactttctaatgggtatatcaaggagcttaattccaacaacaatctgactgtgtactgttcttaaactggtcctgaggctagagaggttaagtaacttgcccagggtcacacagttaatacacaataaatgggtgagtcagattgaaatttaggcagccaggctttcaagtttctgctttagcttaacttctactctttgtgctactccaggtgtcccatcgttggtaactaaagacgggtttagaataggttgagattttakgctggaaggcaaaggaattctgaggtggaaggaaacaaggccagagtgaggtgatgacttaacctaaaccaaaggctaccttgcctaaaatgttagtggctgaggacccaagccttctgcctctagcacagtgctctaaactaggccctgaaggatgtgtcgggtcaagcaactggggaagcatccgaaggataccacctaggcagtacagggaaaaagaggaaag

SEQ ID NO: 550816 - DNA, 1529 bp, Homo sapiens
gaacacatattatgataatgagattggttctccctaaagctttttaaaatttaacacaatcccagtatatacatgaacagggcaaattagttatgtatattgctgtatatataacaaacaacctcaaagctagtggcttaaaacagtaaatatttcacaattgtgaaatctcacaatttcgctaagtcaggaattcaggagcagtttagttggatgcttctggagattctcatgtagctagccaagatgttgaccagggcttggtcatctgcgggagtaactggggccagaggttctacttccaagatagctcactcacatggctggcaagcggatgttggcagttgtcaggaagcttcagttccttgccttgtggacctccacctagccctgcttgacctcatggggctggcttttcccagagtgtgtgatcccaggcagaagcggcartgctttaggaagtcacaaattatcacttctgctgcattctcttggtcacatagatcaatccaccaaccctgatacatggtaggagaggtctatacaaggctgtgactaacaagaggcctggttactgcacaggattaatttgaaactagacaaattgattttaaacttcatatgtaaaaatgaacatcaagaatgggtatggaagagaaactaagaaaaggagttgtgcaactaaatatcaaaacacaatataaatctatctatattaccacatacatagaccattaatatgagagtgcctggccaacatgttgaaaccccgtctctactaaaaatacaaaaattagccaggtgtggtagcttacctgtaatcccagctacttgggaggctgaggtaggagaattgcttgaacctgggaggcggaggttgcagtgagccaagatcacgccagtgtactccagcctgggcgacagagtgagactccatctcagtcagtcaatcaagatggtagattggctgggtgtggtggctcatgcctgtaatcccagcactttgggaggctgaggtgggtggatcacgaggttaggagtttgagaccagcctggccaacatagtaaaaccccatctctactaaaaattaaaaaaaattagctgggcgtggtggtggacacctgtaaccccagctacttgggaggctgaggcaggagaatcgcttgaacccaggaggcacaggttgcagtgagccaagattgcgccactgcactctagcccgggcgacagtgcgagactctgtctcaaaaaaaaaaaaacaaaaaacaaaaacgaagatggcaaattatcagtgagcaaaaactggattattaaatacataggagaaatggattgccatctagaaaaaatcaatcttggtccctacctcattccttataccaaaataagttccaggcagattaaagattttagcataaaaaatggacctataaaagtatccaggaaaaaaacgggaaaaattttttgtaagatcagtaaacagcatgggaaaaaagaatgtttatattcatatacacatgcatgtaat

SEQ ID NO: 550817 - DNA, 1529 bp, Homo sapiens
gaacacatattatgataatgagattggttctccctaaagctttttaaaatttaacacaatcccagtatatacatgaacagggcaaattagttatgtatattgctgtatatataacaaacaacctcaaagctagtggcttaaaacagtaaatatttcacaattgtgaaatctcacaatttcgctaagtcaggaattcaggagcagtttagttggatgcttctggagattctcatgtagctagccaagatgttgaccagggcttggtcatctgcgggagtaactggggccagaggttctacttccaagatagctcactcacatggctggcaagcggatgttggcagttgtcaggaagcttcagttccttgccttgtggacctccacctagccctgcttgacctcatggggctggcttttcccagagtgtgtgatcccaggcagaagcggcagtgctttaggaagtcacaaattatcacttctgctgcattctcttggtcacatagatcaatccaccaaccctgatacatggtaggagaggtctatacaaggctgtgactaacaagaggcctggttactgcacaggattaatttgaaactagacaaattgattttaaacttcatatgtaaaaatgaacatcaagaatgggtatggaagagaaactaagaaaaggagttgtgcaactaaatatcaaaacacaatataaatctatctatattaccacatacatagaccattaatatgagagtgcctggccaacatgttgaaaccccgtctctactaaaaatacaaaaattagccaggtgtggtagcttacctgtaatcccagctacttgggaggctgaggtaggagaattgcttgaacctgggaggcggaggttgcagtgagccaagatcacgccagtgtactccagcctgggcgacagagtgagactccatctcagtcagtcaatcaagatggtagattggctgggtgtggtggctcatgcctgtaatcccagcactttgggaggctgaggtgggtggatcacgaggttaggagtttgagaccagcctggccaacatagtaaaaccccatctctactaaaaattaaaaaaaattagctgggcgtggtggtggacacctgtaaccccagctacttgggaggctgaggcaggagaatcgcttgaacccaggaggcacaggttgcagtgagccaagattgcgccactgcactctagcccgggcgacagtgcgagactctgtctcaaaaaaaaaaaaacaaaaaacaaaaacgaagatggcaaattatcagtgagcaaaaactggattattaaatacakaggagaaatggattgccatctagaaaaaatcaatcttggtccctacctcattccttataccaaaataagttccaggcagattaaagattttagcataaaaaatggacctataaaagtatccaggaaaaaaacgggaaaaattttttgtaagatcagtaaacagcatgggaaaaaagaatgtttatattcatatacacatgcatgtaat

SEQ ID NO: 550818 - DNA, 1451 bp, Homo sapiens
tttgttgttatctttatcctattttcccaaacagctttagctattacatttactttccttcacagaagtgttttsctgctttgaagtatatttgacttaccatgcaagcaaatatttttcactgtgtggtatccttattttggaatgaccatgaaaaagataatcatatgtttaaatttgaagtgtaatgtttttctaagataaaataagatcttaaagtatttaataatgttctttttcacagtagtgttatgtgcaaactattgaaacaagtatgtactgaatcaatttgatttataagtatatgccaattatatgattattttcatttggtaggcttgagtttgaagaaacagaagaacctgattttactgcattatgtcagaaattaaagataccagatcatgtcagagagagagcttggttaacttgggagaaagtttcatctgtggatggagtattggtaaggattttcttaaaacgttttgaaatttttttttctcattttaaaaacaacttcaaatcactatacaaaaattgaaagatagaaaaatataaagacaataaaagctaataataattccattacccagaggaaatttacctctgctaacattaaaaatgtttgaggccgggcacggtggttcatgcctgtaatcctaccactttgggaggctgaggcaggtggattgcctgagctcaggagttcgagaccagcctgggcaacatggtgaaaccctgtctctactaaaatacaaaaaaaaaaaaaaaaaattagcagggtgtggcgtgcgctgtagtcccagctatttgggaagctgaggcaggagaattgcttgaacccaggaggtggaggttacagtgagccgagatcgtgccactgcactccagcctggcaacagagcgagagtctgtctcaaaaaaaaaaaaagtttgaaaaaaatccctccataaatgcctcccaccaaactattttaaagcaggtcttagttatattttattcactatgatacaaggacttttaaaaaaacaccgccataccttataaaataatttttataccttctaatatgcaatcagtgttcagatttcctgactgactcagaattagttttgttagaattcaggatcttgaaaatatattgatatattcctttcattttttctttgcgtaagtatagatgtatatgtttaataaaaggagcaaataattactagagttttatatgtactggggcaatagtataagaattttacatagccgggcatggtggtgtgtgcctgtagtcccagctacttgggaggctgaggtgggacgatcacttgaacctgggaggtggaggttacagtaagccaagatcgcaccactgcactccagcctgggcaacacaggaagaccctgttgcaaaaaaaaataaataaaaataaggctgggcgtggtggctcaaacc

SEQ ID NO: 550819 - DNA, 1451 bp, Homo sapiens
tttgttgttatctttatcctattttcccaaacagctttagctattacatttactttccttcacagaagtgttttgctgctttgaagtatatttgacttaccatgcaagcaaatatttttcactgtgtggtatccttattttggaatgaccatgaaaaagataatcatatgtttaaatttgaagtgtaatgtttttctaagataaaataagatcttaaagtatttaataatgttctttttcacagtagtgttatgtgcaaactattgaaacaagtatgtactgaatcaatttgatttataagtatatgccaattatatgattattttcatttggtaggcttgagtttgaagaaacagaagaacctgattttactgcattatgtcagaaattaaagataccagatcatgtcagagagagagcttggttaacttgggagaaagtttcatctgtggatggagtattggtaaggattttcttaaaacgttttgaaatttttttttctcattttaaaaacaacttcaaatcactatacaaaaattgaaagatagaaaaatataaagacaataaaagctaataataattccattacccagaggaaatttacctctgctaacattaaaaatgtttgaggccgggcacggtggttcatgcctgtaatcctaccactttgggaggctgaggcaggtggattgcctgagctcaggagttcgagaccagcctgggcaacatggtgaaaccctgtctctactaaaatacaaaaaaaaaaaaaaaaaattagcagggtgtggcgtgcgctgtagtcccagctatttgggaagctgaggcaggagaattgcttgaacccaggaggtggaggttacagtgagccgagatcgtgccactgcactccagcctggcaacagagcgagagtctgtctcaaaaaaaaaaaaagtttgaaaaaaatccctccataaatgcctcccaccaaactattttaaagcaggtcttagttatattttattcactatgatacaaggacttttaaaaaaacaccgccataccttataaaataatttttataccttctaatatgcaatcagtgttcagatttcctgactgactcagaattagttttgttagaattcaggatcttgaaaatatattgatatattcctttcattttttctttgcgtaagtatagatgtatatgtttaataaaaggagcaaataattactagagttttatatgtactggggcaatagtataagaattttacatagcygggcatggtggtgtgtgcctgtagtcccagctacttgggaggctgaggtgggacgatcacttgaacctgggaggtggaggttacagtaagccaagatcgcaccactgcactccagcctgggcaacacaggaagaccctgttgcaaaaaaaaataaataaaaataaggctgggcgtggtggctcaaacc

SEQ ID NO: 550820 - DNA, 1526 bp, Homo sapiens
tgacaaaataattccatcttgctgcaaagctgaaaatgcagttgaatgcttccaaacaaaggtatcatatttgcgtggatatctgaaccagtactgtagtctatgactcattaaaacaaaacaaagttaaaaatgaaaacgtgcttaattgtggagagtatcgtttttggaatagagaaatagttcagcagtctgatattcttcgagtgaacaaaactggatttgctggtttttattatctattcattaagtcaacaataattttattattaaggaagtgagtttgatgggataaagaaggaaagacagacagacagaaagagagaaagagagggtgctataaatgggaaggagtaagtgaaagaaaacggagaaaaggaggagcagaggagagagaaaaaatgaagaactatgataaatgctttatacttactgtttttttaaaccttagaacaaatttgaggtgtaagtatttttgtcctttaacaaactaggaaagaggtttagagaagaaaattttttttaggtttagagaggtagaataatatccaccattaactacttgctaccagcagtcctataacaaaaatttcctgagaactgactactctcagtgtcaagccgtgatacaatcgtattttttgtaactgagaagacacttaagaaattagcaggcttcaatttgtctttaagctgtttaaaggtacagttgttcatttatgatccccagtataaaagttatgtttttgtttcaaggtactttgagtaaatttgtctggcacagatgcatataaactaacccaaaagaataaatgagtcaataatattctgcgataatgtatgacatttataatttttagtaaaaaacatattttatggaatttcattttacctatacttgttgtttttctaaatattagagcttgtaaagaaaatgttagtatatgctttcatgacattttgtttcctctacatctaggcagcaacagttacaaaagaattaagagaaagcagcttgttaaatcaacatgcatgtgcagtaatgaaaaattttgggacccgaactttccaagccatgtaagttcaagttctatctagggaagagggtgagagctacagaactaccattttgcaatttgggttcgtttttttaattgttgctgttttagagaatgaagacccctttgtgaccyctttgatgagggctaatgggattagaaccatgaactcttaggatcagaaggaagctaacggataagtcagtttaacacttactaaagcctagctgagataatacatagaaaagacttttaaagtttatgttatttacctgttctttaagacacttaagttctggcctgccatcaaattatacctcatcactagaccatatttttctagctcttctacaaaataagtcagccttcactgagtgtcatttaaaacttttgccttaacaagaaattctttatattaattgtgtttcttaatcttctataaggctctttatagcatttattgcttcc

SEQ ID NO: 550821 - DNA, 1526 bp, Homo sapiens
tgacaaaataattccatcttgctgcaaagctgaaaatgcagttgaatgcttccaaacaaaggtatcatatttgcgtggatatctgaaccagtactgtagtctatgactcattaaaacaaaacaaagttaaaaatgaaaacgtgcttaattgtggagagtatcgtttttggaatagagaaatagttcagcagtctgatattcttcgagtgaacaaaactggatttgctggtttttattatctattcattaagtcaacaataattttattattaaggaagtgagtttgatgggataaagaaggaaagacagacagacagaaagagagaaagagagggtgctataaatgggaaggagtaagtgaaagaaaacggagaaaaggaggagcagaggagagagaaaaaatgaagaactatgataaatgctttatacttactgtttttttaaaccttagaacaaatttgaggtgtaagtatttttgtcctttaacaaactaggaaagaggtttagagaagaaaattttttttaggtttagagaggtagaataatatccaccattaactacttgctaccagcagtcctataacaaaaatttcctgagaactgactactctcagtgtcaagccgtgatacaatcgtattttttgtaactgagaagacacttaagaaattagcaggcttcaatttgtctttaagctgtttaaaggtacagttgttcatttatgatccccagtataaaagttatgtttttgtttcaaggtactttgagtaaatttgtctggcacagatgcatataaactaacccaaaagaataaatgagtcaataatattctgcgataatgtatgacatttataatttttagtaaaaaacatattttatggaatttcattttacctatacttgttgtttttctaaatattagagcttgtaaagaaaatgttagtatatgctttcatgacattttgtttcctctacatctaggcagcaacagttacaaaagaattaagagaaagcagcttgttaaatcaacatgcatgtgcagtaatgaaaaattttgggacccgaactttccaagccatgtaagttcaagttctatctagggaagagggtgagagctacagaactaccattttgcaatttgggttcgtttttttaattgttgctgttttagagaatgaagacccctttgtgacctctttgatgagggctaatgggattagaaccatgaactcttaggatcagaaggaagctaacggataagtcagtttaacacttactaaagcctagctgagataatacatagaaaagacttttaaagtttatgttatttacctgttctttaagacacttaagttctggcctgccatcaaattatacctcatcactagaccatatttttctagctcttctacaaaataagtcagccttcactgagtgtcatttaaaacttttgccttaacaagaaattctttatattaattgtgtttcttaatcttctataaggctctttatagcatttattgcwtcc

SEQ ID NO: 550822 - DNA, 1005 bp, Homo sapiens
cttataatatttagtgtttttcctactaatgtacttaatctgctcattgtatattcctaccactaaattttaacctcttttatggtagagacattgtcttgtaaactcttatttccctagtatttggagatgaaaaaaaagattaaattatccaaaattagatctctcttttctacattatgagtattacactatccatagrgaagtttgtttgagacctaaactgaggaacctttggttctaaaatgactatgtgatatcttagtatttataggtcatgaggttccttcctctgcctctgctatagtttgattagtcagcaagcatgtgtcatgcatttattcacatcagaatttcatacactaataagacatagtatcagaagtcagtttattagttatatcagttagggtccatcaaggaaaggacaaaccattatcagttactcaacctagaattaaatacagctcttaatagttaattatccttgtattggaagagctaaaatatcaaataaaggacagtgcagaaatctagatgttagtaacatcagaaaacctcttccgccattaggcctagaagggcagaaggagaaaatgtttataccaccagagtccagaaccagagcccataaccagaggtccactggattcagtgagctagtgggtgctccttggagagagccagaactgtctaatgggggcatcaaagtatcagccataaaaaaccataaaaaagactgtctgctgtaggagatccgttcagagagagagagagaccagaaataatcttgcttatgctttccctcagccagtgtttaccattgcagaatgtacatgcgactgaaagggtgaggaaacctgggaaatgtcagttcctcaaatacagagaacactgagggaaggatgagaaataaatgtgaaagcagacatgaatggtaattgacagaaggaaactaggatgtgtccagtaaatgaataattacagtgtgcagtgattattgca

SEQ ID NO: 550823 - DNA, 1005 bp, Homo sapiens
cttataatatttagtgtttttcctactaatgtacttaatctgctcattgtatattcctaccactaaattttaacctcttttatggtagagacattgtcttgtaaactcttatttccctagtatttggagatgaaaaaaaagattaaattatccaaaattagatctctcttttctacattatgagtattacactatccatagggaagtttgtttgagacctaaactgaggaacctttggttctaaaatgactatgtgatatcttagtatttataggtcatgaggttccttcctctgcctctgctatagtttgattagtcarcaagcatgtgtcatgcatttattcacatcagaatttcatacactaataagacatagtatcagaagtcagtttattagttatatcagttagggtccatcaaggaaaggacaaaccattatcagttactcaacctagaattaaatacagctcttaatagttaattatccttgtattggaagagctaaaatatcaaataaaggacagtgcagaaatctagatgttagtaacatcagaaaacctcttccgccattaggcctagaagggcagaaggagaaaatgtttataccaccagagtccagaaccagagcccataaccagaggtccactggattcagtgagctagtgggtgctccttggagagagccagaactgtctaatgggggcatcaaagtatcagccataaaaaaccataaaaaagactgtctgctgtaggagatccgttcagagagagagagagaccagaaataatcttgcttatgctttccctcagccagtgtttaccattgcagaatgtacatgcgactgaaagggtgaggaaacctgggaaatgtcagttcctcaaatacagagaacactgagggaaggatgagaaataaatgtgaaagcagacatgaatggtaattgacagaaggaaactaggatgtgtccagtaaatgaataattacagtgtgcagtgattattgca

SEQ ID NO: 550824 - DNA, 607 bp, Homo sapiens
agaaagccagacaagcaaaagtagtgtaggcacctcttgtttaaacagtgtcattacagagaagtgatatagcccaaagtttacagaaatctaagtttgaatccaattttcctactccactgttgcataaatatgtttggcaagatactgatttgctcattgtcctttgctctttaactttgcctgaggaaataaggaggaatttcatattatttgtctcttttctaactcagtggggttgcwacaaaaaccaagagaacataaattcctagtggtggtttgaggtggaaatgtatggcagaaatgcaaaataccctgcatattgcaatgtaataaagaattaccataatatgtaagatatagtaaagaaatacaggaaaaatgcctatggaattttccgttgcttagtattagaatgattttgctctaccatcaactccagaatcatagccaggcttcttgaagtcaaggattaatagttaggagatcacattctagcaattctacttatgtgatacttatataatacaaaagaatacacatcataacatacaagataatacacttatacaagaaagtaccagtttcacttatagaatacaggttc

SEQ ID NO: 550825 - DNA, 1510 bp, Homo sapiens
gtgtgtgtgcgtggttgctgttagaagacagttcagactttggaatcctgtctggtatatgaggcctctagagaagcgcttgtttcatctcgcagccctgttgtagaagagccttgggcccacctgctgcagggcctgtgggactgttgtccaggtgagtggggagggcctgcaccgggaggctgcggacgcaagcccaggccccttcctgagtgctgtcgggagtggtgcttgcattgtgttcagctggctgacctcctctgtgtgtgtttcttttttcccacaatttgtgctcctctctgtgtcagatttcagaatgccaagcttaggtatgatgcaagtctttttatttcacgcttaataatagggactccatgaattagctataaccatgtatattttttgtttatttctcacccagggttaccttcccgccaatgtagaccggagaccagccactctccagagaaaacaaaaagaatattttgcatttattgagcactattacgattctaggaacgacgaagttcaccaggacacatacaggcaggtgggaatcctttctttttttcgtatgttgcctgatgtactttgctttgctgtgatttataggaggaaatgttttatcaaaaccatgtggagttggtcagagttaaagatgcaggtccctgattagctcacagatttttattttctaataaataaattttaaaacaaataatggcaaatttcctctgctagtactatcttgcttgtcttcagttccctctacaaaagtaaaaagagtattttaaattgaggttacaaaataaatgccttggattcctgagaccggccttggggtgatggtgggagtttgtatcacagtgagctgctgtctggtaataaaaggccattcctaaaggcccaggcccaaccacttagctgatggcatcaggacagagaggttgcctggggttctctggcgctgggctcttcggtctaggtagggatgtgataccgacccaggaaaggtgtgttcatcagtttggttttgcaggggacacacttcagatcatagcagaaggtgtagccaagttaccattttgtgatttagtttaatataaagtgtgtctaattatggtttcttaaatagtcagttgacagatgatgtacataatgggaaaatacttaaaattgatttatgattcacagtacatccagaatttgctgttagaatagctctttgaggactttataattctcactgtctttgtaatatgtgaaaggtcaaaatggtggttcttaattggtattattgtcttagctatctgaaaccagcttctgggtttcctgaggcacggcaggaatgtttccctctgcaaaccctgcttctaggtgayggagctttgccacattttctctttcagttgtgggatagccacatctctttgttagttggttttatctgtaaaaaaaaaaaaaagtccaaatatatgccttacctctgttacataacaaagattcttta

SEQ ID NO: 550826 - DNA, 1584 bp, Homo sapiens
gcccagttgcccctggtccccaagcagcagccccctctgcctccagggtgggcctggagcaggaggggggcctctgcccgggggccgggctctctggggccgccgtcgcgccgccccctccccgcaccgcataccttgcccacagccgagcagctgggaggctatttataaaggcgggtgagatcagcggccggccaaggctataaattcgcaggccgcggccgggccccacaggagcagccgcccggggcaccggagctgcgggctgcgtggccgggatgagcgccagcacgggcggtggtggggacagcggcggcagcggcggcagtagcagcaggtagggctcggctggggcacccggagcccctggcgtctctcatgcccactgccactcaccccacccgcagctcacaggcctcctgcgggcccgagtcctcgggctccgaactagccctggccacaccggtgcctcagatgctgcagggccttctgggctccgacgacgaggaacaggaagaccccaaagactactgcaagggtgagacttggccttggggacatgcggcctcacggccactgcagggacccagggcagtcctgggcccacatgggccagatggtcaatggggccgaggtgttcgggggcccaggggagtgagaaccccctccaccccaatctacatctcccctgggcaggcggctaccaccctgtgaagatcggcgacgtgttcaatgggcggtaccacgtggtgcgcaaactgggctggggccacttctccaccgtctggctctgctgggacatccagtgagtgcctccttcgcctccggggcccagcactggctgggatcctgtccctgggcttgcttggggccaccctgatccccgccgtgggtcctgccagggccacagcctacaagggtctcggtattgcaggcgcaagcgctttgtggccctcaaagtggtgaagagtgcggggcattacacggagacagctgtggatgagatcaagctcctgaaatgtgtgaggcacctccctaccccactcccagctcccctggagctgcctggggcctggcaatgcgggtgcaaggcctgccggggctctgtggggcagggcggggctccctgaggggcagcctccagctggctgtgcccaagggggaggatctggaggaacaggcgagggacaggaggggttggcggcctttcttccagcagggcccagctggagcaggagaagggtacactgaagggagctgtgggcttcagggcagggtggaaccatctgtggccccttggcttttgctccaggtccgggacagcgaccccagtgaccccaaaagagagaccattgtccagctcattgatgacttcaggatctcaggagtcaatggagtccgtatcctttgcaggaagagcaaagcagtgtggcagccaagggccggcaaatgggggggccctcgctgctagagcctgtctgcagacccgcacaatgggcttgcatccctcccagtaacgggagcctctggcacgaccccgcccccrggtaactgtgtttacgtggaggcagtaacaagctagcg

SEQ ID NO: 550827 - DNA, 658 bp, Homo sapiens
cagtgtctacttaactaatcatgtacttttctagccagaaagacagtacttgtagggtacgttccattttaatgcacaaatcattgttgcttttcaaaaagtyatctttttttccctggccacacacagcaccccgaggcctggccagcccccatgccagctcaagagcatgaactcttaccggaatgggttctgtggggagtacaaagtcaaacataagtaggcttgcattcagagctcactgcctagcgggaaaaaagacatatgcactcataactctaatttaacacggcgtcctagaaattccatatccatcttcaaagttctctggaagcaaaaagacaggaggaaagacatttttagaaggaggcttcctggaaggagtgacttcagtttcaggccttaaaggagatgtgagtttccacatgcaaggagggaggaaaagcatgttgcagacagacgaagcaagtgtgtgagcaaaggcctgcggggtgacagggaggggtgttgggaggtgtgtatctggatgaaggcaggtatggaaagtgctgggaaaaaaggtctgggaaagggccttgggggccaggtgataaggaagttgaatgcctctttgaagagtggggttttattttatgtgcctttggtggggagttgtgaa

SEQ ID NO: 550828 - DNA, 854 bp, Homo sapiens
agacagagtcttgctctgtcacccaggctggagtgcagtggtgcgatctcggctcactgcaacctctgcttcccaggttcaagcgatttgcctgcctcagtcttccaagtaggtgggattacaggcgcccgccactacgcatggctaatttttgtgtttttagtagagactgggtttcaccatgttagtcaagctggtcttgaactcctgacctcaggtgatccctgcctcagcctcccaaagttctaggattacaggtgtgagccactgcacctgtttcatgttttaagacagagcccccccaccccgccctttttttcgtctgagacagggtcttgctctgttgctcaggctggagtgcagtggggggatcatgactcaacctcaacctcctgagctcaagtggtcctcctgcctcagcctcccaggtagctgggaccacaggtgtgcaccactgcacccaactaattttttttttttaattttttgtagagacagggtgtcactttgttgcccaggctggtctcgaactccagggctcaagtgatctttataggcatgcaccaccacacccagctgagcctttaaaaaaacaacaaccaaaaaaacaattttttttttttttgagctggagtcttgctctgttgcccaggctggagtgcagtggcaggatctcggctcactgcaagctccacytcccgggttcatgccattttcttgcctcagcctcccgagtagatggggtacaggcgcctgccaccgcgcccagctaattttttgtatttttagtagagacggggtttcactgtggtctcgatctcctgacctcgtgatccacctgcctcggcctccca

SEQ ID NO: 550829 - DNA, 854 bp, Homo sapiens
agacagagtcttgctctgtcacccaggctggagtgcagtggtgcgatctcggctcactgcaacctctgcttcccaggttcaagcgatttgcctgcctcagtcttccaagtaggtgggattacaggcgcccgccactacgcatggctaatttttgtgtttttagtagagactgggtttcaccatgttagtcaagctggtcttgaactcctgacctcaggtgatccctgcctcagcctcccaaagttctaggattacaggtgtgagccactgcacctgtttcatgttttaagacagagcccccccaccccgccctttttttcgtctgagacagggtcttgctctgttgctcaggctggagtgcagtggggggatcatgactcaacctcaacctcctgagctcaagtggtcctcctgcctcagcctcccaggtagctgggaccacaggtgtgcaccactgcacccaactaattttttttttttaattttttgtagagacagggtgtcactttgttgcccaggctggtctcgaactccagggctcaagtgatctttataggcatgcaccaccacacccagctgagcctttaaaaaaacaacaaccaaaaaaacaattttttttttttttgagctggagtcttgctctgttgcccaggctggagtgcagtggcaggatctcggctcactgcaagctccacttcccgggttcatgccattytcttgcctcagcctcccgagtagatggggtacaggcgcctgccaccgcgcccagctaattttttgtatttttagtagagacggggtttcactgtggtctcgatctcctgacctcgtgatccacctgcctcggcctccca

SEQ ID NO: 550830 - DNA, 854 bp, Homo sapiens
agacagagtcttgctctgtcacccaggctggagtgcagtggtgcgatctcggctcactgcaacctctgcttcccaggttcaagcgatttgcctgcctcagtcttccaagtaggtgggattacaggcgcccgccactacgcatggctaatttttgtgtttttagtagagactgggtttcaccatgttagtcaagctggtcttgaactcctgacctcaggtgatccctgcctcagcctcccaaagttctaggattacaggtgtgagccactgcacctgtttcatgttttaagacagagcccccccaccccgccctttttttcgtctgagacagggtcttgctctgttgctcaggctggagtgcagtggggggatcatgactcaacctcaacctcctgagctcaagtggtcctcctgcctcagcctcccaggtagctgggaccacaggtgtgcaccactgcacccaactaattttttttttttaattttttgtagagacagggtgtcactttgttgcccaggctggtctcgaactccagggctcaagtgatctttataggcatgcaccaccacacccagctgagcctttaaaaaaacaacaaccaaaaaaacaattttttttttttttgagctggagtcttgctctgttgcccaggctggagtgcagtggcaggatctcggctcactgcaagctccacttcccgggttcatgccattttcytgcctcagcctcccgagtagatggggtacaggcgcctgccaccgcgcccagctaattttttgtatttttagtagagacggggtttcactgtggtctcgatctcctgacctcgtgatccacctgcctcggcctccca

SEQ ID NO: 550831 - DNA, 854 bp, Homo sapiens
agacagagtcttgctctgtcacccaggctggagtgcagtggtgcgatctcggctcactgcaacctctgcttcccaggttcaagcgatttgcctgcctcagtcttccaagtaggtgggattacaggcgcccgccactacgcatggctaatttttgtgtttttagtagagactgggtttcaccatgttagtcaagctggtcttgaactcctgacctcaggtgatccctgcctcagcctcccaaagttctaggattacaggtgtgagccactgcacctgtttcatgttttaagacagagcccccccaccccgccctttttttcgtctgagacagggtcttgctctgttgctcaggctggagtgcagtggggggatcatgactcaacctcaacctcctgagctcaagtggtcctcctgcctcagcctcccaggtagctgggaccacaggtgtgcaccactgcacccaactaattttttttttttaattttttgtagagacagggtgtcactttgttgcccaggctggtctcgaactccagggctcaagtgatctttataggcatgcaccaccacacccagctgagcctttaaaaaaacaacaaccaaaaaaacaattttttttttttttgagctggagtcttgctctgttgcccaggctggagtgcagtggcaggatctcggctcactgcaagctccacttcccgggttcatgccattttcttgcctcagcctcccgagtagmtggggtacaggcgcctgccaccgcgcccagctaattttttgtatttttagtagagacggggtttcactgtggtctcgatctcctgacctcgtgatccacctgcctcggcctccca

SEQ ID NO: 550832 - DNA, 649 bp, Homo sapiens
gggaaagtttggatttcatggccctcttcaggcctaccaaatgaactctctctgtgggagggaatgtgaaatctgcattggaaataagttatccaggttgttctcatacccacacactatgcgtcagggactgcctggctgacattaacaatggcagctcaacgcctccatctggtggcttttggacaccatcgtcttctttttgcaaatacagtccatggagattasgaaactattgaaaatgtgaaaaatgagaaagaagtaaaaaaacaggatatgaatggagtctctactccacaaataatcaagactgaattacatcattttatggcatgtctagcacaaagtagaacttgtctatattacagttttgagagtaaatccaatggacacatttccattttcatctaagggcaggaaaacacaggtattggatgactccccctctacagatcattacaccaagtttctaacttctaagaatgctgcatttaatgaatttgtaaagttagtcttccagaagttagctaataaagaaccctctgctttccactaataaattaatatgggttttgattcccatttctccgatgattagtgatgtgaatcacttttttcatacacctgtgggacattggtatgtcttctt

SEQ ID NO: 550833 - DNA, 649 bp, Homo sapiens
gggaaagtttggatttcatggccctcttcaggcctaccaaatgaactctctctgtgggagggaatgtgaaatctgcattggaaataagttatccaggttgttctcatacccacacactatgcgtcagggactgcctggctgacattaacaatggcagctcaacgcctccatctggtggcttttggacaccatcgtcttctttttgcaaatacagtccatggagattacgaaactattgaaaatgtgaaaaatgagaaagaagtaaaaaaacaggatatgaatggagtctctactccacaaataatcaagactgaattacatcattttatggcatgtctagcacaaagtagaacttgtctatattacagttttgagagtaaatccaatggacacatttccattttcatctaagggcaggaaaacacaggtattggatgactccccctctacagatcattacaccaagtttctaactyctaagaatgctgcatttaatgaatttgtaaagttagtcttccagaagttagctaataaagaaccctctgctttccactaataaattaatatgggttttgattcccatttctccgatgattagtgatgtgaatcacttttttcatacacctgtgggacattggtatgtcttctt

SEQ ID NO: 550834 - DNA, 649 bp, Homo sapiens
gggaaagtttggatttcatggccctcttcaggcctaccaaatgaactctctctgtgggagggaatgtgaaatctgcattggaaataagttatccaggttgttctcatacccacacactatgcgtcagggactgcctggctgacattaacaatggcagctcaacgcctccatctggtggcttttggacaccatcgtcttctttttgcaaatacagtccatggagattacgaaactattgaaaatgtgaaaaatgagaaagaagtaaaaaaacaggatatgaatggagtctctactccacaaataatcaagactgaattacatcattttatggcatgtctagcacaaagtagaacttgtctatattacagttttgagagtaaatccaatggacacatttccattttcatctaagggcaggaaaacacaggtattggatgactccccctctacagatcattacaccaagtttctaacttctaagaatgctgcatttaatgaatttgtaaasttagtcttccagaagttagctaataaagaaccctctgctttccactaataaattaatatgggttttgattcccatttctccgatgattagtgatgtgaatcacttttttcatacacctgtgggacattggtatgtcttctt

SEQ ID NO: 550835 - DNA, 967 bp, Homo sapiens
cctcaacttggcgaagccactaagctctatttggttctcgcccaccccaacacacagtctcgatctggaaattgcctccaggcagagagctggggcaatgatagggctcccgtcatctgtttctcttctcttggggatcatgattctgtgcttcctgctgtccagtgtctgaaaacttgtttcacatatattttctccatttttttctacttatttatggcacgatgtgaaatctgttccttgttactccatcgcagccaaacgtggaagtttctgtccattctttttcacataacatctttaattttatataagagtctttctggagtagctggattttgtgggccttgagccagtgtaagagccttccttttcactgaattatgagttgaattgaattgaattgtcatcacaacaggaactgtgtagctgtttcttagaattcactgaagtgggaggcctgtgatgcacggatgccggtggttgaatctttcacatattttgcaatttggaagaagaagataatttgtacaaatcattcagctcttttatttaacaatttagtgtttgaagatcttttctttgaggcttatttttccagctgttttgttccacttttcatttgggttgaacacgttagagaactgctgtcatgtgtacctgtcttgctgtcaccgggctccttgtgtcagtgggctgtggcttttaagggcctcactgctggtctagaagcccccattcctgctctcttccctccagcatcttsatccggttttttgttgcctctacaaagttggaaagggtctctcatttcctggttatttcttctgatgatcttggtgtgcctccttcctgtgcagcatcagcatggacttctaggcttgccagtctccctgcccttggctttctgtctaggtctgtcttctcctagctgtgcctgggctggcatctgctggtcttgtcttgg

SEQ ID NO: 550836 - DNA, 561 bp, Homo sapiens
gcagatttgttttaagttttacatacctgaggcaggggtggaaacagttgactttctttgcatttccttcatatgctaattggtgacccgcaaatcttcttttgtgattatctgttcacttccttggtcctttgctgattttcctactgggttgctttaaaaggagtccttttttattttcggaagattaagcctttcgctgtcatatgcagttcawataactcttcctcatttgtcatttgtctaatgacagttatggtgggttttgccatacagaagtttttaatttctccatcttttatggtttctggttttcatgacatacttagaaaggctgtccccaccccaggattctttctcatacttttatggtttcattttttttacattaaatttctgagccatctggagtttattttggtgtggagagtgaggtaggaaatctagcttctttttccaaatggccagttattccaacatcatctcttgaatgatacacttttaatccacagattcaaaatgccaccttgatcacacactgcatttgaaactacactctat

SEQ ID NO: 550837 - DNA, 881 bp, Homo sapiens
gttattgcttcccagaggacggcatggttctcatcgcagagcggagcccaggccactgtcccagtggttgggtcttctggccgctttgctgggacctgggtgcagccctggggagggctggagtcctgcacacaggctctggaggcttcactggcttcccaaatggggttcacatccgctaatgactgccccggagagcggagagctgagggtggccctggggcagcagccatggtggccagagggtttatctgccaggcctctgtggtgggtgctctctccctgggtagactgggcctttccccccaccccctgctgccacccatatgaaagcagacataggcatcgcatgtccacacctgagccataaccggtccctgtaccaggctcttcagatattctggacgtgagcctcgtgagcagggagttgtccttgccccctggagtactttgctttctgtggaggtccctctggctgacttgccatgggctggggagccagggcgggattgcgtggggtgggagaggagccatcagtgggcctcatgtgccctcctgtcccgtcatctcttccctgggccccgtacatgtgtgaacggagaagccggcctcctgcttccaggggtgccaccgccactgccactgccgctgcagcaacctctgtttggcatccggcccgaaacaccccwgcctgctctccgtttccttctccaccccagcttgtgggaaaagacgaaggaggccccgggaagaggcccaggctgcagcactgcgtggcccaaagcagtgcacagcacagctgggccccagaggctgagggcctgcccttgctgctgtggggatttcctcctcggagtgagcaagcaagagaagtccctgca

SEQ ID NO: 550838 - DNA, 881 bp, Homo sapiens
gttattgcttcccagaggacggcatggttctcatcgcagagcggagcccaggccactgtcccagtggttgggtcttctggccgctttgctgggacctgggtgcagccctggggagggctggagtcctgcacacaggctctggaggcttcactggcttcccaaatggggttcacatccgctaatgactgccccggagagcggagagctgagggtggccctggggcagcagccatggtggccagagggtttatctgccaggcctctgtggtgggtgctctctccctgggtagactgggcctttccccccaccccctgctgccacccatatgaaagcagacataggcatcgcatgtccacacctgagccataaccggtccctgtaccaggctcttcagatattctggacgtgagcctcgtgagcagggagttgtccttgccccctggagtactttgctttctgtggaggtccctctggctgacttgccatgggctggggagccagggcgggattgcgtggggtgggagaggagccatcagtgggcctcatgtgccctcctgtcccgtcatctcttccctgggccccgtacatgtgtgaacggagaagccggcctcctgcttccaggggtgccaccgccactgccactgccgctgcagcaacctctgtttggcatccggcccgaaacaccccagcctgctctccgyttccttctccaccccagcttgtgggaaaagacgaaggaggccccgggaagaggcccaggctgcagcactgcgtggcccaaagcagtgcacagcacagctgggccccagaggctgagggcctgcccttgctgctgtggggatttcctcctcggagtgagcaagcaagagaagtccctgca

SEQ ID NO: 550839 - DNA, 544 bp, Homo sapiens
agtgcagagtcaaccctttatactaccagggagggaagaggagtgccgtggtgtcactgagtcagcaagaagggatgagatgtaaccctttggaagcagaattagaggaggtgactaccctacctccagactctgagaaacatggagtgtggagaatgaatctcttcacttgcctcccagaactggtacstaatcacaatgtattgattgggttaaggactgagtgaatagtcgagaggcctgcaggggaagctacattctccaggcagggaggaactgtagttggatttggacaaagaggtagaagtagtattcagagatgagatgggagtagaggaggcatttttctcctagagcaaggtgctggtgggccagtgggaggttttgaagatgtggagggggcacaggagtgctcagaggttccgtggaagttgaagaaatgcagagtagtaccacagagcacagtggagggctgaggtgggtcttgctgaggtttgagggagatgattaactgcaccctctcccttctcttggaaattcagag

SEQ ID NO: 550840 - DNA, 544 bp, Homo sapiens
agtgcagagtcaaccctttatactaccagggagggaagaggagtgccgtggtgtcactgagtcagcaagaagggatgagatgtaaccctttggaagcagaattagaggaggtgactaccctacctccagactctgagaaacatggagtgtggagaatgaatctcttcacttgcctcccagaactggtacctaatcacaatgtattgattgggttaaggactgagtgaatagtcgagaggcctgcaggggaagctacattctccaggcagggaggaacwgtagttggatttggacaaagaggtagaagtagtattcagagatgagatgggagtagaggaggcatttttctcctagagcaaggtgctggtgggccagtgggaggttttgaagatgtggagggggcacaggagtgctcagaggttccgtggaagttgaagaaatgcagagtagtaccacagagcacagtggagggctgaggtgggtcttgctgaggtttgagggagatgattaactgcaccctctcccttctcttggaaattcagag

SEQ ID NO: 550841 - DNA, 544 bp, Homo sapiens
agtgcagagtcaaccctttatactaccagggagggaagaggagtgccgtggtgtcactgagtcagcaagaagggatgagatgtaaccctttggaagcagaattagaggaggtgactaccctacctccagactctgagaaacatggagtgtggagaatgaatctcttcacttgcctcccagaactggtacctaatcacaatgtattgattgggttaaggactgagtgaatagtcgagaggcctgcaggggaagctacattctccaggcagggaggaactgtagttggatttggacaaagaggtagaagtagtattcagagatgagatgggagtagaggaggcatttttctcctagagcaaggtgctggtgggccagtggkaggttttgaagatgtggagggggcacaggagtgctcagaggttccgtggaagttgaagaaatgcagagtagtaccacagagcacagtggagggctgaggtgggtcttgctgaggtttgagggagatgattaactgcaccctctcccttctcttggaaattcagag

SEQ ID NO: 550842 - DNA, 511 bp, Homo sapiens
tctctttccagataaaatatatttacataaaatagtaagctcagtacaaaaaaaatacattatttttctaagagaaatgtctggtaggtctgctttttgaagggtctgttgctctagagacacgtgttgtttagtgttgacctgggcctgtgttcaggaaccccagtagcaatttcatgtgatgacaggataactaagacattttagatgctgaggagaaaataattctggatgmtcccacaatcatgaattgttttctccccattgttaacattatttgcccaaagaatgccttttacaacagaatttacaattcaagacctatattaggttgtgttctaaatgctgcttaaagagaaaagtgattttttcaaatatcaataagtgatacgtttttctgtccttgtaaattaccattctaaaatttgttgggatcatttactaaatagatttattcttttttttgttttgagatggaatcttgctctgtcccccaggttggagtgcagtg

SEQ ID NO: 550843 - DNA, 511 bp, Homo sapiens
tctctttccagataaaatatatttacataaaatagtaagctcagtacaaaaaaaatacattatttttctaagagaaatgtctggtaggtctgctttttgaagggtctgttgctctagagacacgtgttgtttagtgttgacctgggcctgtgttcaggaaccccagtagcaatttcatgtgatgacaggataactaagacattttagatgctgaggagaaaataattctggatgctcccacaatcatgaattgttttctccccattgttaacattatttgcccaaagaatgccttttacaacagaatttacaattcaagacctatattaggttgtgttctaaatgctgcttaaagagaaaagtgattttttcaaatatcaataagtgatacstttttctgtccttgtaaattaccattctaaaatttgttgggatcatttactaaatagatttattcttttttttgttttgagatggaatcttgctctgtcccccaggttggagtgcagtg

SEQ ID NO: 550844 - DNA, 511 bp, Homo sapiens
tctctttccagataaaatatatttacataaaatagtaagctcagtacaaaaaaaatacattatttttctaagagaaatgtctggtaggtctgctttttgaagggtctgttgctctagagacacgtgttgtttagtgttgacctgggcctgtgttcaggaaccccagtagcaatttcatgtgatgacaggataactaagacattttagatgctgaggagaaaataattctggatgctcccacaatcatgaattgttttctccccattgttaacattatttgcccaaagaatgccttttacaacagaatttacaattcaagacctatattaggttgtgttctaaatgctgcttaaagagaaaagtgattttttcaaatatcaataagtgatacgtttttctgtccttgtaaattaccattctaaaatttgttgggatcatttactaaatagattkattcttttttttgttttgagatggaatcttgctctgtcccccaggttggagtgcagtg

SEQ ID NO: 550845 - DNA, 641 bp, Homo sapiens
tttgccacggaatcatgcttatgatgctgagtcttgtttggtggttagcttgcgtttcttctgaaaagacattccacttggtgggaagagagcagcagtttttctttcaagatgcagtcggaggccctgactggtggggattcaggaagtgtgtgttagttggtcatcttgtcagtcatggtgacaaagtggctgtggtggggctactggagaccgggcagcrggggcatctgaagacaccactttgcagtgatgcagactgctccttacttgctgtgtcctatcaggcaagttactttgcctctctgagcctcagtttctttattcattaaattcaaatatgagccaggtatggtggcccacgcctgtaatcccaccgctttgggagggtgaggcagtaggatcgcttgagcttgggagtttgagaccagcaacataggaagaccccatctctacaaaaaataaaaaaattagctgggcatggtggtgcatgcctgtggtcccaggtactcaggaggccgaggtgggagatttgcttgagcccagaaggttgagactacggtgtgctgtgatcgtgcactccatcctgggggacagagtcaggccctgtctcagaaaaaaaaaaaaaaaagaaaagaaaa

SEQ ID NO: 550846 - DNA, 2297 bp, Homo sapiens
agaaagaaagaaagaaagaaagaaagaaagaaagaaagaaaaagaaagaaagagaaagaaagagaaagaactggaattctgcaaatacataaagatatgtggggtgggcacaacctggcctttgagcctygacctgtgcagatttcctatcatctcatcttcttctatcctataaaatccagttctgtgctcatccaaatgactctggctcttgttctcaaaccttctcccacccatgcttctttgccccttggagacagaggcagtcactcattccctcacatcccacctgtgcatccagaacatcttcctcctcagggtaatcacagggtaagattaattatgctaatcagcctctacaggctgacacaattaaccagagtatgagataacttcagaaatctatataggaggtatctacctgctgggttgaatttcaccattaagcacagtaattaaggggaggggtgggtgggaagtttgctcttttcaactaaagagtacatggtaccattctccaatagaagctgtatgaagttttccaggaagtgtttggccacttattgtcatctcttgggatctgctattgaacatctccttcttggggctaggcaccaatattgtagccagttctctcttcgtgatggaatcaaatgaggtgtttgtattttgatgcatttttaaatccttttctttcccctatttactcttctacacctttaaagtttttaatatttttatttattcaaaaataagaaaagttgcctctcagaataggagatttgaaaagaaaataagagaagttataaaagctttagattagacatccctcacatgtgtgttatgaagtgttaattctgaaagttgctttggggaataaaagtttgcaatccaaggtagagaaactctaatttcggtattcttcttttgaatttaatatctatagaatttaatgtatgaggagtgtattagtctgttctcttgctgctaatgaagacatacccgagactgggtagtttatgaaggaaagaggtttaatgggctcacagttccacatggctggaaaggcctcagaatcatggtggaaggcaaaggagaagcaaaggcacatcttacatggcagcaggcaagagagcttgtgcagaggaactgcccttcataaaaccaacagatctcatgagacttattcactaccacgagaagaaaatgagggaaactgctgccgtgattcaattatctccatatggccccatccttggcacatggggattgttacaattcaaggtgatatttgagatgggacacagccaaaccatatcaaagaatcatacattaaaggctctgaaaattctgtaacaaagaaaacatattaaccaaacacagttaatccaatattttccacatttattttactacacattgaactgtgttaaagtccttgtctcagagtctcatttcaggggcaaaaaaacaccgtaaatcttagttttcttgcccccaaaatgagacctgaagacaaggactttagcacagttagtttgctgagagaagatttcaagaaacagaagtgaggaagtgggaaaaatgaggcaggataggaggaaagacaatcaaagtgtattaatgaaatagttactgctgtggacaactggggttcagtcttgctggaaccctaaagatccatctagaatgcatcacagaattgtccttctggaggatagaaaggctgaggcatttatccacggactcacatatcttattgtttgtttttctgtgtatgtctgagttgatcagctgatggagagaaaacacaacacacccttaatatggggctgacagtgcagcatggaactgtccgccacagcagtcctgaaatatggaggactgaagggctgtgttgtggtcatcacaagttcttgctacattgtataacattttttaaatgttttaaaatgctaatttattaacatccaagcaaacttgcagtctatgtccatcatttaggaaacaccactctgttttaaattattcgagtttttctagatccgactctctcctttttcctcatgggaatataagcactgacaaatgctagtcagtagattaagaggagatgagtgtgtgttccttccaagctgaagtggaaaaagtctctgcacaactctccctctttgcttcccctgcagtgacaaccttggaatgcatcaattgaggtggccacaggaagaaagtagatcagatccctgagcaaacatgaaagagaatgccccagggagctacctgacctgcagtggact

SEQ ID NO: 550847 - DNA, 614 bp, Homo sapiens
agcattaaaaggctcggaagggagagagaaaaataattcttgatttgcatctcactcaccacttctcaggccccacgttgggtgccaaaaatgtcgcagggcttttccttagttcagctaaagatagggttttttgtcccatgatcatgaaaattcaggctcacaggcaatttgaatggtgggtaagacagggttttattgggtgaaaagggaagaaaaggggaaacagggactcttactgggccagagtctctgttagagcacttcctacctggccattcaaatcccagtttccacacagaaagaggaggggccaggcttctccctgctgcaaacagcacaaacttctgtggctcctcccagtgtgcaggccrgttggagaggctggagattattgagggacctcctctcacctggctgtctaactattattgccctcattttacagatgaagaaactgaggcagagagattaagtaatttgcccaagattatgaagctagtaaggatatagcagacctggaattcaaagtcaaatagtatggcttcagagtccctgcacttaactactatgttaattaagtaattcattgaattatttcttattacatgttg

SEQ ID NO: 550848 - DNA, 614 bp, Homo sapiens
agcattaaaaggctcggaagggagagagaaaaataattcttgatttgcatctcactcaccacttctcaggccccacgttgggtgccaaaaatgtcgcagggcttttccttagttcagctaaagatagggttttttgtcccatgatcatgaaaattcaggctcacaggcaatttgaatggtgggtaagacagggttttattgggtgaaaagggaagaaaaggggaaacagggactcttactgggccagagtctctgttagagcacttcctacctggccattcaaatcccagtttccacacagaaagaggaggggccaggcttctccctgctgcaaacagcacaaacttctgtggctcctcccagtgtgcaggccagttggagaggctggagattattgagggacctcctctcacctggctgtctmactattattgccctcattttacagatgaagaaactgaggcagagagattaagtaatttgcccaagattatgaagctagtaaggatatagcagacctggaattcaaagtcaaatagtatggcttcagagtccctgcacttaactactatgttaattaagtaattcattgaattatttcttattacatgttg

SEQ ID NO: 550849 - DNA, 1461 bp, Homo sapiens
tctgtactgaatgtgtacagactttcttttacttgccattattccctaaactgtacagtataacaactatttacatagcatttacattgcattaggtattataagcaatctagagatgatttaaagtatacgggaggatgtgcgtaggttatatgcaaatactataccattttaaatcacagacttgagcatctgaggatttgggtatcttcagagaatcccaaaatcaatcctccatatattgatcaacattttgagataagtactattgtgtgctccattgcagataaggaaactgaggcacagggaagtaaatgaacgtgcccaaaaccacacagctagaaagtaggggagacaagattcagaccatagccatttggcttcagagactctgatctctttcactgtaccaggatgccttcagcaggttgttgatacctctcaagagaaacacagaagggacactgtttccatctacagatgcagacctagcccaaggtcaccacttgtaagcaccaaagcaggatttgaacctggggtgaatgcaactccacagccaagggtgtttccactctgccaagctgctgctagcattactaccctaagacatcagaccaagtccttttttctggttacatttctgtcagtagacacacttcatttcttctcccacagcctctttcatttcatttgatgtcactcttcagccctcttataaagagcttgcaatctccagacagtggcttccttggatcatgcaaatattgcttattgcctttgaccttgctttgaagacttctttgtctacagtggatgtttagctctccttggggaagctatttaattcagaccttctcccctaaagaaacacgaatccctgaaagccgacactcagatttcctgttactgagttctataatccccaagtgattatttgcccttgagatttcgtagcaggcttaaccttgagctcagcagataaaagcctgccttttcccaagggaggtctgccctcagcagcaccttccacatgggaagagaggaggatcagccatgcttcttctccattggcagctggaaagtgggatgggttggmaagaacaggacagaaggtagttggtctccttaggacaaaacacctcagagcaggctcatggcagtgaaagatgacggcagtgaccaagctgatctgagactatgatgagccgagcattaactgattgacttttgacccatgttttacctaatatgtctttttcctcgttgaaatttagagctactgccatctttagaagcttttgatgaatatgcaggattgctggaagctaagcagcgtaattgaatttgcaactatttgctacaggactataatttaatgggagcataataatttactaaataccattacagtggcatcacatcctgttcatcaaaaaaatgaaaaagatatatgcagcaatg

SEQ ID NO: 550850 - DNA, 1461 bp, Homo sapiens
tctgtactgaatgtgtacagactttcttttacttgccattattccctaaactgtacagtataacaactatttacatagcatttacattgcattaggtattataagcaatctagagatgatttaaagtatacgggaggatgtgcgtaggttatatgcaaatactataccattttaaatcacagacttgagcatctgaggatttgggtatcttcagagaatcccaaaatcaatcctccatatattgatcaacattttgagataagtactattgtgtgctccattgcagataaggaaactgaggcacagggaagtaaatgaacgtgcccaaaaccacacagctagaaagtaggggagacaagattcagaccatagccatttggcttcagagactctgatctctttcactgtaccaggatgccttcagcaggttgttgatacctctcaagagaaacacagaagggacactgtttccatctacagatgcagacctagcccaaggtcaccacttgtaagcaccaaagcaggatttgaacctggggtgaatgcaactccacagccaagggtgtttccactctgccaagctgctgctagcattactaccctaagacatcagaccaagtccttttttctggttacatttctgtcagtagacacacttcatttcttctcccacagcctctttcatttcatttgatgtcactcttcagccctcttataaagagcttgcaatctccagacagtggcttccttggatcatgcaaatattgcttattgcctttgaccttgctttgaagacttctttgtctacagtggatgtttagctctccttggggaagctatttaattcagaccttctcccctaaagaaacacgaatccctgaaagccgacactcagatttcctgttactgagttctataatccccaagtgattatttgcccttgagatttcgtagcaggcttaaccttgagctcagcagataaaagcctgccttttcccaagggaggtctgccctcagcagcaccttccacatgggaagagaggaggatcagccatgcttcttctccattggcagctggaaagtgggatgggttggcaagaacaggacagaaggtagttggtctccttaggacaaaacacctcagagcaggctcatggcagtgaaagatgacggcartgaccaagctgatctgagactatgatgagccgagcattaactgattgacttttgacccatgttttacctaatatgtctttttcctcgttgaaatttagagctactgccatctttagaagcttttgatgaatatgcaggattgctggaagctaagcagcgtaattgaatttgcaactatttgctacaggactataatttaatgggagcataataatttactaaataccattacagtggcatcacatcctgttcatcaaaaaaatgaaaaagatatatgcagcaatg

SEQ ID NO: 550851 - DNA, 589 bp, Homo sapiens
ttgcattgtaaaaattttggattaatattttgtttatcttttggtgtagaactgtgctaaaggacacggattctatactactggaagaagttcaaggttcttgttttaggaggacatggacagctgtagggatgttaactgggtcatgttcaccagtaggtggggacattgcactttagaaattcaaggkagctgccgctttcccttttttccttgccccttggcaggtctggatttgaggggtcaggattccttgagggtggtaacacagccactcttatttcccgtactcttccttccatgtgctcagaatatgatgcaatctgagatgcagttttggatgtttgagaagcaaagaagcatggctggagcaggagttaaagtctgcttttgtttgagaactgaggagctcagtcttttacatgctctcacaggtaagagattggtactataaaattacatgcttaaaacaaacttcactgctgtcattctagtgcaagccactatcctttttcacattgaacattccgccaccatctgcagcattcttgatatttcagtaagaatgatattttactttacaattact

SEQ ID NO: 550852 - DNA, 1581 bp, Homo sapiens
tagagggaggctggccctctttctttggggggactgttcagttgcgcctgaagcctgctttctttccgagtgctgcaaggtaattaaatagttggttaatcactttyaacgccaaacagctgcggctccatctacagtgtgctggaatctgggctagacccagatgaacccagcctcgatttgggggctccagcaggactcacagcacggtggttggtggtggtgggggcaggggggtggttgcatgacatctggacccaagaggcagctgttgtggcagcaagagagaggagagagatgaggccccgttcctatatggctctgctcccagggtcccacatcctctgttaaatgagggacttggggtggggggggcggtccttccatcccctagggctggggcgcctagctgcccagccattgatcaggccagctttctggaaccaaccacccaaagcaccatggggctgtggttccgaggcctgccctggaagtcctgtggagtctgcccgcagggatgtgcaggagctgtattgtagatgtctcctgccatcagctgtcaggttattttggtccaaactgaaaatactccaggaattgtgtgtggagtacccccagcctgcagcagtcagggaggccggttgtgtctaagggcagcttctggagaagcaaggagttttctgtggtgagcctgcctctctagctccccagggcctacgtgagctggggtgccttccttttggtatccggcagagtggccttggctatggaagtgctaagggcatccagggccctgctgctgctcagggagcttggcactgatatgggatacccccagcagcactgctgggacctcccctagcttcccccccttcctccagggccttggcttctggctagtcaggggcactatgtggggacagttatgtggccccgggcagagagaggtcccgccgtctgtttgctgaaggaggaaaaacaacactcggactattgattcagtctcaccttggcgctcctggctcagcagccagtgtttgccctggctgcctgggctcggattacgcaaggctggtgggcgtggagcaagcaagggggcagctgggggcctccaggcccaggcagggcagggcttggcggccccagcgttccccaggaaactgtaaaaacgagtctggggccctgactttgctgatagcggccatctcagccatagagggaggtgaagcctctgtgatctccacccccgcaccccctcaggacatggcccctaaaagcaccatcccatttagggtcacccattttcttcctaggagctgtggggctttgcgaataactccctatggctgaatctgctttgctgaactaggaaaccctagtgagttgtatagatgccattcatttaagaaccttgaaaagccaacatcttattcccatgtaaaacatacctaggtgatttggagaatacagtgacacaaagaagaaaataacaattacttgtaattctcaccatcttgagagaaccaccgttaacattttttagcgtgtgtatccttccagatttcgctttagtttgtataa

SEQ ID NO: 550853 - DNA, 1649 bp, Homo sapiens
cgctctaagattaaaaatgccctagcccacttcttaccacaaggcacacctacaccccttatccccatactagttattatcgaaaccatcagcctacycattcaaccaatagccctggccgtacgcctaaccgctaacattactgcaggccacctactcatgcacctaattggaagcgccaccctagcaatatcaaccattaaccttccctctacacttatcatcttcacaattctaattctactgactatcctagaaatcgctgtcgccttaatccaagcctacgttttcacacttctagtaagcctctacctgcacgacaacacataatgacccaccaatcacatgcctatcatatagtaaaacccagcccatgacccctaacaggggccctctcagccctcctaatgacctccggcctagccatgtgatttcacttccactccataacgctcctcatactaggcctactaaccaacacactaaccatataccaatgatggcgcgatgtaacacgagaaagcacataccaaggccaccacacaccacctgtccaaaaaggccttcgatacgggataatcctatttattacctcagaaatttttttcttcgcaggatttttctgagccttttaccactccagcctagcccctaccccccaattaggagggcactggcccccaacaggcatcaccccgctaaatcccctagaagtcccactcctaaacacatccgtattactcgcatcaggagtatcaatcacctgagctcaccatagtctaatagaaaacaaccgaaaccaaataattcaagcactgcttattacaattttactgggtctctattttaccctcctacaagcctcagagtacttcgagtctcccttcaccatttccgacggcatctacggctcaacattttttgtagccacaggcttccacggacttcacgtcattattggctcaactttcctcactatctgcttcatccgccaactaatatttcactttacatccaaacatcactttggcttcgaagccgccgcctgatactggcattttgtagatgtggtttgactatttctgtatgtctccatctattgatgagggtcttactcttttagtataaatagtaccgttaacttccaattaactagttttgacaacattcaaaaaagagtaataaacttcgccttaattttaataatcaacaccctcctagccttactactaataattattacattttgactaccacaactcaacggctacatagaaaaatccaccccttacgagtgcggcttcgaccctatatcccccgcccgcgtccctttctccataaaattcttcttagtagctattaccttcttattatttgatctagaaattgccctccttttacccctaccatgagccctacaaacaactaacctgccactaatagttatgtcatccctcttattaatcatcatcctagccctaagtctggcctatgagtgactacaaaaaggattagactgaaccgaattggtatatagtttaaacaaaacgaatgatttcgactcattaaattatgataatcatatttaccaaatgcccctcatttacataaatattatactagcatttaccatctcacttctaggaata

SEQ ID NO: 550854 - DNA, 526 bp, Homo sapiens
aatgggcatgagccagagttactccaatgatggaggagccaacggtggttggaggcagaggagaagcacatggaagaggacagagcctaggaaaccgcaggagacaagtgacagccctgaccaatctcccctaagctggttctgcctctggagttctcagttatggcaaacttccagtatattccctcacctgcataagccagtttgtagagtctgcttctcacaaccaaaggcacaaaggcatcctaactgatacaggcactttgagatctgggatcctcccttacttgcaaaatggttctgaagataaactgattttgagtcttatctcagctttgccatttacaacygtaacctaaccatccctcctcgcctcactcccatgtggctcacctataaaatgaggatcataatcctaatgcacagaggtgttgcatgaattacgtaaagcaataaatgctatcgtacctacacattaaagtacctagacattggccgggtgcagtggcttacacctgtaatccta

SEQ ID NO: 550855 - DNA, 535 bp, Homo sapiens
cggcctcccaaagtgctgagattacaggcatgagccaccgcgcccggccaaatgtcttaagaccactagtctagccagtggagaacatggccagagagtccactgttgattggctggagcactagggcgctagagacagaggagctgtgctcccttgagttgcacatggttctgttgggaaggttaaaattrggacaagtctgttccccatccaactccaataggatattcaggaggacattactatagcagcgtctcaacaaaggggcaagtccagagagcaccgtccaaatctcatgtccaagggccaagaaaattcaagtgggaacaatctttgagggtttcagggaactagttaatttgggtctgagttttcagacaaggaaaaaattcctatctgggcctctagctcatcatctatacatgaggtggataagatgatccccaaggttttgactaattctaacgttgtatccatcctattatagtagctatcacttaccgagtgattattatgtgctagacagtacattaa

SEQ ID NO: 550856 - DNA, 630 bp, Homo sapiens
aaagatttttaaacttttctttgacttttcctctgacctaggcagtatttagaagtgtgtttttaaatttccaagtgtttcatggacacaggaaggggaacatcacactctggggactgttgtggggtggggggaggggggagggatagcattgggagatatacctaatgctagatgacgagttagtgggtgcagcgcaccagcatggcacatgtatacatatgtaactaacctgcacattgtgcacatgtaccctaaaacttaaagtataataataaaaaaaagaaaaataaataaattttaaaaaataaaaaaataaatttccaagtgttcaaaagtatttctggtttkttttttttttttttttttgctattcatttctattttagttccattactaccaaagaaaatactatgtatcattttgattaatttatacttgtgatttgtttaatggccaagaatatgatctgtcttgctgaatgtcccacatgcacttgaaaaaactgagcattctgctgtattatatagaatgttcaagagatatcaatttgattccatttgaagatgctgttattcaatcttctatataattgctgattttctgtctaccagtccatctattatttt

SEQ ID NO: 550857 - DNA, 1256 bp, Homo sapiens
gacagatgagtctcatgaatcctcatcaggaattcagagggctgtttagcagttccacacccagatcaccaggtagaacacttctrcctaatgaaggtcactgagcccaccttcccatggctgttcttactaatgagatctggaggctacacctggcagtgctctgcggccaaaaggttgtgtggattacagaactctgcttgcaaatgaatgtttggtgatccctcccttgaatcaggcagcagttactcccttgtagtaactccttatttaaataaacttggaaaaagtgacaactccaatcaaacttacagcagactttttgccccctccccttggaaaggctgaagtgacatggtggtttctaaggtaaccaacaatagacatcatgattattaagtggcacagtgagcagaaatggcatgctgggccactgcaaggccacccatcagccttggatgggagcaatagtttttcctccaaggcctccttttgttctactttcctccccatcagttataaagcaaggtaattctagccagatgattcccaaataggaggtgctgctctccttgttgctttctggttggattaattttgtttacgcaggttgagaatggagggaaatttttcacactgcagaatggtccctgccttcctgtaagacagaaatgctgagaaagttgaaaccagggaaaggctgaagggcttacaatgcattcgcccacctctgcatcccgataacccagccctgcctgccccaaatgcccagtcttacttgcagtgtagaccactgccttgtctttcagattaagtctgcatgtggctccagtgagacaatttattgtgttcaacttcaatctccccagggtgttgtacctcctgttctgccacttcctgtcttgtgtcctacttcccattctatgttccattttttgttctatgctccactttctgttctgtgttccacttcctgttctaagtatgccccactttgtgttctgtgttccacttcctgttctgagtaagtcccacttcctgttctatgttccactttttgttctatgctccacttcctgttctgtgttccacttcctattctgagtatgccccacttcgtgttctgtatcccctttcatgtcctatgacccacttcctgtcctgtgtcccacttcctgttctgaattatcccttcctgttctggacccttctgcttcagtaggcacttgagtattgggagtgcgcaaggacgtgtc

SEQ ID NO: 550858 - DNA, 1256 bp, Homo sapiens
gacagatgagtctcatgaatcctcatcaggaattcagagggctgtttagcagttccacacccagatcaccaggtagaacacttctgcctaatgaaggtcactgagcccaccttcccatggctgttcttactaatgagatctggaggctacacctggcagtgctctgcggccaaaaggttgtgtggattacagaactctgcttgcaaatgaatgtttggtgatccctcccttgaatcaggcagcagttactcccttgtagtaactccttatttaaataaacttggaaaaagtgacaactccaatcaaacttacagcagactttttgccccctccccttggaaaggctgaagtgacatggtggtttctaaggtaaccaacaatagacatcatgattattaagtggcacagtgagcagaaatggcatgcygggccactgcaaggccacccatcagccttggatgggagcaatagtttttcctccaaggcctccttttgttctactttcctccccatcagttataaagcaaggtaattctagccagatgattcccaaataggaggtgctgctctccttgttgctttctggttggattaattttgtttacgcaggttgagaatggagggaaatttttcacactgcagaatggtccctgccttcctgtaagacagaaatgctgagaaagttgaaaccagggaaaggctgaagggcttacaatgcattcgcccacctctgcatcccgataacccagccctgcctgccccaaatgcccagtcttacttgcagtgtagaccactgccttgtctttcagattaagtctgcatgtggctccagtgagacaatttattgtgttcaacttcaatctccccagggtgttgtacctcctgttctgccacttcctgtcttgtgtcctacttcccattctatgttccattttttgttctatgctccactttctgttctgtgttccacttcctgttctaagtatgccccactttgtgttctgtgttccacttcctgttctgagtaagtcccacttcctgttctatgttccactttttgttctatgctccacttcctgttctgtgttccacttcctattctgagtatgccccacttcgtgttctgtatcccctttcatgtcctatgacccacttcctgtcctgtgtcccacttcctgttctgaattatcccttcctgttctggacccttctgcttcagtaggcacttgagtattgggagtgcgcaaggacgtgtc

SEQ ID NO: 550859 - DNA, 1256 bp, Homo sapiens
gacagatgagtctcatgaatcctcatcaggaattcagagggctgtttagcagttccacacccagatcaccaggtagaacacttctgcctaatgaaggtcactgagcccaccttcccatggctgttcttactaatgagatctggaggctacacctggcagtgctctgcggccaaaaggttgtgtggattacagaactctgcttgcaaatgaatgtttggtgatccctcccttgaatcaggcagcagttactcccttgtagtaactccttatttaaataaacttggaaaaagtgacaactccaatcaaacttacagcagactttttgccccctccccttggaaaggctgaagtgacatggtggtttctaaggtaaccaacaatagacatcatgattattaagtggcacagtgagcagaaatggcatgctgggccactgcaaggccacccatcagccttggatgggagcaatagtttttcctccaaggcctccttttgttctactttcctccccatcagttataaagcaaggtaattctagccagatgattcccaaataggaggtgctgctctccttgttgctttctggttggattaattttgtttacgcaggttgagaatggagggaaatttttcacactgcagaatggtccctgccttcctgtaagacagaaatgctgagaaagttgaaaccagggaaaggctgaagggcttacaatgcattcgcccacctctgcatcccgataacccagccctgcctgccccaaatgcccagtcttacttgcagtgtagaccactgccttgtctttcagattaagtctgcatgtggctccagtgagacaatttattgtgttcaacttcaatctccccagggtgttgtacctcctgttctgccacttcctgtcttgtgtcctacttcccattctatgttccattttttgttctatgctccactttctgttctgtgttccacttcctgttctaagtatgccccactttgtgttctgtgttccacttcctgttctgwgtaagtcccacttcctgttctatgttccactttttgttctatgctccacttcctgttctgtgttccacttcctattctgagtatgccccacttcgtgttctgtatcccctttcatgtcctatgacccacttcctgtcctgtgtcccacttcctgttctgaattatcccttcctgttctggacccttctgcttcagtaggcacttgagtattgggagtgcgcaaggacgtgtc

SEQ ID NO: 550860 - DNA, 1256 bp, Homo sapiens
gacagatgagtctcatgaatcctcatcaggaattcagagggctgtttagcagttccacacccagatcaccaggtagaacacttctgcctaatgaaggtcactgagcccaccttcccatggctgttcttactaatgagatctggaggctacacctggcagtgctctgcggccaaaaggttgtgtggattacagaactctgcttgcaaatgaatgtttggtgatccctcccttgaatcaggcagcagttactcccttgtagtaactccttatttaaataaacttggaaaaagtgacaactccaatcaaacttacagcagactttttgccccctccccttggaaaggctgaagtgacatggtggtttctaaggtaaccaacaatagacatcatgattattaagtggcacagtgagcagaaatggcatgctgggccactgcaaggccacccatcagccttggatgggagcaatagtttttcctccaaggcctccttttgttctactttcctccccatcagttataaagcaaggtaattctagccagatgattcccaaataggaggtgctgctctccttgttgctttctggttggattaattttgtttacgcaggttgagaatggagggaaatttttcacactgcagaatggtccctgccttcctgtaagacagaaatgctgagaaagttgaaaccagggaaaggctgaagggcttacaatgcattcgcccacctctgcatcccgataacccagccctgcctgccccaaatgcccagtcttacttgcagtgtagaccactgccttgtctttcagattaagtctgcatgtggctccagtgagacaatttattgtgttcaacttcaatctccccagggtgttgtacctcctgttctgccacttcctgtcttgtgtcctacttcccattctatgttccattttttgttctatgctccactttctgttctgtgttccacttcctgttctaagtatgccccactttgtgttctgtgttccacttcctgttctgastaagtcccacttcctgttctatgttccactttttgttctatgctccacttcctgttctgtgttccacttcctattctgagtatgccccacttcgtgttctgtatcccctttcatgtcctatgacccacttcctgtcctgtgtcccacttcctgttctgaattatcccttcctgttctggacccttctgcttcagtaggcacttgagtattgggagtgcgcaaggacgtgtc

SEQ ID NO: 550861 - DNA, 818 bp, Homo sapiens
cgtgccactgaactccagactgggaaacagagcgagacaccgcctcaaaaaaaaaaagaaaaaaaaatctattctgcttccataaagctaacctaaatcttctatagttttgtttacttatgtctacttcctgttctttccttaacagacaggatatttaataaccatgatttgcagaatattcttttctatatgtagaaaccagtttttggatgtgactgccwctcacctagaaatgttttcttagatttctttttgtcactcagtattcattcattcgacaaatatttatggagtacttattatatacaaaagtattatgttgtccgggttgctgagacaaaactgacatggaccttgactatgaggagcatacaacctagtacagaaagatacagccttgctcacaactacagagcaatgtaaacagtagtgtgccatatgagaggtacagattaaaggagtcaagtatttcaagcagagggcgagaacctccagccgggggtgaactggaccagcttcatgaaggatgtggcatttgagctctctaaccctttgttcatctttgtggctatttagactcccccaaagcaacctaaaaatccaacgagtgagcaaccgtaaactgtgaaattcgcttaatggaatatatagtcattaaactgtttacaaagtctgaagcaacatagaaaatgcttacatttatggtgttaagtggaaaagagcagaatattatatatagtatgcttgccacgaataaaacaaaccaacaataaaacctacatgcaaggaaacacagggaaggaaatacaccaaaa

SEQ ID NO: 550862 - DNA, 559 bp, Homo sapiens
aaatgaatccatgactatcataatgacctaattttaacacatagtggttttctgaagtccttccaagtctagacacttcattctaatacaacaatactcagtatgtggaatgaataaataacaacattttcatactaaaggcctctatgttcctctgagaaacattttggagagggtaaaattaatcttggctacttatctctgggtttgttgcagttgctcttggctcccctagccctataaaaccctatcaaagcctgacgatcacgtaaagcattcttcctctctcctgccttctcaagtgaaagacccattccctsattggatctactcatcattactggatcaaatatactcttagtattgttcccactgaaaaaaagaatgccaacctttttcttcccctgtcgcacaagcccacctgccctccaattaagagtaattgcaacaaagattcttatattctctattttgatatcagatatttatcagaaaggtgtggctttaatgaagtcactcttaccttatgtttctggcataatcaacagtaatagctagc

SEQ ID NO: 550863 - DNA, 612 bp, Homo sapiens
gatgtccccaactacagccttgatgctgcttgcccataagtctgcaccactggtactacaacctcacctgcttttctgtgccatctttctccaactgcctaccggactctgcagaatcatggaatttcgagggtggaaagggatccaaagttcaaccagccaatcccctatgactacttgaccatgcaagctttggaaaattgatggaattacgttgcatttttacaatttttgcttaaaaggactgtaagtcctaatgatgtctatttccctgccttcacttttagactcctcctaaattccacctgcaccagaggactcacctgaacctccccaaagtgctgtcagagagcccctgaggggcatgtgctatctcagcaaagtcagtagatcccagttgatctcatggtctaaacacatatccaaacagccctatgccccctactttycacaccctgatttcttttctagaatataaggcttgattatttccttagttatccatgagcaaaccaatgaatcctactgattttccatccattttccccttcctcattttacatacttggccctcttgagagatcaggaggttttctggtggttacttaattc

SEQ ID NO: 550864 - DNA, 721 bp, Homo sapiens
ggtggacttggtggagagcaattaagaggaggctggaggctctagaatacaagcaaaatggcagaacagcctgaagataaatagggaaagagatggctaaaaagagtcctcctgggactctttakgggagtcaagaaagctatgcatatgtgctaggccacaaccactcaggcgcatgcagaacagaaagtgggggaagaaatgaaagcatatcacaagctggacagaccatcaacacaggtcacatgactcactggcgcaaggggcttaaatgtaacctctaacaaattgttgaacaaaaagttgctctggtccaggggcaattcctaggaaaccaagctaaaaataaaatcaggttcatacatggcagtctggacaaccgtgtgcatgcccaaggctgcacgctctcatgtgcaatcacggagggagtttccaatacactagtctctggctgaatgtgggtcaaagaaatgcaaatatcctgaactgcgatggcagctcccaagccacacatatatccaatagtgtaaaaatataactgggtaaggtgtcataagcacaagtttttaccactaggtggcttattcaagcccgggggcatcccagttcagtcagaagggaaaaaacaaacaaacaaaaaaaccaaaaccaaaacaaaaaaccaagataaaaaaatctgaacagggacattagaagataaacaatttggagaaaacaaaag

SEQ ID NO: 550865 - DNA, 1456 bp, Homo sapiens
attcgacgatcctggcattttctacagcgacagcttcgggggcgacgcccaggccgacgaggggcaggcccgcaaatcgcagctgcagaggcgcttcaaggagttcctgcggcagtaccgagtgggcaccgaccgcacgggcttcaccttcaaatacaggtgcggctcctgcggggccgggggctcgagttccagtgtggccgctcacacgcstctaccagcctgctagagtcctggacagtcagggcacagatgggcccagacgggggaaagagccggtcctgggtcacagggctcatcccggcagcctcacgccttggtataaggctttgtgtattttgttttactttattttattttattttattattaacgtatttgtttattattttgagacggagtctcgctctgtcgccaggctggagtgcagtggcacgatctcggctcactgcaacctccgcttcccgggttcaagcgattcttgtgcctcagcctcccgagtaggtgggactacccccgccatcaccacgcccggataattttttgtaattttagtagagatggggtttcgccatgttcgccaggctgctctcgaactcctgacctcaagtgatccacccgcctcagtctcccaaagtgctgggattacaggcgtgagccaccgtgcccggcctgctttgtgtattttatctgtacctggagttaacttctgggtgagtcacctgttgagtgggccaccagcaaccagctagcgccacttggaccgtttagttctttatccagatcttgttcctgttcatctgcttcctatcatccttccatgtcatgtctgagaccttacaaactcaagttccctgtaggtgtaaaaggtgaagatggcagttaggattcacttcacttcgctcattcatttatttataccagtcttgcaccttcattgattgagcacctgctgcctgccagatactgttctgggtgctgggctgcagcactgaagctggacctggctcctgcttctaggtgattgtacgacctgtgacatcatgagaattctcataggcccggcctctatccctgaaatgttaaaatgcagagaacatgaggttgcaggttcagcactggcccattattagctgagtgacttccaggtgtcagtgtctctgggcctcaccaggccagaaatgggtaaagccattcctgctttcacttactcatgcagcagctgatattgcccacctgtgtgccaggcactgcgctacaaagatgaaaagacgtgcttcttgtcctagagaagctcctaagtcagaggagtgagtcgtgaagaccaacagataacttccacggtggtcatttcctccacagaggaaggtgaaaggacttagggaagttttccggggggctgaagtttgaggggacctttgagctaaggtcagagttgcaggtgtagaaagctttc

SEQ ID NO: 550866 - DNA, 1456 bp, Homo sapiens
attcgacgatcctggcattttctacagcgacagcttcgggggcgacgcccaggccgacgaggggcaggcccgcaaatcgcagctgcagaggcgcttcaaggagttcctgcggcagtaccgagtgggcaccgaccgcacgggcttcaccttcaaatacaggtgcggctcctgcggggccgggggctcgagttccagtgtggccgctcacacgcctctaccagcctgctagagtcctggacagtcagggcacagatgggcccagacgggggaaagagccggtcctgggtcacagggctcatcccggcagcctcacgccttggtataaggctttgtgtatttygttttactttattttattttattttattattaacgtatttgtttattattttgagacggagtctcgctctgtcgccaggctggagtgcagtggcacgatctcggctcactgcaacctccgcttcccgggttcaagcgattcttgtgcctcagcctcccgagtaggtgggactacccccgccatcaccacgcccggataattttttgtaattttagtagagatggggtttcgccatgttcgccaggctgctctcgaactcctgacctcaagtgatccacccgcctcagtctcccaaagtgctgggattacaggcgtgagccaccgtgcccggcctgctttgtgtattttatctgtacctggagttaacttctgggtgagtcacctgttgagtgggccaccagcaaccagctagcgccacttggaccgtttagttctttatccagatcttgttcctgttcatctgcttcctatcatccttccatgtcatgtctgagaccttacaaactcaagttccctgtaggtgtaaaaggtgaagatggcagttaggattcacttcacttcgctcattcatttatttataccagtcttgcaccttcattgattgagcacctgctgcctgccagatactgttctgggtgctgggctgcagcactgaagctggacctggctcctgcttctaggtgattgtacgacctgtgacatcatgagaattctcataggcccggcctctatccctgaaatgttaaaatgcagagaacatgaggttgcaggttcagcactggcccattattagctgagtgacttccaggtgtcagtgtctctgggcctcaccaggccagaaatgggtaaagccattcctgctttcacttactcatgcagcagctgatattgcccacctgtgtgccaggcactgcgctacaaagatgaaaagacgtgcttcttgtcctagagaagctcctaagtcagaggagtgagtcgtgaagaccaacagataacttccacggtggtcatttcctccacagaggaaggtgaaaggacttagggaagttttccggggggctgaagtttgaggggacctttgagctaaggtcagagttgcaggtgtagaaagctttc

SEQ ID NO: 550867 - DNA, 1343 bp, Homo sapiens
acacctgcttctctcttttaatccaagtagctaattggattctttaccaagagacagtgatagccaccatttcagtgaaatagctatgtttctgtagctaggtaaagtcttggtagggagggagatatggtagctattatgtgatagagttggaatcaagtccagatcttcttactccaaataccgtggtcttctaactttagaatagttgaagaatttcatcagtagtgacaaagaaaatcctgtgtctatctgtaggaggatttacttaatttgttttatcaaaaaatgtatttgatcttccttaggtgaatcagtcacctgggcctcatttcctctgcttctgtttcctacaattctacaccatgtggtgagaaattgtctcattattcctcaatgctccagtgaggaatcctaagtaaaacagccctcattgtatagataaggggaccgaggcttggagaatgttagtaactttccataattacatagctagtaggtggtagaacctgmataattgttgaaaggatcttggaggagaaagatttatgacaattcttatttactcaatgaagacttctttgaaaagctttgcactgactattatagtaaatatggtcttgagtaattaaatctataattctattttccttcacggtatcacattccttcctcttcaaagatgcttctcatagctgttataattgaataggattagagaaacataacaaatggaaaattttcctttcatgagctctggggactatccacctaaaatgtgtcttccagataagacgatgtcatgcagattagacatatccttagagaatgataacacgtttactgcgagtgagtcaccttcctttgggatgtcagaattaggcaatatcaaatctaataaacatcgataggctggaaagaattctaatgtattcaacaaggtcaaagaaattcagtgtctaaggcaagggcagtagtaacttgaatctatttctcctctacctgaccttgaaactcattttcaacccatgacttcaaaaatattaggaaacaggaaataataagttatactgttaggaaataagtctccctaactgattggataagatatttctctggcacttaaatcagagtacgtgacttcttccttaattcctatttgagaaagtgccatagtaaacacacccatgtcactggagatacacacaattctgcttgatggtgacagtatacttgtgatgggatttattataagtagattagttctaggagcttagttcttggctttggctatgtggccttgtggatgcaattttcattctctgttccaaggacttgtgttt

SEQ ID NO: 550868 - DNA, 2305 bp, Homo sapiens
ggagcccttattccctgtgtgcaggtaggtctcagcatgctacggagcccttaaattgctctgtgtcccgagtggatgatggtcctccgacatcttggacctaagttcactattcaggcctcccaggattatcatcagcacatccaaacaagacacgcactccagatccagagtcagcaaagaccatgaacgcaacctctctctcccacccaggctaagggggatcaaagagggctatcgctgggaggacgggagggcgggtgttatcaccaaaggcttcaaagagagagaacaggggagaaaagcagagaacagcaaaccaggaaacatgkaagtttccctgcttttaaatctaggcatctggcgtgcttgcccccaatcccatcactcgcctcttcctgagcctactcaacaagtgttactattgataaggaaaatgatacattcacactttaaataataactgaaatttgtatttattgtcaaggcagttttacactcacgatcgcattgacctgtcataacacaccagaggacgggtaccaccctcattccaatcgcacaaatgagaaactgaggcttggatacatcatccagtggtttgctctgtgtcatccaggtggtagctggaattagaaccccagttttgcaggctgcgtatggtggctcatgtctgtaatcccagtactttgggaggctgaggtgggtggatcacctgaggtcaggagttcaagaccagcatggtgaaactccatctctactaaaaatacaaaaattagccaggcatggtggtatgtgcctgtaatcccagctactcgggaagatgaggcacgagagtcgcttgaacctgggaggtggaggttgcagtaagctgagattgcgccactgcactccaggctgggtgacagagtgagactccctctcaaaaaaaaaaaaaaaaaaaaaaaacaggttagtgacacctgacccggcgccctttccccagcaggctgtagccacatagcccactcagtgccatctgcaaaaaacaggctgtgccccactgaaagcaggctctgccccgcagcccccccccggaaaatcactggatgcccctggccagccactgcggaccaacgtgcagcttcctcgtatggatcccctctttgttcacaagttactccattaaagggaaaggttagataaatgctgtgctttgagtcaatggagccaatctttcttttcccactggctctgagctttgccgcttgccccatgagtgctctaaacgccttttactacttcataatcacccgcattgtgctccatgctcaccttgttatttaaactcccataaaaggtaaaattaaaaaaagttaatagcctaaaacttgcttcttcgaacaacctaagaggacattttactcataaatgtaagcaaggaaacaggattccatttctctggttatgagacaaataaatatcttcccaaggctccaaagccatagtacccagcgacagcctgctcaccgcctcgtgctcagtggctctggggagagccccctgcgccttggactccagtgccctcacagcccctggaaaccctgctcttctgggagcgaggacagcataatggggacagtgatggattccagcgtccccacctcctgcccttctgaggacacagcaagcctttcactctccaaccagagagcacagactgagtgcctgtgatgtggcagacctaggaacagacatgcagagccaggaatcccattcccatcctcccgaaccgcacaggtgacgaggcaggtgaacagagagaaaatacagcacgttcagtgactgtggaggaaggagagggtgttacagggctcagacaaagacactcaactcagctgagcattcacagaaagcttccaggaggagacagttcatcccgagaaatgaacagaattttgccaggtgaagaaaagcagagaatcccagaccaaaagaagagcgtggccaaaactggggagaagcaggaaagacagtcggtttggaggtggagagcagtacatggctgaagcaagagagccaagaagcagcttgagggggagtggacagcaggcctcttggatagcgaaggtcggtgattccccgccaggcctggagacttctctgctcctcccatcgcatgcagggagcagcatggagcagatctgatcacgggtgagactgtgaacgtcacctgatgggaaacccaaatgcaccctccctgcttttcccccacaacgtggggatggatgcaaatggacaaaagtgggtgtctcccccaggagtg

SEQ ID NO: 550869 - DNA, 963 bp, Homo sapiens
ggccacagaggaagcacgctccctgctcccactttgcccctcgtacccgcctgagggcatcttaattaagccttccttccccacgctcagaaaaataaatacttgggagacagcagagacattttcacagggtgtgttttcatttgcctttggcactaatgggtctctggaacgttccatcctggccggggaggtcagggcctgggcggccagggcccatttcgagaaagcaggttttcctttgtggcatgcttatttcaagcaccattttccctcctggttatacttgaaatggggctcggtgttgggaggtttcaaatgtggacattccgggcaaggggcctcatgaactctgtggacattctgggcaaggggcctcatgaactctgaaggttgagcttggaaggacggacacaggtcttggcagcctgagtgggtacaaacgctgatttttctggagtcagtcctctcctgctgatgggctgagagagccccccaggccctgtgtcccttctcagaggacctcagccccccagtgcctgggccacggatgggctgggggctggggcccagggcctcgcatcctacaagggcccaagggctgaaatggggctggggtccctggatctaggggatgagggcccagaacgaggctggggtctggggttcagtggagcaatgaccaggaatcaggctgcgatctgtagtccaggtgtctggcgtcagacarcaccctcctgtacacggcacagctgtactgcagggttagggacaggatttactgccaccaacggaagcgttgattccaagtctcagacaccgcccccaggctgggcctccctcgacggaaggtgacgctctctgggaggtccttggtgctcacctccctggctgcttggggccccagggctcctgcctagggatgttttggggctgcagaaggaccctctgcccattatcaga

SEQ ID NO: 550870 - DNA, 963 bp, Homo sapiens
ggccacagaggaagcacgctccctgctcccactttgcccctcgtacccgcctgagggcatcttaattaagccttccttccccacgctcagaaaaataaatacttgggagacagcagagacattttcacagggtgtgttttcatttgcctttggcactaatgggtctctggaacgttccatcctggccggggaggtcagggcctgggcggccagggcccatttcgagaaagcaggttttcctttgtggcatgcttatttcaagcaccattttccctcctggttatacttgaaatggggctcggtgttgggaggtttcaaatgtggacattccgggcaaggggcctcatgaactctgtggacattctgggcaaggggcctcatgaactctgaaggttgagcttggaaggacggacacaggtcttggcagcctgagtgggtacaaacgctgatttttctggagtcagtcctctcctgctgatgggctgagagagccccccaggccctgtgtcccttctcagaggacctcagccccccagtgcctgggccacggatgggctgggggctggggcccagggcctcgcatcctacaagggcccaagggctgaaatggggctggggtccctggatctaggggatgagggcccagaacgaggctggggtctggggttcagtggagcaatgaccaggaatcaggctgcgatctgtagtccaggtgtctggcgtcagacagcaccctcctgtacacggcacagctrtactgcagggttagggacaggatttactgccaccaacggaagcgttgattccaagtctcagacaccgcccccaggctgggcctccctcgacggaaggtgacgctctctgggaggtccttggtgctcacctccctggctgcttggggccccagggctcctgcctagggatgttttggggctgcagaaggaccctctgcccattatcaga

SEQ ID NO: 550871 - DNA, 977 bp, Homo sapiens
gggaagggcaaggggtgctgacatgaacacaaagctcctgctgtttgctgtgcaatgagtaatgaaatcctttgcctctgacccagaagtttcatattttctccgagcatccataaaactggcatgcaagtagagtaaaatctcagacccttcatagttcttgacaaattgtacagcctgataaaattaccttgcaattttcttgagtgtctcttctttattaatcaaccaatgtgtaagtgcattttgcagtgattctgagtggtgtttggtctgtttcagtttaagttaaagcctttggtcaatctggttcactgatattacaagtgttctttcttatggattattaagacccacaatattgacatccactcgtttaaaaatatcattgctaccactgggacaccaatgaatgaacgaatggatgaatgaatgaacaagtcactgaaatcattgaatcgttgactgtttcctgtagtaaaagagtcttaattaaataaagatggaattttggggaatgtacacaggagttcttattattcaaatgttcattatcaaagtctacacagtatgttcctgcagagagcaaaagtttccatgacatataaagtgtttattaatgaactagccatagtaaaattacagcccatttaaacattcctctttgactaacactagtgtctatcccttgccattgcagcaatgatcttttcttcctgtaaatatccaacatcgtgcagtgaaaatttgcaaagtgaaactgaaaattttgtaaaagatgcagaagtataaagaagataaaagatgttggagaactgctcaaataacttacaaagtcaatgacaaatgatcmctcggcaaagttagataagttaacaattgaagaagagaaaatgaacaaggatgatgacagcactgacatttcaaaagaggactatttgaataataaaagcttaagaaaggtccttggaaaaaat

SEQ ID NO: 550872 - DNA, 1372 bp, Homo sapiens
gggggggcacataattctgttcataacatacatgatgaaaaaacatatattcctagttttttaagcctgaagggaaattagattctaattgttcattttagagctgagggaacaaaagatccagactttttcatgcaagtgagtgtgaaaacctgggagcccaaacctgagcttgatgctttttcttctatggtatatttgttttctggagttttttttccaggttttttccttcaaggaaaaatcaagcatcatatgttttccataaaacacagcaatttaagcactatttcaagaggataaaactatttgtgaaaggaaaatgtaattttaattactaaacatcaaaggaattacacaaacaattatttttcctaaatgaggtgtattttaaaactgaggaaaatttttttctgcacatttcccagttttcaaaagtcatttagtgattgtycacacatgaacaacacacattgttatctgaggtctgaggccagcaagtttgtttataaagacctcagatgatttcaaaatgcttgctgtttatcacatacataggcttatgaaataggcaggggagggtgagaggaggtattatcttataacatctaccagaaaaccatcttgaaagcataactaagatttttcagataagaaagaagcacatagtgactttttaaaggattaaggtgacccagactttgcaggagccttttagtctgtacagatgtccaggagctaccctagagttttgaatccattagcagagatgggcaaggtgtactttaaaaactaaagataactggcttatttccctgtagtgtgtctggacaatctggcaacattttagactgttggcctacattttagctactgggattctggcctcaacttaattctgttcttttctgtaatctctgtatggatggcataaattaggaggctcgataatacttatggaatgctttaatgcatactaattaaatttgcaataatagctaaaatttttatttttttctcatggaaataatattgctgtattttatcttcctttgtttttactggactaatttaacactatcttattttcttgaagaatttggttagtcatctgaagaaacatcaaggagttttttagcaaaagaaattttagagataatctaaccaaagcaccagttcttaaagtagaagaatctgagatgtaaaaaattggggcaatattctaatgccacataaatagtctcagagcaagaacctgaatccatgtgtcataattcttcatcttattcttcctgatatgccatgcaaaatataaaaatttaggtaaaacttcattgatccttaaagaaaatataatatcaagttttttcag

SEQ ID NO: 550873 - DNA, 956 bp, Homo sapiens
cctcttttctctgtctcttcccatcctcattaatagtctcttattctgatgggttttgacatgaggctgccacaaagggagtgagctgcctggtcggtgaggggcacagggagcaacaggctgcctggccatctcccagaagcaaggcaaccagccagccagcctgcaggtcaggggagaaatgaggacagccactccgcttagttccttggagaatgttattacctgacctgggaaagaaaagggaaaaaatgaaagtggcattagaggtgactggcaatttcctagaagtctgacaccggcaggaaatatagatcgagaaccaaactggcgtgagatggtaaacacacatccaagccaggcagatggtggtggtgccaagttctggaaagtggtccatttattatgacctgtgtccccctcttagttagattttcatagtgatggataaagggaggtagaggaaaagattatcaagttccatatttgtggtctcctctctgtcttccctgccactatctcatctcatcttcttctcctgggtgcctagataacaagcttcttaccggcctctctgcctctaggaccaccccattgtccacatggctrtaatcacccaacaggttcttcttgtcttttgcacagataaacccaattctctgagacagcattattgcaataaagaaagagtttaattaacacaaggccaccaagtggaaggactggagttattactcaaatcaatctctccaaaaactcagaagctagggtttttatggataatttggtgggcaaggggctagggaatgggtgctgccaattggttggggataaaatcataggagtgtggaaaatggtcctcgtgccctgagtctgcatctgggtgggggctgcaggcccagttgagtcatgtgtcactggtccaggtggggtcacttcgttgcctgaatgcaaaa

SEQ ID NO: 550874 - DNA, 956 bp, Homo sapiens
cctcttttctctgtctcttcccatcctcattaatagtctcttattctgatgggttttgacatgaggctgccacaaagggagtgagctgcctggtcggtgaggggcacagggagcaacaggctgcctggccatctcccagaagcaaggcaaccagccagccagcctgcaggtcaggggagaaatgaggacagccactccgcttagttccttggagaatgttattacctgacctgggaaagaaaagggaaaaaatgaaagtggcattagaggtgactggcaatttcctagaagtctgacaccggcaggaaatatagatcgagaaccaaactggcgtgagatggtaaacacacatccaagccaggcagatggtggtggtgccaagttctggaaagtggtccatttattatgacctgtgtccccctcttagttagattttcatagtgatggataaagggaggtagaggaaaagattatcaagttccatatttgtggtctcctctctgtcttccctgccactatctcatctcatcttcttctcctgggtgcctagataacaagcttcttaccggcctctctgcctctaggaccaccccattgtccacatggctataatcacccaacaggttcttcttgtcttttgcacagataaacccaattctctgagacagcattattgcaataaagaaagagtttaattaacacaaggccaccaagtggaaggactggagttattactcaaatcaatctctccaaaaactcagaagctagggtttttatggataatttggtgggcarggggctagggaatgggtgctgccaattggttggggataaaatcataggagtgtggaaaatggtcctcgtgccctgagtctgcatctgggtgggggctgcaggcccagttgagtcatgtgtcactggtccaggtggggtcacttcgttgcctgaatgcaaaa

SEQ ID NO: 550875 - DNA, 637 bp, Homo sapiens
caaactcatcatccataatagcccttcctatgagtgctggaatctggattccaggggacgccaggacaacaggcagaaaccaggactgctccaggcaccccaagacatagggtcacggtagagatcagacatatccacaaggtgcagcaaggaactggggtcattctgggtggccctgtggactggaagagttgtgccccgtggctgctttatcctggagaaggaaaggacagctgtttcctccggagcagatggggttcagccaccaattcacccagcgaacttttctccacggtgagtctccccaagtcctaccccaaagtggcaccgtgtggactgacactggattgggtaaacctggtctactgcacgccgtcagcagatattagctgtcactgttatattcttgatggagtctccctcgagagggctgagttcaaggactctgaacaggacagaaccatggaaggyaatgggggctgtccatgccatcctgccagctctcctcctgcaggaagccctccctgaccacccctgtccccggggctactttaagactccagaggtttcaccatttggcttttggtgggctggcttcgtggtctggggttgccaggctcaaagtttttgttcggct

SEQ ID NO: 550876 - DNA, 592 bp, Homo sapiens
atcctttgaggctaaagcttaactcttctctttctccctcccccaagggattttcagttcataaataagagcccagaggggaccaacctttgatccaaagaaatgattttttcagaaaatgtcccccatttaaaaattaataaaacatgctcattgcagaaaattggaaagcgcratgaagaggaagaaaaacttagaccaaaaaacaaatgagatcatgtcctctgttgcaacacggctagagctggaggccattatcctaagcaaacgaacatagacaggagcagaaaaccaaataccgcatgttctcacgtataagtggaagctaaataatgaggacacatgaatactaggagagggacaacagacactggggccttctggagggtggacagtgggaggacggagaggattagaaaaaaatacctggtgggtattatgcttattacctgggtgacaaaattatccgtataccaaactcacatggcagtttatctatataacaaacctgcacatgtatcccaatcctaaaagttaaaaaaaaacctagaccaagaattcctctacctgataattttgtaaacatttcaga

SEQ ID NO: 550877 - DNA, 592 bp, Homo sapiens
atcctttgaggctaaagcttaactcttctctttctccctcccccaagggattttcagttcataaataagagcccagaggggaccaacctttgatccaaagaaatgattttttcagaaaatgtcccccatttaaaaattaataaaacatgctcattgcagaaaattggaaagcgcaatgaagaggaagaaaaacttagaccaaaaaacaaatgagatcatgtcctctgttgcaacacggctagagctggaggccattatcctaagcaaacgaacatagacaggagcagaaaaccaaataccgcatgttctcacgtataagtggaagctaaataatgaggacacatgaatactaggagagggacaacagacactggggccttctggagggtggacagtgggaggacggagaggattagaaaaaaatacctggtgggtattatgcttattacctgggtgacaaaattatccgtataccaaactcacatggcagtttatctatataacaaacctgcacatgtatcccaatcctaaaagttaaaaaaaaacctagaccaagaattcctctacctgatawttttgtaaacatttcaga

SEQ ID NO: 550878 - DNA, 972 bp, Homo sapiens
tgccaacatggcaaaaccccatctctattaaaaatacaaaaaaaaataattagccaggcgtggtggtgggcgtctgtaataatcccagctactccagaggctgaggcagcagaattgcttgaacctgggaggcagaggttgcagtgatctgagatcgcaccactgcacaccagcctgggcaacagagcgagactcaaaaaaaaaaatagtctgtactgtggtttagccttgtttccttgcccagtcttcatgggaatttgtaattccatcgctcttctcaaagagccaccacgcractcagttggtcttcatttgcaagttcattgatttctatcttattttcttcatattactttgattttcattcaattctatttctttatttatacactacttttttggttattaatattttaagtaaatatcaacttatttaattatatgatattaaattattctgtagaaaaacatgctctttctttccatttattccgaccattgttattttataaagtttgttggctggtacttttatgtatttttgaattaaaatgcagtagaatggattttagaacatgtatgtacggttatgagtcttaagcaaccagaccatcaggatgcagggaagcccttccgtcgccacgaacgtctccctgacatcacccttcatagttacgccctcctcgctccctaatccattctcgccaccatcatcatccttctcaagagtgtcatacaaagagaagtttaggatatgtaagctttcaaggctggtttctttcactcagcataattcttttgaattattccaagtcgttgtctgtatcgatatcgcacctgtcattccagctgagtggcatgcattgcatgatgccagtgtgtgggttccaccgcgttccatcagggtatccctgagtatggattacagttcatcaattcccttggtgacaggcatttggattgttgccggta

SEQ ID NO: 550879 - DNA, 972 bp, Homo sapiens
tgccaacatggcaaaaccccatctctattaaaaatacaaaaaaaaataattagccaggcgtggtggtgggcgtctgtaataatcccagctactccagaggctgaggcagcagaattgcttgaacctgggaggcagaggttgcagtgatctgagatcgcaccactgcacaccagcctgggcaacagagcgagactcaaaaaaaaaaatagtctgtactgtggtttagccttgtttccttgcccagtcttcatgggaatttgtaattccatcgctcttctcaaagagccaccacgcaactcagttggtcttcatttgcaagttcattgatttctatcttattttcttcatattactttgattttcattcaattctatttctttatttatacactacttttttggttattaatattttaagtaaatatcaacttatttaattatatgatattaaattattctgtagaaaaacatgctctttctttccatttattccgaccattgttattttataaagtttgttggctggtacttttatgtatttttgaattaaaatgcagtagaatggattttagaacatgtatgtacgrttatgagtcttaagcaaccagaccatcaggatgcagggaagcccttccgtcgccacgaacgtctccctgacatcacccttcatagttacgccctcctcgctccctaatccattctcgccaccatcatcatccttctcaagagtgtcatacaaagagaagtttaggatatgtaagctttcaaggctggtttctttcactcagcataattcttttgaattattccaagtcgttgtctgtatcgatatcgcacctgtcattccagctgagtggcatgcattgcatgatgccagtgtgtgggttccaccgcgttccatcagggtatccctgagtatggattacagttcatcaattcccttggtgacaggcatttggattgttgccggta

SEQ ID NO: 550880 - DNA, 525 bp, Homo sapiens
agcatcaggatttgatgttacctcagaacacgttcagctggcaacacagaggtcccactggtcttctctagaaagctttgctttccttcccaggtgatcacaccatccaggcagcttgctcactgcaatcctaastgaggccagccactcggtggaaatggacagtttctaaagtgccagaaagttggggctgggagaacttagtccagtagcttttcctaaaccagttgtttaaggagaattgctctttgtaaatcttaggggaaaagtgctgttcctctccctgtccacagccccctgaaacaccctgagagccctggggctccaacagcccagagtggaaacaatgagaaacagttccgctcccgctggtgaaaggtggagcccggggaagccaaccaggctgccagcgagtggcatggcaggatccggaaccctaggattccgaccatggcccacagtacttccctttagataagaccacctcttatttcccatgagcactcattcgttcatgtactgtgt

SEQ ID NO: 550881 - DNA, 525 bp, Homo sapiens
agcatcaggatttgatgttacctcagaacacgttcagctggcaacacagaggtcccactggtcttctctagaaagctttgctttccttcccaggtgatcacaccatccaggcagcttgctcactgcaatcctaactgaggccagccactcggtggaaatggacagtttctaaagtgccagaaagttggggctgggagaacttagtccagtagcttttcmtaaaccagttgtttaaggagaattgctctttgtaaatcttaggggaaaagtgctgttcctctccctgtccacagccccctgaaacaccctgagagccctggggctccaacagcccagagtggaaacaatgagaaacagttccgctcccgctggtgaaaggtggagcccggggaagccaaccaggctgccagcgagtggcatggcaggatccggaaccctaggattccgaccatggcccacagtacttccctttagataagaccacctcttatttcccatgagcactcattcgttcatgtactgtgt

SEQ ID NO: 550882 - DNA, 562 bp, Homo sapiens
gcttagagaggtgaagtgctttgttggagatcacacagatgataagtggctgagtttgatctggaactcaggtctatctgatgccggaacccaagctcttaactacctcttccaaatctcgaccccaccccatacacagatggggaagctatgtgccccaggtcagacagctgctcagagtagtgcccggctcagactcctggaccatctcccagtcttgcccctgacacctggcacagcccctgctcaggacttcctgcccagaaacacagagggcccctgcctggtaaacaaggcaaacaggaaagggccagcgtgatcttgtagggaccagtgcttcctgagccctcacccccacccaccatgggatcccgtctctactcctctgtccagaagctgtcagaggtaggggactgagcataggggcaggaatcctccacacctggctgattcctagcaatgcagccctgggttgggggtcagtggggaggtgttatctaacwactttgtgcctcactttcctcatctgtgaaatggggaggccattaacacttgtgaagac

SEQ ID NO: 550883 - DNA, 1102 bp, Homo sapiens
gagaaagaggaggaagcagaggagaaacaattctctttgcttgggaagtctgcattccagccctggcaatgggctctgtaactgtgaaagaactggagagtgacatgacagggtttggtagcaagtcgttccctccttagatagctcaggcgggaccaggtgaacatctccagactcttccccacacattyggcctctgcctcacctctccctgatggggttaattcactatgtccctactctgtggccttcccagcccattaccctacctctgtcacagtcctccttactttgccacctcatagggccttcctgatagagcaggaggccaaagtcctctgaccaagtttgcagagtaaatttgaggtgaaatgaaattccacctcctaagttgacagaaggcacagtcagaacattaaattggctttagcacatagaataattcttatatattttgagaggtctggaaacgtttgcttataagcaagtgtttcagaaagacctccttatattttgatatagtgattataaaataaaaatatttctagtccatcttctgtccagggagaggtgcttttagcttttagaagcaagaggagccacctggttcttctcttggtcacctttcctctcgcccaccacctatatcaggtgagtcaatgccataaaggatatttacctttaagatcagaataattgatctttccaaagtgaccacctcctactgctaatttatagaccaaagaaggtatctgagataagtatttattctataaaacttctgaagaatctagcttaaacagatatttttccttaaaattattttttgtaatacatgcacaaagtcagagcataaaagaacataacatttatttgtcaaaaactcattgaataatatatatcaacaaagttgatttaaatgtgaaaaaaaaacccagtcataacattaaaacctagtttttctcacttccctgtcccctagccaccctacccctccccagagattactggattactgccgtgatattttttgaagagggtggcatattgacttctagagatgttccctgcgtgtatgcatttataatctttgttgttgttg

SEQ ID NO: 550884 - DNA, 1102 bp, Homo sapiens
gagaaagaggaggaagcagaggagaaacaattctctttgcttgggaagtctgcattccagccctggcaatgggctctgtaactgtgaaagaactggagagtgacatgacagggtttggtagcaagtcgttccctccttagatagctcaggcgggaccaggtgaacatctccagactcttccccacacatttggcctctgcctcacctctccctgatggggttaattcactatgtccctactctgtggccttcccagcccattaccctamctctgtcacagtcctccttactttgccacctcatagggccttcctgatagagcaggaggccaaagtcctctgaccaagtttgcagagtaaatttgaggtgaaatgaaattccacctcctaagttgacagaaggcacagtcagaacattaaattggctttagcacatagaataattcttatatattttgagaggtctggaaacgtttgcttataagcaagtgtttcagaaagacctccttatattttgatatagtgattataaaataaaaatatttctagtccatcttctgtccagggagaggtgcttttagcttttagaagcaagaggagccacctggttcttctcttggtcacctttcctctcgcccaccacctatatcaggtgagtcaatgccataaaggatatttacctttaagatcagaataattgatctttccaaagtgaccacctcctactgctaatttatagaccaaagaaggtatctgagataagtatttattctataaaacttctgaagaatctagcttaaacagatatttttccttaaaattattttttgtaatacatgcacaaagtcagagcataaaagaacataacatttatttgtcaaaaactcattgaataatatatatcaacaaagttgatttaaatgtgaaaaaaaaacccagtcataacattaaaacctagtttttctcacttccctgtcccctagccaccctacccctccccagagattactggattactgccgtgatattttttgaagagggtggcatattgacttctagagatgttccctgcgtgtatgcatttataatctttgttgttgttg

SEQ ID NO: 550885 - DNA, 3569 bp, Homo sapiens
tgctgctggctggttatctcagtatgagtgccgtgagttaaaaagtgactgagaaatggattattcccaaagatgaaggagatcactcaacacccttgtgagctacctcattcacacgcctgccaagaggcacattttccggtattcttccatagtttagattgtttcaaaacattttaagtaacacaaataacccagatgttgaaaattagtaagtaaaatgagaaaaactaaattaagaattaaatactttaagaattattctaagaatgatggtataaaaactttgaacaaattcatatgaaatagcaaaaaggcagacattcttccattgcatgaattaaaaactattcatatttccaattgtattttaaaccaaattaacttttaaaaaatgcaaacacattcaacaattctttatgtaaatgatttgtaactttgtatgcctttagataaattatattagggattttaagtattgcatagtcaggagaggctggaatttacaaggccatataattggtgtgtaggaaagaaaaaactttacytcttcctttttagggttgttttttggctggacctgagaattaaattgacataagatagattaacaagagaaaaggatacaaatttaatacaagttgtatgagtttgtgttaaaagctcatacaggttttacatggcacagaagcttttgtaaggaaatgaagacctaaagaagcaattaaacagtttatagtgaattggacaaagaatagtaagttatgaaaaggcaactaaattgtgttggaagacttaaagacgagttattttaataaaggcttgtacagaattctctctgcctcgacatcttgtccttgatgataagcatgttgttttccttttaatattttgggagatcacctttcatacaagaatttaatctcctgtttttttttgtttgtttttgttttgtttttgttttttttgtgtgtgtgtgtggcgggggggatgggagttggtctcactttgtcacccagactggagtacattggtacaattacagatcactgcagccttaaactcctgggctcaagagaaccttgtctctataaaaaaaaaaaaaatgccaggcatcgtggtgcaggcctgtagttctagctactcaataggctgaggcaggaggatcccacccgcctcgggtgctgggatttcaggcgtgagccactgcacctggcctgcatagtaactttttgaaggtattaactaaagctcacatgaaggtcgggtgctgcacttccctactcttggggctcagccaaaggactagctgccatctgggtcactgccattgtaactgcagaaggaagacagtcgtggcagattcacaagatggctggctgttaaagctcctgctctaaaggagcaagtaccacttccatgcatgttccctgggccacagaagtcacttgccagaaccaacatcaatggatagatcatttaacccttctgcagggactgctcaggaagggcctagtgagaaacagcaggtggaaagctggactgtaacacagtctactacagcgggtgttaggtcattttatagatgaggaaattgggaatatgagatgcttattcacttgcccctcttccatgggggctggttctgtgatacaaacctagggatcctatctgattccagagctcatgcttggccaggcacagtgcctcacacctgtaatctcagcactttgggaggttgaagctggaggatcgcttgagcccaggagttcaagaccagcctgggcaacataatgagaccccatctctacaaaaaattaaaaaaattatccaggcatggtgatacatgcctgtggtcccatctacttgggaggctgaggtgagaggattgcttgagccggggaagtcaaggttgcagtgagccatgatagagccactgcacggaagcctgggtgatagagtgagacctgtatcaaaaaaaaaagaaaagaaaaacaaaagctcatgcttgtagaccagattacctctgtgtttttttaaatgcaagtaacagttgactagtgtttttccatatacaggtcaccttcacatctgttcttgcatttgaaccgacagctatgtgagctaggcacaggagctgttattatttgcctctttgcagatgagtccacctagagttggtgagaaggtagtgacttgccccaagccactttttctcaactcccacctacttttctggggaaacctgtcatctcctgattccttccttgtgatcaagtagtgctgcagataggttttcatagattggttaatgtaatccatttcaattaaaatttttgccttattcttatcactggattactagggttctacttaggaatgtgtgaaattatccaatgataatctccagtgtcatttagcttttagttagattacttcagaattacaagcagtgtcactccataccaaattaaatataccttatgtatttccttaaacctttttacattgttccacctattcattaacccaaatctaggtcgatttaaacattaacatgcatacgaatatttataattatttttcgaatcacgatctgaacagcatgtgcacatcgcattcagccactacacctcagggctccctttccatctctctctgtctctctgtctctgtgtgtgtgtttctgcatatgtttttgttttggttttttggtttgtcctgtagaacaacagattcttaaatgtgcatatgaatcacctggagatcttattaaagatcctgatgtagcaggctggggtgggggtctgggagtccacaggtctaaccagtgcccaggtgataccagtgtggctggtctgtgaactacactttgagtaggaaagctgtagaatttcccaccttctggaattttgctgagttcatccccatggtggtgattatggtgttcttgtctttctcatctgccggtagttgggtgtagaagtttgcataaattctggtaaaggcactactttaaagatctcaatcagtaatgcgacaaatatacttcataactttacacagcaaatgttcagtgaaacagaaatacggacagaaaaaggtggagggaaactaagtgacctgttttaatggaattgctgctgctcccatttctcatgttgtactctgcttttatacatgccacacaatgctaaatccacagcaaggtctctactcctttccacatagattctgtattcccactccaaattgtgggaagaaagtgaagtcatgagacagcctgagaaaaagtcattctctctgtttattcagtagttcataattcagttcatttaactctttcactttcccattgcttcatttactgggtttcatgtttgcaaacatggaatatagcgagataggaagagaagaagggacaagatgtgtgagaggtgtgagaacgctttagtgccagtgtatgtaggaaagctttcttctcttggctcctggaccaaggtgttgctcgtcagggcaccttgttgtcatctttgtgcatcttctctccttcttagctcccttcatgt

SEQ ID NO: 550886 - DNA, 3569 bp, Homo sapiens
tgctgctggctggttatctcagtatgagtgccgtgagttaaaaagtgactgagaaatggattattcccaaagatgaaggagatcactcaacacccttgtgagctacctcattcacacgcctgccaagaggcacattttccggtattcttccatagtttagattgtttcaaaacattttaagtaacacaaataacccagatgttgaaaattagtaagtaaaatgagaaaaactaaattaagaattaaatactttaagaattattctaagaatgatggtataaaaactttgaacaaattcatatgaaatagcaaaaaggcagacattcttccattgcatgaattaaaaactattcatatttccaattgtattttaaaccaaattaacttttaaaaaatgcaaacacattcaacaattctttatgtaaatgatttgtaactttgtatgcctttagataaattatattagggattttaagtattgcatagtcaggagaggctggaatttacaaggccatataattggtgtgtaggaaagaaaaaactttacttcttccyttttagggttgttttttggctggacctgagaattaaattgacataagatagattaacaagagaaaaggatacaaatttaatacaagttgtatgagtttgtgttaaaagctcatacaggttttacatggcacagaagcttttgtaaggaaatgaagacctaaagaagcaattaaacagtttatagtgaattggacaaagaatagtaagttatgaaaaggcaactaaattgtgttggaagacttaaagacgagttattttaataaaggcttgtacagaattctctctgcctcgacatcttgtccttgatgataagcatgttgttttccttttaatattttgggagatcacctttcatacaagaatttaatctcctgtttttttttgtttgtttttgttttgtttttgttttttttgtgtgtgtgtgtggcgggggggatgggagttggtctcactttgtcacccagactggagtacattggtacaattacagatcactgcagccttaaactcctgggctcaagagaaccttgtctctataaaaaaaaaaaaaatgccaggcatcgtggtgcaggcctgtagttctagctactcaataggctgaggcaggaggatcccacccgcctcgggtgctgggatttcaggcgtgagccactgcacctggcctgcatagtaactttttgaaggtattaactaaagctcacatgaaggtcgggtgctgcacttccctactcttggggctcagccaaaggactagctgccatctgggtcactgccattgtaactgcagaaggaagacagtcgtggcagattcacaagatggctggctgttaaagctcctgctctaaaggagcaagtaccacttccatgcatgttccctgggccacagaagtcacttgccagaaccaacatcaatggatagatcatttaacccttctgcagggactgctcaggaagggcctagtgagaaacagcaggtggaaagctggactgtaacacagtctactacagcgggtgttaggtcattttatagatgaggaaattgggaatatgagatgcttattcacttgcccctcttccatgggggctggttctgtgatacaaacctagggatcctatctgattccagagctcatgcttggccaggcacagtgcctcacacctgtaatctcagcactttgggaggttgaagctggaggatcgcttgagcccaggagttcaagaccagcctgggcaacataatgagaccccatctctacaaaaaattaaaaaaattatccaggcatggtgatacatgcctgtggtcccatctacttgggaggctgaggtgagaggattgcttgagccggggaagtcaaggttgcagtgagccatgatagagccactgcacggaagcctgggtgatagagtgagacctgtatcaaaaaaaaaagaaaagaaaaacaaaagctcatgcttgtagaccagattacctctgtgtttttttaaatgcaagtaacagttgactagtgtttttccatatacaggtcaccttcacatctgttcttgcatttgaaccgacagctatgtgagctaggcacaggagctgttattatttgcctctttgcagatgagtccacctagagttggtgagaaggtagtgacttgccccaagccactttttctcaactcccacctacttttctggggaaacctgtcatctcctgattccttccttgtgatcaagtagtgctgcagataggttttcatagattggttaatgtaatccatttcaattaaaatttttgccttattcttatcactggattactagggttctacttaggaatgtgtgaaattatccaatgataatctccagtgtcatttagcttttagttagattacttcagaattacaagcagtgtcactccataccaaattaaatataccttatgtatttccttaaacctttttacattgttccacctattcattaacccaaatctaggtcgatttaaacattaacatgcatacgaatatttataattatttttcgaatcacgatctgaacagcatgtgcacatcgcattcagccactacacctcagggctccctttccatctctctctgtctctctgtctctgtgtgtgtgtttctgcatatgtttttgttttggttttttggtttgtcctgtagaacaacagattcttaaatgtgcatatgaatcacctggagatcttattaaagatcctgatgtagcaggctggggtgggggtctgggagtccacaggtctaaccagtgcccaggtgataccagtgtggctggtctgtgaactacactttgagtaggaaagctgtagaatttcccaccttctggaattttgctgagttcatccccatggtggtgattatggtgttcttgtctttctcatctgccggtagttgggtgtagaagtttgcataaattctggtaaaggcactactttaaagatctcaatcagtaatgcgacaaatatacttcataactttacacagcaaatgttcagtgaaacagaaatacggacagaaaaaggtggagggaaactaagtgacctgttttaatggaattgctgctgctcccatttctcatgttgtactctgcttttatacatgccacacaatgctaaatccacagcaaggtctctactcctttccacatagattctgtattcccactccaaattgtgggaagaaagtgaagtcatgagacagcctgagaaaaagtcattctctctgtttattcagtagttcataattcagttcatttaactctttcactttcccattgcttcatttactgggtttcatgtttgcaaacatggaatatagcgagataggaagagaagaagggacaagatgtgtgagaggtgtgagaacgctttagtgccagtgtatgtaggaaagctttcttctcttggctcctggaccaaggtgttgctcgtcagggcaccttgttgtcatctttgtgcatcttctctccttcttagctcccttcatgt

SEQ ID NO: 550887 - DNA, 3569 bp, Homo sapiens
tgctgctggctggttatctcagtatgagtgccgtgagttaaaaagtgactgagaaatggattattcccaaagatgaaggagatcactcaacacccttgtgagctacctcattcacacgcctgccaagaggcacattttccggtattcttccatagtttagattgtttcaaaacattttaagtaacacaaataacccagatgttgaaaattagtaagtaaaatgagaaaaactaaattaagaattaaatactttaagaattattctaagaatgatggtataaaaactttgaacaaattcatatgaaatagcaaaaaggcagacattcttccattgcatgaattaaaaactattcatatttccaattgtattttaaaccaaattaacttttaaaaaatgcaaacacattcaacaattctttatgtaaatgatttgtaactttgtatgcctttagataaattatattagggattttaagtattgcatagtcaggagaggctggaatttacaaggccatataattggtgtgtaggaaagaaaaaactttacttcttcctttttagggttgttttttggctggacctgagaattaaattgacataagatagattaacaagagaaaaggatacaaatttaatacaagttgtatgagtttgtgttaaaagctcatacaggttttacatggcacagaagcttttgtaaggaaatgaagacctaaagaagcaattaaacagtttatagtgaattggacaaagaatagtaagttatgaaaaggcaactaaattgtgttggaagacttaaagacgagttattttaataaaggcttgtacagaattctctctgcctcgacatcttgtccttgatgataagcatgttgttttccttttaatattttgggagatcacctttcatacaagaatttaatctcctgtttttttttgtttgtttttgttttgtttttgttttttttgtgtgtgtgtgtggcgggggggatgggagttggtctcactttgtcacccagactggagtacattggtacaattacagatcactgcagccttaaactcctgggctcaagagaaccttgtctctataaaaaaaaaaaaaatgccaggcrtcgtggtgcaggcctgtagttctagctactcaataggctgaggcaggaggatcccacccgcctcgggtgctgggatttcaggcgtgagccactgcacctggcctgcatagtaactttttgaaggtattaactaaagctcacatgaaggtcgggtgctgcacttccctactcttggggctcagccaaaggactagctgccatctgggtcactgccattgtaactgcagaaggaagacagtcgtggcagattcacaagatggctggctgttaaagctcctgctctaaaggagcaagtaccacttccatgcatgttccctgggccacagaagtcacttgccagaaccaacatcaatggatagatcatttaacccttctgcagggactgctcaggaagggcctagtgagaaacagcaggtggaaagctggactgtaacacagtctactacagcgggtgttaggtcattttatagatgaggaaattgggaatatgagatgcttattcacttgcccctcttccatgggggctggttctgtgatacaaacctagggatcctatctgattccagagctcatgcttggccaggcacagtgcctcacacctgtaatctcagcactttgggaggttgaagctggaggatcgcttgagcccaggagttcaagaccagcctgggcaacataatgagaccccatctctacaaaaaattaaaaaaattatccaggcatggtgatacatgcctgtggtcccatctacttgggaggctgaggtgagaggattgcttgagccggggaagtcaaggttgcagtgagccatgatagagccactgcacggaagcctgggtgatagagtgagacctgtatcaaaaaaaaaagaaaagaaaaacaaaagctcatgcttgtagaccagattacctctgtgtttttttaaatgcaagtaacagttgactagtgtttttccatatacaggtcaccttcacatctgttcttgcatttgaaccgacagctatgtgagctaggcacaggagctgttattatttgcctctttgcagatgagtccacctagagttggtgagaaggtagtgacttgccccaagccactttttctcaactcccacctacttttctggggaaacctgtcatctcctgattccttccttgtgatcaagtagtgctgcagataggttttcatagattggttaatgtaatccatttcaattaaaatttttgccttattcttatcactggattactagggttctacttaggaatgtgtgaaattatccaatgataatctccagtgtcatttagcttttagttagattacttcagaattacaagcagtgtcactccataccaaattaaatataccttatgtatttccttaaacctttttacattgttccacctattcattaacccaaatctaggtcgatttaaacattaacatgcatacgaatatttataattatttttcgaatcacgatctgaacagcatgtgcacatcgcattcagccactacacctcagggctccctttccatctctctctgtctctctgtctctgtgtgtgtgtttctgcatatgtttttgttttggttttttggtttgtcctgtagaacaacagattcttaaatgtgcatatgaatcacctggagatcttattaaagatcctgatgtagcaggctggggtgggggtctgggagtccacaggtctaaccagtgcccaggtgataccagtgtggctggtctgtgaactacactttgagtaggaaagctgtagaatttcccaccttctggaattttgctgagttcatccccatggtggtgattatggtgttcttgtctttctcatctgccggtagttgggtgtagaagtttgcataaattctggtaaaggcactactttaaagatctcaatcagtaatgcgacaaatatacttcataactttacacagcaaatgttcagtgaaacagaaatacggacagaaaaaggtggagggaaactaagtgacctgttttaatggaattgctgctgctcccatttctcatgttgtactctgcttttatacatgccacacaatgctaaatccacagcaaggtctctactcctttccacatagattctgtattcccactccaaattgtgggaagaaagtgaagtcatgagacagcctgagaaaaagtcattctctctgtttattcagtagttcataattcagttcatttaactctttcactttcccattgcttcatttactgggtttcatgtttgcaaacatggaatatagcgagataggaagagaagaagggacaagatgtgtgagaggtgtgagaacgctttagtgccagtgtatgtaggaaagctttcttctcttggctcctggaccaaggtgttgctcgtcagggcaccttgttgtcatctttgtgcatcttctctccttcttagctcccttcatgt

SEQ ID NO: 550888 - DNA, 3569 bp, Homo sapiens
tgctgctggctggttatctcagtatgagtgccgtgagttaaaaagtgactgagaaatggattattcccaaagatgaaggagatcactcaacacccttgtgagctacctcattcacacgcctgccaagaggcacattttccggtattcttccatagtttagattgtttcaaaacattttaagtaacacaaataacccagatgttgaaaattagtaagtaaaatgagaaaaactaaattaagaattaaatactttaagaattattctaagaatgatggtataaaaactttgaacaaattcatatgaaatagcaaaaaggcagacattcttccattgcatgaattaaaaactattcatatttccaattgtattttaaaccaaattaacttttaaaaaatgcaaacacattcaacaattctttatgtaaatgatttgtaactttgtatgcctttagataaattatattagggattttaagtattgcatagtcaggagaggctggaatttacaaggccatataattggtgtgtaggaaagaaaaaactttacttcttcctttttagggttgttttttggctggacctgagaattaaattgacataagatagattaacaagagaaaaggatacaaatttaatacaagttgtatgagtttgtgttaaaagctcatacaggttttacatggcacagaagcttttgtaaggaaatgaagacctaaagaagcaattaaacagtttatagtgaattggacaaagaatagtaagttatgaaaaggcaactaaattgtgttggaagacttaaagacgagttattttaataaaggcttgtacagaattctctctgcctcgacatcttgtccttgatgataagcatgttgttttccttttaatattttgggagatcacctttcatacaagaatttaatctcctgtttttttttgtttgtttttgttttgtttttgttttttttgtgtgtgtgtgtggcgggggggatgggagttggtctcactttgtcacccagactggagtacattggtacaattacagatcactgcagccttaaactcctgggctcaagagaaccttgtctctataaaaaaaaaaaaaatgccaggcatcgtggtgcaggcctgtagttctagctactcaataggctgaggcaggaggatcccacccgcctcgggtgctgggatttcaggcgtgagccactgcacctggcctgcatagtaactttttgaaggtattaactaaagctcacatgaaggtcgggtgctgcacttccctactcttggggctcagccaaaggactagctgccwtctgggtcactgccattgtaactgcagaaggaagacagtcgtggcagattcacaagatggctggctgttaaagctcctgctctaaaggagcaagtaccacttccatgcatgttccctgggccacagaagtcacttgccagaaccaacatcaatggatagatcatttaacccttctgcagggactgctcaggaagggcctagtgagaaacagcaggtggaaagctggactgtaacacagtctactacagcgggtgttaggtcattttatagatgaggaaattgggaatatgagatgcttattcacttgcccctcttccatgggggctggttctgtgatacaaacctagggatcctatctgattccagagctcatgcttggccaggcacagtgcctcacacctgtaatctcagcactttgggaggttgaagctggaggatcgcttgagcccaggagttcaagaccagcctgggcaacataatgagaccccatctctacaaaaaattaaaaaaattatccaggcatggtgatacatgcctgtggtcccatctacttgggaggctgaggtgagaggattgcttgagccggggaagtcaaggttgcagtgagccatgatagagccactgcacggaagcctgggtgatagagtgagacctgtatcaaaaaaaaaagaaaagaaaaacaaaagctcatgcttgtagaccagattacctctgtgtttttttaaatgcaagtaacagttgactagtgtttttccatatacaggtcaccttcacatctgttcttgcatttgaaccgacagctatgtgagctaggcacaggagctgttattatttgcctctttgcagatgagtccacctagagttggtgagaaggtagtgacttgccccaagccactttttctcaactcccacctacttttctggggaaacctgtcatctcctgattccttccttgtgatcaagtagtgctgcagataggttttcatagattggttaatgtaatccatttcaattaaaatttttgccttattcttatcactggattactagggttctacttaggaatgtgtgaaattatccaatgataatctccagtgtcatttagcttttagttagattacttcagaattacaagcagtgtcactccataccaaattaaatataccttatgtatttccttaaacctttttacattgttccacctattcattaacccaaatctaggtcgatttaaacattaacatgcatacgaatatttataattatttttcgaatcacgatctgaacagcatgtgcacatcgcattcagccactacacctcagggctccctttccatctctctctgtctctctgtctctgtgtgtgtgtttctgcatatgtttttgttttggttttttggtttgtcctgtagaacaacagattcttaaatgtgcatatgaatcacctggagatcttattaaagatcctgatgtagcaggctggggtgggggtctgggagtccacaggtctaaccagtgcccaggtgataccagtgtggctggtctgtgaactacactttgagtaggaaagctgtagaatttcccaccttctggaattttgctgagttcatccccatggtggtgattatggtgttcttgtctttctcatctgccggtagttgggtgtagaagtttgcataaattctggtaaaggcactactttaaagatctcaatcagtaatgcgacaaatatacttcataactttacacagcaaatgttcagtgaaacagaaatacggacagaaaaaggtggagggaaactaagtgacctgttttaatggaattgctgctgctcccatttctcatgttgtactctgcttttatacatgccacacaatgctaaatccacagcaaggtctctactcctttccacatagattctgtattcccactccaaattgtgggaagaaagtgaagtcatgagacagcctgagaaaaagtcattctctctgtttattcagtagttcataattcagttcatttaactctttcactttcccattgcttcatttactgggtttcatgtttgcaaacatggaatatagcgagataggaagagaagaagggacaagatgtgtgagaggtgtgagaacgctttagtgccagtgtatgtaggaaagctttcttctcttggctcctggaccaaggtgttgctcgtcagggcaccttgttgtcatctttgtgcatcttctctccttcttagctcccttcatgt

SEQ ID NO: 550889 - DNA, 581 bp, Homo sapiens
cagcgtcatgtattcagtacaaagatgaaaactgtacaggagacttaagcttcgtttgggttacttcccttttattgttttgtgagttttgatamcaccacctgcatggctgtttatggacagaagagaagtcattatttgtattgtttttgccttgctaagaataaatatttaacttcaaatataattggtctggaaaaacaaaagggttttggttaaattccttgttattgtatgttatagatggggaagtggcaaaatagataaaaattacacaaactctgggaatcaaatttcttttgggcaggcttagaaaagacaaaactgaaactacttagtggcctagagagcagaagcctagggcccattttctgtcccaactttgcccagatcccccctctactgaaccttgtccaggtctgaccccacactgaaatacctcacagaactgcttagagaagatcagagtttggagtagctattcctactgcctctccagagctggtgctcccaatttcctgaaacacaaaagctgataaatggagaaaggcaatgtactttgaatttaatgtacttaaatt

SEQ ID NO: 550890 - DNA, 977 bp, Homo sapiens
caaaaaggctatcacaccggccctttgcccttgctgttagagggcagccaccccacgtgatgagacaaggggccagctgagctgttaacacatagccatctgcagatggcagygctaagagagcactgtaacactccccctggggttttggggtcatgggcaccctcatctcggtgatgccatgggccctgcacagagcttgctcccgccagtgcccaaagtggccagccagatcctgcactcactcgctcactcctgatctggccatgagccccacatggagcctgctcctgccagtgactagaacagctggcgagatcccacactcacttgctcatggctggtttggccatgggccccacatggagcttgcttctgctggtgcccggagcggccggctggatcctgcactcactcgctcacaggctcccacccacaaggggttgaatgtggtgggccgagcaagtgttccctccggttgggagtccagtgaaggggccaagaaaaatcctgcatcaatctgaagacaaaatgtcacatatagtatttgtggacttaacagtatgccaaaagaatagtacactttgaacaaattagagattatcctaggaatttaagttactaagagatcagtgtaactgaggcgacctttagttgtatagccatcaggagttacttgtccttttaacaactatgaatctcattggagccctgagtctgcacaactgggattgtccttgcagatacttagaagttgtacaagtctgccctggctatcccttcacctgagctactatttcgagacagctgtctactctgaaggttacctcttgctgtaactgtatttccaggatgctactgcagaaattataaagaaaatgactcagatttgtttgtgttaaaaaaaatcaactagaagtaatatgcagcatatatgacaattcaaagatcttaatgtgtaaagtgttctaaatgca

SEQ ID NO: 550891 - DNA, 977 bp, Homo sapiens
caaaaaggctatcacaccggccctttgcccttgctgttagagggcagccaccccacgtgatgagacaaggggccagctgagctgttaacacatagccatctgcagatggcagcgctaagagagcactgtaacactccccctggggttttggggtcatgggcaccctcatctcggtgatgccatgggccctgcacagagcttgctcccgccagtgcccaaagtggccagccagatcctgcactcactcgctcactcctgatctggccatgagccccacatggagcctgctcctgccagtgmctagaacagctggcgagatcccacactcacttgctcatggctggtttggccatgggccccacatggagcttgcttctgctggtgcccggagcggccggctggatcctgcactcactcgctcacaggctcccacccacaaggggttgaatgtggtgggccgagcaagtgttccctccggttgggagtccagtgaaggggccaagaaaaatcctgcatcaatctgaagacaaaatgtcacatatagtatttgtggacttaacagtatgccaaaagaatagtacactttgaacaaattagagattatcctaggaatttaagttactaagagatcagtgtaactgaggcgacctttagttgtatagccatcaggagttacttgtccttttaacaactatgaatctcattggagccctgagtctgcacaactgggattgtccttgcagatacttagaagttgtacaagtctgccctggctatcccttcacctgagctactatttcgagacagctgtctactctgaaggttacctcttgctgtaactgtatttccaggatgctactgcagaaattataaagaaaatgactcagatttgtttgtgttaaaaaaaatcaactagaagtaatatgcagcatatatgacaattcaaagatcttaatgtgtaaagtgttctaaatgca

SEQ ID NO: 550892 - DNA, 627 bp, Homo sapiens
ccaaatactgaatgttctcacctatcagtggtagctaaatcataaggactgatgaacacaaagaaggaaatagacactggggtctacttgagtggggagggcaggaggagagagaggagcagaaaagataactatttgggtactgagcttaatacctggatgatgaaataatatgtaaaaaaaaaaaaaaaacacctccctgacacaagtttacctatgtaacaaacctcacgtgtacctccaaacctaaaataaaagttaaaaaaaacaaaattggcctttgatgaatgatgttaggttaacctgagataaagkaaatccccaatccttctaatcttcccctctccacctggacccaccacctccacccaggcttggagagttaaggctgatatagatggaggatcaattggccaaaagaggtgaattctctcctcaagttgccattcccttactacaagaacctctgatcccacacagtctactagatctctgggtatcaaggaaatgtcataaatctgaactcacttgacaatgtcaccatacagaaccaagtctgacagattacgaaggcatgaagaagtggcttgggtggctttagccccttaatctgtttgagtgtcccct

SEQ ID NO: 550893 - DNA, 627 bp, Homo sapiens
ccaaatactgaatgttctcacctatcagtggtagctaaatcataaggactgatgaacacaaagaaggaaatagacactggggtctacttgagtggggagggcaggaggagagagaggagcagaaaagataactatttgggtactgagcttaatacctggatgatgaaataatatgtaaaaaaaaaaaaaaaacacctccctgacacaagtttacctatgtaacaaacctcacgtgtacctccaaacctaaaataaaagttaaaaaaaacaaaattggcctttgatgaatgatgttaggttaacctgagataaaggaaatccccaatccttctaatcttcccctctccacctggacccaccacctccacccaggcttggagagttaaggctgatataratggaggatcaattggccaaaagaggtgaattctctcctcaagttgccattcccttactacaagaacctctgatcccacacagtctactagatctctgggtatcaaggaaatgtcataaatctgaactcacttgacaatgtcaccatacagaaccaagtctgacagattacgaaggcatgaagaagtggcttgggtggctttagccccttaatctgtttgagtgtcccct

SEQ ID NO: 550894 - DNA, 649 bp, Homo sapiens
actgccctggagcacgcagctgggtgcgtggtggaaggaccccacggcaggtggggtcacgcaagaggcctcccctggtgcctggcactggggcagacagtgggaggtgagcagaaccacctccagcacctgcttgattcccaggcctcgatcccctctgcatgtgaggctgtggggaggcacctctgacctggtgagagggccgrgtgctccgcctccagctttgctccagagcaaggcccaatggcagactccgtgccctgctcagggtggggtccctgctctccccaggaccctgcagcctctgggcccccttcatcgtggcccaggatggggtcggactgctctgcccccaggcgcgtctggccgggccggtcctaaatgctcctctgccacagctccggctcctggtggtcgccgtgcagggcctgatccatctgctcgtggacctcatcaactccctgccgctgtactcactgggtcttcggctctgccggccctacaggctggcgggtaagtgctgcgtattgggcagctggccctgggtaggtggaggggaaccacacctgtgggccctgcagaagcaaggacagcatgggccactgtgcctccagcctggaagccgtggtatgcatgcgcaagcgggcag

SEQ ID NO: 550895 - DNA, 649 bp, Homo sapiens
actgccctggagcacgcagctgggtgcgtggtggaaggaccccacggcaggtggggtcacgcaagaggcctcccctggtgcctggcactggggcagacagtgggaggtgagcagaaccacctccagcacctgcttgattcccaggcctcgatcccctctgcatgtgaggctgtggggaggcacctctgacctggtgagagggccgggtgctccgcctccagctttgctccagagcaaggcccaatggcagrctccgtgccctgctcagggtggggtccctgctctccccaggaccctgcagcctctgggcccccttcatcgtggcccaggatggggtcggactgctctgcccccaggcgcgtctggccgggccggtcctaaatgctcctctgccacagctccggctcctggtggtcgccgtgcagggcctgatccatctgctcgtggacctcatcaactccctgccgctgtactcactgggtcttcggctctgccggccctacaggctggcgggtaagtgctgcgtattgggcagctggccctgggtaggtggaggggaaccacacctgtgggccctgcagaagcaaggacagcatgggccactgtgcctccagcctggaagccgtggtatgcatgcgcaagcgggcag

SEQ ID NO: 550896 - DNA, 624 bp, Homo sapiens
caattgagctagaaaattatgaaataattgtaaacacagtatgactcctttaaataaaatatttgtgaaaattggagttatgcactgttttgcccaacagagcaagagaagactttcattttagtaatrtataatcaggtgttgtcattcatttctaaagttcctgttgactctgagatgagccattaatgtgtttatttataggattcacagtttgttttgatttcattcgtttcaactgacattttagaggttaaatgcatgacttgattattttattataaacttagacagtaaaggtctcagttctacttattaagtaacaatttattttcttgcccttaactagaaactattcttgttaggccagtaaaacaatacaaaaaagaacattacaattgttattaattaacaaatagtagctgtgttgtagaagtaatggtcaactctaaatgtgatttgcagggtttatcttaagaatatgtaataacaggtttgtaagaacagtctgagtgttggcttctagcaccaatactgacagactgaagtagagagcagcctgtttcatagaaatctgtgactatgttctctttgatccataatggagttaattataatcaagta

SEQ ID NO: 550897 - DNA, 624 bp, Homo sapiens
caattgagctagaaaattatgaaataattgtaaacacagtatgactcctttaaataaaatatttgtgaaaattggagttatgcactgttttgcccaacagagcaagagaagactttcattttagtaatgtataatcaggtgttgtcattcatttctaaagttcctgttgactctgagatgagccattaatgtgtttatttataggattcacagtttgttttgatttcattcgtttcaactgacattttagaggttaaatgcatgacttgattattttattataaacttagacagtaaaggtctcagttctacttattaagtaacaatttattttcttscccttaactagaaactattcttgttaggccagtaaaacaatacaaaaaagaacattacaattgttattaattaacaaatagtagctgtgttgtagaagtaatggtcaactctaaatgtgatttgcagggtttatcttaagaatatgtaataacaggtttgtaagaacagtctgagtgttggcttctagcaccaatactgacagactgaagtagagagcagcctgtttcatagaaatctgtgactatgttctctttgatccataatggagttaattataatcaagta

SEQ ID NO: 550898 - DNA, 624 bp, Homo sapiens
caattgagctagaaaattatgaaataattgtaaacacagtatgactcctttaaataaaatatttgtgaaaattggagttatgcactgttttgcccaacagagcaagagaagactttcattttagtaatgtataatcaggtgttgtcattcatttctaaagttcctgttgactctgagatgagccattaatgtgtttatttataggattcacagtttgttttgatttcattcgtttcaactgacattttagaggttaaatgcatgacttgattattttattataaacttagacagtaaaggtctcagttctacttattaagtaacaatttattttcttgcccttaactagaaactattcttgttaggccagtaaaacaatacaaaaaagaacattacaattgttattaattaacaaatagtagctgtgttgtagaagtaatggtcaactctaaatgygatttgcagggtttatcttaagaatatgtaataacaggtttgtaagaacagtctgagtgttggcttctagcaccaatactgacagactgaagtagagagcagcctgtttcatagaaatctgtgactatgttctctttgatccataatggagttaattataatcaagta

SEQ ID NO: 550899 - DNA, 625 bp, Homo sapiens
accctgttcagattgagaaaagctgatccagaggactcttatccactctggaactgagttagataatgatatcctgcatctcaagttccaggataatggcataaatcatgagatgagacttttgggcatctggaaagataaacatattttgcatgtgtgaaggatataaatcattcagcacaagaggtcagattctggttgtttgttgtattaatggtgcctgatgaaccatagcctcctacattctaacacaygtgtagcactttctccataaagctggatagggcttgtgacttattttaactaatataattcagtggaataacatgagtaatctccagattaaacttttaaggaagcctaataactttatagagaattagattaaaaaagaacactaaatgttaaatataaaattatagtgcttataaaatcatagaatatctctgtgaccttggtttaggcaaagatatgttaagaagaacactagaagtataatcaataaaaaccaaaacattacaaattggagtacatcagaattaaaatatctactgttaacttctggtttaagttccaacaggcaacgagtttggaagtaatcacttccatccttacaacaaggaaa

SEQ ID NO: 550900 - DNA, 814 bp, Homo sapiens
acaagattgatggaaaagagcactgctatattaaattcccctcctggctaggggcagtggctcactcttataatcctagcactttgggaggccaaggtgggtggattgcttgagttcaggagttcaagaccagtctgagcaatgtggtgaaaccccatatctaaaaaaaatacgaaaattagctaggcatggtggtgtgctcatgtagtcccagtatactcaggaggctgaggtgggaggattgcttgaacctgggaggccgaggttgcaatgagccaagattgccccactgcattccagcctgggtgacagagtgagaccctgcctcaaaaaaaaaaaaaaaaaaaaaaaatcccctccatgctaagaagtactggtcattctagcttgcaaggccaagataaaacttgtgattagaggattttctctcttcgacatatcctagaaagtcaagctagattataaaccaaagaaattgaaaaagtagaagcctattttaccaattgctatgataatttgggccagaaggagactactaaatatgggtccgggtgaaagtgtcaaatgataagcaagagaaatttgaccaaatgattcataagagcaaatgtcgcaaaaaaaaaaaaaaaaaaaaaaaaaaaaaaaaaaaaaaaaraagagcaatagagtccagttgttacgggattcttgcggtatcacttctctggcctgaaacctctgactggtggcacctttgctcgagttttgcttgggcccctgggcttgttctgtccacttggcctgacaggttgcactcagctcgcactactggcct

SEQ ID NO: 550901 - DNA, 307 bp, Homo sapiens
tatttacttcatctatctttgttcttctttatatttctaaagcatattttttaatccgaaacaatgtgttatcttatttctacatacatacattctacattctttatatatttactacatatttatgtattttaatcaatatattgtttttcatgtttttaaacttcatatmaacagtacgcaattgtatgtgtttgtattagcccattcttacactgctatagagaactacttgagactaggtaatttataaagaaaataggtttaattggctcatgattctgcagacagtacaggtagcatggct

SEQ ID NO: 550902 - DNA, 307 bp, Homo sapiens
tatttacttcatctatctttgttcttctttatatttctaaagcatattttttaatccgaaacaatgtgttatcttatttctacatacatacattctacattctttatatatttactacatatttatgtattttaatcaatatattgtttttcatgtttttaaacttcatatcaacagtaygcaattgtatgtgtttgtattagcccattcttacactgctatagagaactacttgagactaggtaatttataaagaaaataggtttaattggctcatgattctgcagacagtacaggtagcatggct

SEQ ID NO: 550903 - DNA, 543 bp, Homo sapiens
agccattgggagcttttcatggaaggagtagtgataactgaatataaaaacttagttttgctccttctttgctcctacagtcactgggaaaatgctcatttgctctgtggggagactccatccttggcttttaggtttctgttttacatctcagatacataatcactagatactagataatgggcctgagaatcagttccttacccacacaaaggcttgttttttttaggagaccattgcaacaaagccaggattccttgcatcactaggaggctttggtggaagcgtttatccatgccaaagaaatgcttatattgagttcagcaattaacatatctgtgttagcatttatcatatgtattcaatttattctgctttataaggcagagggtttttacaaatgtttactattcttagtttctactgatggtctttccctaccttgtcccatttacccccarttattcttttgggaactataaattcgtaaactctaagctcagatcaatttatttttatttttgtgcatatggttttgctttt

SEQ ID NO: 550904 - DNA, 947 bp, Homo sapiens
actgggattaccggtgtgagccaccacgcctggccctgtgtaactttcaagggtacttcattttaaatttcaaacttcaaaacagctgcaaaaatagaacaaggaattcccgtccaccttcacccagattccccaagggctcacattctgccataactgctttatcatccccttaccggcaggcacatgcgtacacacacatgcccacacatgcgcaggcacacacacccacacacacgtacacacacacgcacacacacaggcacgctcacttttctgaaccagttagagtgtatttaacaaaagcaaggtcgctctcatacctaaccacagtacaaatatggatggttaaaaaaactgaccctgatacaataacatcacgtggcagatcttattccaattttgccagctgctccaataacatccttcatagcaaaacatgttttaaaatccaggccgccagtgtctaagccgcggagggatgcagccagggacagctcccctgtgacaagcaagcagggtggcagatgggaggtgggaccctccgtgtgtgtggccttcctgccctcccgccgtgggctctggcgcagtcctggctctgtgcacccgtttctcatctacacaatgagagtagaaacagcatctaaacctgagaaggatggggtgagactggacacaggggccacacaaaaggcctcctccaggctcagatgttccacagtagacgaggctcagagagaggctggccctggagccacagrcttcacttcaaggaacgtggagtatgaaggggccaagggcacgcccaggacactgggtgatgcctcagagctgggaaaagtcactgctggagtctgggccgtgcacagcgccaggaaggggtctgtcccggagccaaggaggagcatccagtgcttctggaagatgatgaggaaggctggggctgg

SEQ ID NO: 550905 - DNA, 1382 bp, Homo sapiens
catcagatgtgtttctccatgttattacgacctttgcagaaatcattatgagagatttcagtgtttcatggaggagataagcatggtctacttcgtcagttccctattgttggtcctgctagttgtttccaatttttcttttcttctgcgtcttcattttaaggtcctttctctggctgtgatccatgcttcttcccagggcaggattacactctttgaatttacttattcatcaagacagtgcagagtggtggaaagagaagcagctgagagttacgcaggtccgtgtgcaaatccttctctccatgtgtgtccacttcagtcagggagtaatctcccttttctgagcctgtttcctcatctataaagtggcaatcacaatcccggttttaaaaagcggccgtgaggctatgaaccagtgcatgttcggtgccctgtaggtgcttactaaagctagtgaatgttatcgtgcacccactgggtgtcagctgagttcacttatgtagcccctgagtcttgtatggatacttagtgatttgcttttatttctgttgaggctgctggtttgtctcctgggtgattattagcctgttcgagcagcgtgtttctggggcattgggtccattgtgcagattcaatgggctggtgaataacttgtaggccagtctttgtttcaagaggatcccttcccttgtctctgaggcctgactcatctgtcagcttgagctccgaggaacaatagccagagattctcaagagcagaggtgaagtctggctaagagtgacatctgtctccctatcccatcccactctgatcagatcagatgaggcaggtgtccccttatcccttgtggtgccaggtgggcccctctggaagctaccagatgagtcatggaagggaggcggrtgctgagctattgtatactcaaaggtgtggagtagatgatgagtagtaactaaccctaactaccactttgttaccgtttaccaaggttcttgctgagtgctgcatcatggagactccatgataaggcagggattaggcattgcaggtgggaaacaggctcagagaggtgaagtgatgagcccagggccacgcagcgaattagctgtgcagtcaggatgtcaacccgtatcttgtttgactctgaaacatgtgtttgtaactactacactatgccactctcctaaaagtgaactcaatcatttgcctacagactgtgaaagcaaccggcataaactgaacagagatgatttatcaatcatgggccagttttctcacagtaatagtaatgcagatggccatcgagtttgcagtttacatataccttccttggatcttttatcatttaatccatatatatatggatctatatagatcc

SEQ ID NO: 550906 - DNA, 547 bp, Homo sapiens
gtttgaaactccccctggcatcgaatgaagaagctcctgtgatttcaaactagagccaccttgtgtggcaaaaaaggagatgatggaggaatatgctttaaatcatcagcagtcacgcacccaaaaatagtgtgacaacttattctatgcagcaggaataaaaataattaataagaaagaagataagggttcagtgtgggtggacaacacgcaggtctacagaaatgagatgactttagaaatataagcaaaggataatgaaaaaaaggaggggaaggggaattaaacagggtcctggtctgatgtcttgggtagaagcttctcacaatcaaggactaccagctcattctgcaggtcttaggtcagccatctgcttaaaaacatcagaaacgccagagaatctatgaacatgstcagtttaacatttcctatttgagtagctttacagttgtgtggaattcttaactggttcttgttttttcttttagatacaggctctcaccctgtcacacagtttaaagtgcagtggtgtgatcatagctcgctg

SEQ ID NO: 550907 - DNA, 547 bp, Homo sapiens
gtttgaaactccccctggcatcgaatgaagaagctcctgtgatttcaaactagagccaccttgtgtggcaaaaaaggagatgatggaggaatatgctttaaatcatcagcagtcacgcacccaaaaatagtgtgacaacttattctatgcagcaggaataaaaataattaataagaaagaagataagggttcagtgtgggtggacaacacgcaggtctacagaaatgagatgactttagaaatataagcaaaggataatgaaaaaaaggaggggaaggggaattaaacagggtcctggtctgatgtcttgggtagaagcttctcacaatcaaggactaccagctcattctgcaggtcttaggtcagccatctgcttaaaaacatcagaaacgccagagaatctatgaacatggtcagtttaacatttcctatttgagtagctttacagttgtgtgraattcttaactggttcttgttttttcttttagatacaggctctcaccctgtcacacagtttaaagtgcagtggtgtgatcatagctcgctg

SEQ ID NO: 550908 - DNA, 1126 bp, Homo sapiens
ttacctccaatattagactccactttatcacatgcagacactgcagaatattttaagacatcgatgtcttatgctgaaaaattcaacagtacataaaattgccttcccaccacagccagtggttactactgaataaggatctgccatcccctagggaggtgctatagtggatggtgtgcactgttagtagctawggaaattgatccattgtggcaaatggcagcatctttcttttataacattaaaccatattatattgtatacacataccacattgtctttattcatttgtctgtatgctgaccatcagatagtttccatatcttcgctgttattaacagtgtttcaataaacataggatgcagatatgtttacaaggtggtaatttcatctacttgggtatactcccagaaacaggatttctggtcatataatatctccagttttaattaatttaggacgctttatgttgctttccataattgtggaaatgtagaatggtatagccattatgaaaaacaattttggttttgagttatgatccataaacagcatttgcttatggctctcaatgagagtttctactaaatatgatggaaggccaggaaggattctcaccttaaagcttggatggattatgaatttacctcttatttcctaaaagcaaaagtttggaagcatacatgatggaggctgttggcaggtttcaggatgatctcataaaaggagaatctgctggataaaaatgttgggttttcagttatagacacacctacactcaatatgaaatgatgaagtcaactgaggatctagaacatgttcacttgaagcaacagcacattctcaaaggaacttattgctccatcacaagggcgatgaacttctgaaaccagtaaagtgtgagtgcacagtaagtgataacgttatcacgtttacatgaagtttgtttaatgtgccaaaggctggtacagattaatcttacacaaatatatgaaacatatttttccatacatagatatctagaggataatcctcttagcaaaacttcttcaggttacagaaatctgtgtaagttgtagatctcatggggaactgtctctttataaatactggtctgtttttcaag

SEQ ID NO: 550909 - DNA, 1126 bp, Homo sapiens
ttacctccaatattagactccactttatcacatgcagacactgcagaatattttaagacatcgatgtcttatgctgaaaaattcaacagtacataaaattgccttcccaccacagccagtggttactactgaataaggatctgccatcccctagggaggtgctatagtggatggtgtgcactgttagtagctatggaaattgatccattgtggcaaatggcagcatctttcttttataacattaaaccatattatattgtatacacataccacattgtctttattcatttgtctgtatgctgaccatcagatagtttccatatcttcgctgttattaacagtgtttcrataaacataggatgcagatatgtttacaaggtggtaatttcatctacttgggtatactcccagaaacaggatttctggtcatataatatctccagttttaattaatttaggacgctttatgttgctttccataattgtggaaatgtagaatggtatagccattatgaaaaacaattttggttttgagttatgatccataaacagcatttgcttatggctctcaatgagagtttctactaaatatgatggaaggccaggaaggattctcaccttaaagcttggatggattatgaatttacctcttatttcctaaaagcaaaagtttggaagcatacatgatggaggctgttggcaggtttcaggatgatctcataaaaggagaatctgctggataaaaatgttgggttttcagttatagacacacctacactcaatatgaaatgatgaagtcaactgaggatctagaacatgttcacttgaagcaacagcacattctcaaaggaacttattgctccatcacaagggcgatgaacttctgaaaccagtaaagtgtgagtgcacagtaagtgataacgttatcacgtttacatgaagtttgtttaatgtgccaaaggctggtacagattaatcttacacaaatatatgaaacatatttttccatacatagatatctagaggataatcctcttagcaaaacttcttcaggttacagaaatctgtgtaagttgtagatctcatggggaactgtctctttataaatactggtctgtttttcaag

SEQ ID NO: 550910 - DNA, 697 bp, Homo sapiens
agccaactcatatcacagtccatgtttacgacagcttaaaataaccagatgtgccatttcccatttgaaaaaagggaagtatccaaccccgacagcattctagtctgaaagtaaccagtgaggacacagatggcacgtgggcagataatgccagtgagtaacactaggaggggcggttggttctaaggaggggagagtaatgagtaaataagcaatggttcttaaatccctgcaactggacatctctctcctcagtgaaaaagaagaaagggcaaggcgaagactctttgtatttagccaagtagatgtgtacagaagtcagtgttttatcagaatatgctgttttgcaccaagcaatctgggtggagcacagtgtgctgactctgttatctacacatccccctgcagctttcctcgtgttgggcctgagtgtcttgaccacttacggagttcatgccatcaccaggctggaggcctggagcctcgctctcctcgcgctgtttcttgttctcttcgttgccatcgttctcaccatctggaggcwgccccagaatcagcaaaaagtagccttcatggtatgtgtaatgaggattagagacccaaaatactgtattcattttctctgtataattagtttggtaagtatttttttttttttttttggagatggaatctctctctttgtcactcaggctgg

SEQ ID NO: 550911 - DNA, 629 bp, Homo sapiens
tcgtggttaaaagtgaccccatcagcacccgctgatccttcttgaacttgataaccttggtgaaaacgccaagcgttggagaaattcaaggaatggctgttgtaatgtacatttcacgcttagcctttcctccccgcgctgggaagaagtgctgcgcaccgcggctccgccagggggcaggagaagtcacattacacagagaactaaaaaaaaaaaaaaaaaaaaaaaaaattccccaactttttcccccaaaccttgttcctcctsaagaaaccgaatcctcccgcttcggcgtcccaggagcccgcccctcgcccgccgcctcccctgcgtccccgccccgcgcagccgccgcgctcctgcgctccgaggtccgaggttcccgagatgaaggtctggctgctgcttggtcttctgctggtgcacgaagcgctggaggatggtgagtgactctgggcgcggggccacctagcttgtgccctgactttagccgggacccgaagcccccgccgccctcctgccagctcttggtctaacgttcggccctcggtggctcagcccccgcgccactgcctgcccggtgcacctgccccctcctggtggggtctcctttcctcccactctttgcc

SEQ ID NO: 550912 - DNA, 665 bp, Homo sapiens
ataaagagactgtgctcaaagatcaaacgatgtcagacattagtacggaagtcaacagcagtatatatacggaccacacacccttcctgatcacctaggatgttaaatgtaagtttgccactgcttccaaatgccatcttatggagaaagaggcaaagggaaagagaagaatagcccaaataaggagttaatacttcaaatggatagtttgagtcattytgttgtgaagctggctaaatattgacacaaatgataccaattttaaggcgaagatgaatataataacttgaagaagaaaaatcattgccactggtaataagagttgcaggaaaaattgagttcagaaataggcaactttttagaaaggtatttctctgtgtctcagttgaagtatgtacattttaccaactacaaaggaagcagtttggaatagttggcaaccagaaaacatatgggactttctgtaatttgcatggctttctgttggcactacttggaggcaccaagaacaatttctccttccccacctgaatccctcagaattctggcctctggtctttgctttgggtctttctcccatagagaccttattaatggcacaagacacaaaaaactagccacttaaagtgcacaacttgttttgctatagatcaaagggccatgga

SEQ ID NO: 550913 - DNA, 920 bp, Homo sapiens
ctggtctcgaactcctgacctcgtgatctgcccacctcagcctccaaaatgctgggattacaggcgtgagccaccatgcctggcctataatttttaaaaatatcttcaatctaattttttaaaataacattttctgccttgaactttagaggagattttcataagtgaaatctatttgtgtaaggaaacttaaataaatttttcagttactcctttagtttcatgttaggctctactttataatacattcaagacaagtgaaaataatcctttacattttaagtgggctgcattggacgactctgctttcattgaggggatatgtataggtaatgattagtttaaagaagacatatctgtgattttttttcttaatcaaatttgtatctgttttaagaagtgcacatgatggaatcaagtgggcaatctctcagaagccataggagatgtgttaataaaatagtagaatagggatcaaatagaattagattgaaattaaaatctatgaaggtgaagaagaaaaaagaataatgaataaaagatgaggaaatgaggaaagatgtactgtgccttaggactactgaataccataataagccatgctcagtagtaaaagagaatgtcataggaagtgtgtattacaactgtgagccctacacagctcaacacttatacttggtaggyttcttataacatctgatactaatacgccctttgcattaaaaataaaagttttttgtacaattaaccttctcaaatgtcatcaacaagtcatcaggactgatgtttaaccaaatctgcttctaccttttgaaattaagatcagctatattattctctcaagagttttatcattagactctggacttggatgtctatcccactcatggttatagactctgtgaagaatatatattgtg

SEQ ID NO: 550914 - DNA, 1448 bp, Homo sapiens
aaaactatgcatcagtgaagtatcttggaccttgagctagatgaggtgacttagtgggactttggcttatttctcctgggaacaagctgagtgtattctatgtatgggaagaatagtaaaatggatattcagtaaccagagctgaggactgaagtagaaacaatgtgacgtgttgcctaaaacatgctacatggttcctttttcttctggagacagctaagactatgtttctcaactctcattgcaatgaacagaccaaagaaatatgagtggaagttataaatgctacttccaagtctggcttctaaaatctcctgtgtgatacttcacatgctctttttctcatcctctgcagctgaatgaaatgaatatagaggagaactgaaaggccatggaggatctgagccactacatggaaagagcaagggtccatgaatgacrgcttgaaacagggtccctctctgctgccaacctgcatggatggagacatgaataagaaataagcactactgagtcaagacagagagatctgaaggttgattgttatagcagttggacttccctattatctaatatactgtgctatcttccaatgcttagctagtaaggggggctctagggataccagttaaagaactctggaatgcatcccttgcaagtctgagatattaaaggccacaattaggtcatgttaagaaatctaaagctgactgtagactgaagtctggcttcagtaaatatgaaagagaaaagaagagctgactaactgctttgaattagagccaggagagactgttgcattgctactgacctgcagttagaaagttcatcagggcaaggagccagtgattgtttcccagggaacatgtgtgggccaatgatacagagctcactggagttttggttggttttgtccagtaggtttgcctggagggagaaggaaaacttacaaaaggagactgggggtatacttgtgtgtgaaggcccagataatgaggacagatccccagagacctcctagaatagctagaaaagcctggggtcaaagaagctgcaggggaggagtgtccaacatgaaacctctgaggagttcagggaaacaccccaagagaaaggaagtcagctttaatcttcggcagggcctagagagtgagaagtcaatcaggaataataaatgacccatctccttgtcccctgtaccctttgaaccagaggggagcaaaacagaagctagctaatgaaagatgtgttatagaattcaagggtaactgaggttatgctgcagaagcaaataacaaaaagatctcgaggacttcttgtttaagttctttttttcttcacatacatttattttctgttcacactacagtatgttatcagttagcatgggtctctgttcagcatagttcaggcaggcacacaggccaatagaggttctgtcttgatac

SEQ ID NO: 550915 - DNA, 675 bp, Homo sapiens
agcttcctcttttatttcgttggatttttttttttttccacagagctgcactggttgggtcactgaaaagtctcattcattcaaaaccggaagcctagccaggcacagtggctcacacccataawcccagcactttgggaggccaaggcaagaggatcggttgagctcaggagttcaagaccagcctgggcaacatagcaagaccccagctgtattttttttttttttgagacagaatcttgttttctctcccaggctggagcgcagtggcatgatcttggctcactgcaacctacgtctcctaggttcaagaaattctcctgcctcagcctcctaaatacctaggattacaggtgtgtgctgccacgcctggctaatttttgtatttttagtagagatggagtttcaccatgtcggccaggctggtcctgatctatttttttttttttttttttgaaaattcagaaaccttaagaccgtgcttagatactaatactctcttggcacatccaacttcaaaagatgaggggagaggaaagtaagatggggaaacagagaaagcagataacaaggcagtccactactgctctatccccaacttcacagaacatccagctgatggctagcttatggaggatggctctgaagagtttacatagaatccatgtatatcac

SEQ ID NO: 550916 - DNA, 675 bp, Homo sapiens
agcttcctcttttatttcgttggatttttttttttttccacagagctgcactggttgggtcactgaaaagtctcattcattcaaaaccggaagcctagccaggcacagtggctcacacccataaacccagcactttgggaggccaaggcaagaggatcggttgagctcaggagttcaagaccagcctgggcaacatagcaagaccccakctgtattttttttttttttgagacagaatcttgttttctctcccaggctggagcgcagtggcatgatcttggctcactgcaacctacgtctcctaggttcaagaaattctcctgcctcagcctcctaaatacctaggattacaggtgtgtgctgccacgcctggctaatttttgtatttttagtagagatggagtttcaccatgtcggccaggctggtcctgatctatttttttttttttttttttgaaaattcagaaaccttaagaccgtgcttagatactaatactctcttggcacatccaacttcaaaagatgaggggagaggaaagtaagatggggaaacagagaaagcagataacaaggcagtccactactgctctatccccaacttcacagaacatccagctgatggctagcttatggaggatggctctgaagagtttacatagaatccatgtatatcac

SEQ ID NO: 550917 - DNA, 675 bp, Homo sapiens
agcttcctcttttatttcgttggatttttttttttttccacagagctgcactggttgggtcactgaaaagtctcattcattcaaaaccggaagcctagccaggcacagtggctcacacccataaacccagcactttgggaggccaaggcaagaggatcggttgagctcaggagttcaagaccagcctgggcaacatagcaagaccccagctgtattttttttttttttgagacagaatcttgytttctctcccaggctggagcgcagtggcatgatcttggctcactgcaacctacgtctcctaggttcaagaaattctcctgcctcagcctcctaaatacctaggattacaggtgtgtgctgccacgcctggctaatttttgtatttttagtagagatggagtttcaccatgtcggccaggctggtcctgatctatttttttttttttttttttgaaaattcagaaaccttaagaccgtgcttagatactaatactctcttggcacatccaacttcaaaagatgaggggagaggaaagtaagatggggaaacagagaaagcagataacaaggcagtccactactgctctatccccaacttcacagaacatccagctgatggctagcttatggaggatggctctgaagagtttacatagaatccatgtatatcac

SEQ ID NO: 550918 - DNA, 675 bp, Homo sapiens
agcttcctcttttatttcgttggatttttttttttttccacagagctgcactggttgggtcactgaaaagtctcattcattcaaaaccggaagcctagccaggcacagtggctcacacccataaacccagcactttgggaggccaaggcaagaggatcggttgagctcaggagttcaagaccagcctgggcaacatagcaagaccccagctgtattttttttttttttgagacagaatcttgttytctctcccaggctggagcgcagtggcatgatcttggctcactgcaacctacgtctcctaggttcaagaaattctcctgcctcagcctcctaaatacctaggattacaggtgtgtgctgccacgcctggctaatttttgtatttttagtagagatggagtttcaccatgtcggccaggctggtcctgatctatttttttttttttttttttgaaaattcagaaaccttaagaccgtgcttagatactaatactctcttggcacatccaacttcaaaagatgaggggagaggaaagtaagatggggaaacagagaaagcagataacaaggcagtccactactgctctatccccaacttcacagaacatccagctgatggctagcttatggaggatggctctgaagagtttacatagaatccatgtatatcac

SEQ ID NO: 550919 - DNA, 675 bp, Homo sapiens
agcttcctcttttatttcgttggatttttttttttttccacagagctgcactggttgggtcactgaaaagtctcattcattcaaaaccggaagcctagccaggcacagtggctcacacccataaacccagcactttgggaggccaaggcaagaggatcggttgagctcaggagttcaagaccagcctgggcaacatagcaagaccccagctgtattttttttttttttgagacagaatcttgttttstctcccaggctggagcgcagtggcatgatcttggctcactgcaacctacgtctcctaggttcaagaaattctcctgcctcagcctcctaaatacctaggattacaggtgtgtgctgccacgcctggctaatttttgtatttttagtagagatggagtttcaccatgtcggccaggctggtcctgatctatttttttttttttttttttgaaaattcagaaaccttaagaccgtgcttagatactaatactctcttggcacatccaacttcaaaagatgaggggagaggaaagtaagatggggaaacagagaaagcagataacaaggcagtccactactgctctatccccaacttcacagaacatccagctgatggctagcttatggaggatggctctgaagagtttacatagaatccatgtatatcac

SEQ ID NO: 550920 - DNA, 559 bp, Homo sapiens
ggaccccatgcagaactggagactcagtcttcccatgaaatatcacaacactattaacgaggtgcatctgagaatgtgaaaaagtttggtatgttcacagagtggctgttttctaaatctacttcagaggcttatagggttcctggagacgtttatagggtatcctcaaagtcaaaagtattttcatacaattacatatgacatcatttgctttttccactctcattctctcctgagagtccagtggagctatctgatagacacatgacatgtgatgtcatttgtgctctgatagctaatggarcacactcttctgtattcttgaatttttaaatttcttagctttagtttataaagcagaaactactaatagatataacctgcataagcaaaagttcagtaaggctataagagtttaagtaggttcagaacatgtaaaacaaggtagaggtggcagaggtaagacagatgagatagataatggccaggtgaggacgggtttggattcacagcaagggcagtgagaaaaccatgtgctttatgagggcatgatatatgg

SEQ ID NO: 550921 - DNA, 559 bp, Homo sapiens
ggaccccatgcagaactggagactcagtcttcccatgaaatatcacaacactattaacgaggtgcatctgagaatgtgaaaaagtttggtatgttcacagagtggctgttttctaaatctacttcagaggcttatagggttcctggagacgtttatagggtatcctcaaagtcaaaagtattttcatacaattacatatgacatcatttgctttttccactctcattctctcctgagagtccagtggagctatctgatagacacatgacatgtgatgtcatttgtgctctgatagctaatggaacacactcttctgtattcttgaatttttaaatttcttagctttagtttataaagcrgaaactactaatagatataacctgcataagcaaaagttcagtaaggctataagagtttaagtaggttcagaacatgtaaaacaaggtagaggtggcagaggtaagacagatgagatagataatggccaggtgaggacgggtttggattcacagcaagggcagtgagaaaaccatgtgctttatgagggcatgatatatgg

SEQ ID NO: 550922 - DNA, 625 bp, Homo sapiens
gttccagcatttaatgatcagatgattattggaaatttacttaaaatatattaagcatataataagtacagtaatgactaatccctattccagaaaatcattatatggcccaatttaggtggcagactaaaaagcatttgcatgtaagtctacatagtaaaataattattattgtaaactgatttgaataatgtcaaccacatatatttaagcctttaaatttatatatttcattctgaatcattcaattttcaaaaccagaatgtaaaggacagggatttgatatgggataatttctcataaagctaagtacttatctcttamagaacaattttgcaacgtatcattagcatatcttgcataaaattgcttcatgctcctgtccactaataattatctctgattacagcaaccccgaagggaattatctaagcctaaattttcagaaactttacaaaaccagcatacttggtgatgtggtcccactcagggaaataaacttaaaaagagctcgatggaagaatataatttctcatttgaatagaggcaagtaggaaataaagccaagtgtggaactaaatgtatcattgccttcaaagtcatgactaaactatgaagtttaatt

SEQ ID NO: 550923 - DNA, 1570 bp, Homo sapiens
agttacctgtatcacaagagttggatttacctttaactttctttatagcatctgaataaagattgcacaatgatgcagcaaagagaccaaaagttaatgtatacaaaagattacctctgccacaagaggtaatataattaagaggacaaaagttgccaactccccragaaaagaccacgttaagtttaaaagctagaacacaaccacttcatgcatcttgaaggactgtcactcagatactatctgccaaacacttctgaataactcctaagagacatagtttaactacaggtgacaaaatcgtaagtgtaacctagtagaacaaagaagcttttaggggtatttataaaaagagctcaagttattcacagtagggaaatataaattaaagcctaacaaacaaaaacaataataggaaatgagacaccagtccagccctaacttatgggatgctgttaaaactaattgattaagtacattaattggcagatgcctaaacccaactaagctagagcatgagctcacaaaagacttgacatgagtaaagccagaatgtggagagaatgcaagacagggtatagagtaataaaagaagaaaattggggagatactaatatggaaggcaagacagaggtagtatcaggtcaagccaatgcgagctaggatcccaagcacaggtttagaaaagaaacatgtcacccaatctcacaaactgcccacggacagaagtagctcaggagactcccaggggtgtccaagggagagaatacagttgtgggttcttcgtttctgtttctggttgggccagtaaagcccctttctcatctcttttttccacttatcactagagacagaaactaaaaatcatggtttcaggctgctaaaagcctaaaacaaaacaaaacagaacaacaacaaaataatgtgggctggacaagcttgctagatattccaggcaaaagcacagacttggtctttgacagagatattaaagaagaaattatacaaaattaagtggatacacttatactattgtcggttggaaaaaattattgtacatttaacagagtggcaatttctctcacttaccaaaaaaggtaataaaactctggtacgttttagaataaatagtgcctttgaattaaggaaatatggtattgagagaaatctgagattccaggtttctgacatcaaacagtatgtgtgaggcaaagccaagtgccaaaaatagcacaagaacaattctgtctttgctgtattacagttactaaccttagcaatttacttactaacatacatttgaggcagttccctcttttattacttgcttttagtacttcagcacttcctatctcagctggatccccacccgctttctgcagtctttacggacaccttccctagtcagttcaccttcccactctcctcatgacaattctaaaattgtttcaagctcagtcccttcactctctacaaataaccttgcattctacgttgacaagaatataaaagctctctaggcattagtttcctcaaattgtctcccatcttctgtttgggcatgcacaga

SEQ ID NO: 550924 - DNA, 572 bp, Homo sapiens
atacccaaccatgggagcccatgcctttcctccttgactggatgagaaagtactcgaagtataatgagcacaagatattataaaagctacctaggaaataaggaacaaatagaagaagaaatgaggttgcagagtggggagagaaaagaagggaatcagtagggttattgctgtgcctgtcatctccagatgcaatcagtgcctacaacccccakgcccacccacaacatatatctgaaaatatatacatacatgttttcatatgtacatacagctttgcctcaagcctttattctctcaattacttattaatatctctccattcattccacaaatctttatcaaacacccactaagtgcctggtaccagattaggtgctgggaatacagaaatgaataaagacacaaccctccccctttaccacaaagcactgctctctcaacagataccacacacacatcacacacactccacatatacacaagcaaccctgcccctaccagctggcgcccgccttatatctcactttcccttttcttcttcctttttttttttttttttgagatggagt

SEQ ID NO: 550925 - DNA, 572 bp, Homo sapiens
atacccaaccatgggagcccatgcctttcctccttgactggatgagaaagtactcgaagtataatgagcacaagatattataaaagctacctaggaaataaggaacaaatagaagaagaaatgaggttgcagagtggggagagaaaagaagggaatcagtagggttattgctgtgcctgtcatctccagatgcaatcagtgcctacaacccccatgcccacccacaacatatatctgaaaatatatacatacatgttttcatatgtacatacagctttgcctcaagcctttattctctcaattacttattaatatctctccattcattccacaaatctttatcaaacacccactaagtgcctggtaccagattaggtgctgggaatacagaaatgaataaagacacaaccctccccctttaccacaaagcactgctctctcaacagataccacacacacatcacacacactccacatatacacaagcaaccctgcccctaccagctggcgcccgccttatatctcactttcccttttcttcttcctttttttttttttttttkagatggagt

SEQ ID NO: 550926 - DNA, 1250 bp, Homo sapiens
agacacaataactttgaactaaaataattatatttttgttgttttccactctgtcccccacgtctatatcaccaccacccccaatcccgccccccaggagctaactcctccttcctgtccctgcaagatcaaaactcctcctggaagccccgctagctctgtctgctcgccttcgtggcagatatcgctattgtacttttatacttatttgtgtgataagtacctcaatgtccacttcttccacgagcccctgagcccctggagggcctggaccacacctagtttttctcactgttacatctcccttgccagacacatggtaggcgcttaataagtatttggtgaacgaatggcttgtttggtgacagtccaaagggtgggggacagagggaaaactccctcctatcgggccccggacgggtggcgctgatggagaggaggctaggataacgcctccaggaccgaagcgcgcacccataaggcccctgccaaaaagaccttcctgaaggcggaggaactgcgagagtgcctacgttggcccaaggcctgaccggacgatcccggggaccctcgccctaaccggccccgactcccgggccccaaacccggactcggccccgcctgaagctccggatcctggggcccgtccctggctccgcgtcggcagaccgtgggctcgctcctgggcctgcctcaaactctccgcaggtaacgcctcccgaacttgagccacgctccaatcccctcctcaaacccctccccgtttctcacaccctggacccctcgctccgtctcggccccgccccaagcccagctccctctcggcccctgagcccagccccgacccgcctcccagtccctgggwccctcccgacaccggcccctccctaagctccgcctcccagggcccgcctcctgagcgcagccagcagcccggactcggccccgcctcccggaccctgggcccctccccacgtaggcccgtcctaagctccgcctcccagagtccgagcagcgcctggccacgtgctacgacatagtcaacgccccgccctggccccgcctcctgagccgttctccgggtctggccttagccccgccctaggacctgtctcctgggctctgctccgagtctcgcctcctgaacccaatcgtcctttacccccaccctaacgcccgcctccaggactcttatcctgcccccacgcaaggccccgcctccaggacgtctccaacctggatgtttccga

SEQ ID NO: 550927 - DNA, 1250 bp, Homo sapiens
agacacaataactttgaactaaaataattatatttttgttgttttccactctgtcccccacgtctatatcaccaccacccccaatcccgccccccaggagctaactcctccttcctgtccctgcaagatcaaaactcctcctggaagccccgctagctctgtctgctcgccttcgtggcagatatcgctattgtacttttatacttatttgtgtgataagtacctcaatgtccacttcttccacgagcccctgagcccctggagggcctggaccacacctagtttttctcactgttacatctcccttgccagacacatggtaggcgcttaataagtatttggtgaacgaatggcttgtttggtgacagtccaaagggtgggggacagagggaaaactccctcctatcgggccccggacgggtggcgctgatggagaggaggctaggataacgcctccaggaccgaagcgcgcacccataaggcccctgccaaaaagaccttcctgaaggcggaggaactgcgagagtgcctacgttggcccaaggcctgaccggacgatcccggggaccctcgccctaaccggccccgactcccgggccccaaacccggactcggccccgcctgaagctccggatcctggggcccgtccctggctccgcgtcggcagaccgtgggctcgctcctgggcctgcctcaaactctccgcaggtaacgcctcccgaacttgagccacgctccaatcccctcctcaaacccctccccgtttctcacaccctggacccctcgctccgtctcggccccgccccaagcccagctccctctcggcccctgagcccagccccgacccgcctcccagtccctgggaccctcccgacaccggcccctccctaagctccgcctcccagggcccgcctcctgagcgcagccagcagcccggactcggcccsgcctcccggaccctgggcccctccccacgtaggcccgtcctaagctccgcctcccagagtccgagcagcgcctggccacgtgctacgacatagtcaacgccccgccctggccccgcctcctgagccgttctccgggtctggccttagccccgccctaggacctgtctcctgggctctgctccgagtctcgcctcctgaacccaatcgtcctttacccccaccctaacgcccgcctccaggactcttatcctgcccccacgcaaggccccgcctccaggacgtctccaacctggatgtttccga

SEQ ID NO: 550928 - DNA, 1386 bp, Homo sapiens
tccaaggaaatgtgataacaggacagaaagcatcgtggaaggataggggctttggagtcccacaaaccacagtttgcaagaccaggagcatcctgcacttccttgcacacatcctgggtgggtgctggagcatctagacttagagtgaatcttctccccctcctcccccaactggcctccattaaacttccagcaacaatgtggtgtatgtacacaatggaatactattcagccttcaaaaagaaggaaatcctgccatttgagacaacatggatgagcctgcaggatattatgttaagtgaaataagccaggcacagaacaacaaataccacattatctcacttacatgtggamtctaaaaaagttgaactcagccaggcatggtggctcatgcctgtaatcccagcactttgggaagttgaggctggtacattgcttgagcacagcagttcgagaccagcctgcataacatagcaatagcccatctctacaaaaaatacaaaaattattggagcatggtagtgcatgcctgtactcccagatactcaggaggctgaggtgggaggattgattgaacttgggacgtcaaggctgcagtgagccaagatcacacccctgcactacagcctgggcaatagaaggagattgtctcaaaaaaaagaaagaaaaagaaaagaaaaaagttgaattcatagaagtgtagtagaatgatggttgccagagtggggaagtgggcagatgccaaaggacacagaatgtcatttttagagaagaataagttcaggagatccgtgggacaacatggtacctatagttaataacaacatatcatacacttggaaatcactaagagagtagattttttaagtgttctcaccacaaaaaaataagtcttggaggtgatatgttatttaccttgatttagccatttcataatgtacacatacttcaatcacatcatgttgtatacccttttgtacataatttttgccaattcaataaattcaacaactccaaaaaacaagacattctctttacaaaaataattattaaaaataaaattcagaattctattttatttatttatttatttttgaaacagagtctctctctgtcacccaggctggctgaagtacagtggtgcgatctcggctgactgcaacctctgtctcccagattcaaatgattctcctacctcagcttcccaagtagctgggattacaggtgtatgccatcacgcctggctaatttctgtattttaagtagagacagtttcgccatgttgaccaggctgctctcgaactactgaccttgggtgatctgccagcctcggcctcccaaagtgctgggattacaagtgtaagccactgtgcccggccagaata

SEQ ID NO: 550929 - DNA, 640 bp, Homo sapiens
ggttgctatcttttttttcttttgggtaagaaggaacttttttaaactaccagttacacacacacacacacacacacacacacacacacacacacagaaattccaccatgattggtcagaataggtgaggttttgctgcaataacaaacaactcccaaatcttggtaacttcaaacatcagaagttgtttttctcactcatgcttcatctgcagggaggtgtggggtgctctgtttcccatcaaacttgccctaagactaaggttaatgggggttgcaatacctcgagtatcaccaagcagggaacagagggagaagaatgttagagagtcttgtactaagaattaaatgctccaggctagaagtctaacattgcacctctgcccccagcctcttggccagtactagccacatcccctccccmaccacagggcaatacatgaagacaggagaattggatacattacaaatttctaccccatggcatttcataaaagagaaaaaaatgccaatacaaaaatgttttaatagaatagaatatatacatttttagaataaagaacaatcctccaaaaaggacagctggtggtctctcaacaatgggcacatttctgtgacattttctctgtttttccatttta

SEQ ID NO: 550930 - DNA, 569 bp, Homo sapiens
taagcaggtcccaaatattgcatgggatatatttgcaccaaaaaaaaaaaaaaaaaaaaaaggttaatgagaarttcaggtttaattggacctcctgtattttacctggcaagcctaaccctgcataaacacaacctcgagcttgaaactcacagagaagacatggccgtgctcacacacgtgcacaaacccatatgccttacagagtcaacggctgtgatgagggtccagacccttgcacacttttctgtcttctgtctgggctcagagtaaacagggggtcacctggaatccacgtctaagctgggcttggaggtgtcctaatgaagcaggatgctgtcctgcaattccccagctcagctaggactgtagccaggcctagcttccagtctcgggcctagaacaaacagcacagccccagaccttggcaagaaggtttcatctcaaaggccactggtgcaggaactattagaagccccacttctttcctctgtttctgctgccattgccccagtctctgaccctgacactcaatcactctattatcacagcaggtactaggggtggct

SEQ ID NO: 550931 - DNA, 569 bp, Homo sapiens
taagcaggtcccaaatattgcatgggatatatttgcaccaaaaaaaaaaaaaaaaaaaaaaggttaatgagaaattcaggtttaattggacctcctgtattttacctggcaagcctaaccctgcataaacacaacctcgagcttgaaactcacagagaagacayggccgtgctcacacacgtgcacaaacccatatgccttacagagtcaacggctgtgatgagggtccagacccttgcacacttttctgtcttctgtctgggctcagagtaaacagggggtcacctggaatccacgtctaagctgggcttggaggtgtcctaatgaagcaggatgctgtcctgcaattccccagctcagctaggactgtagccaggcctagcttccagtctcgggcctagaacaaacagcacagccccagaccttggcaagaaggtttcatctcaaaggccactggtgcaggaactattagaagccccacttctttcctctgtttctgctgccattgccccagtctctgaccctgacactcaatcactctattatcacagcaggtactaggggtggct

SEQ ID NO: 550932 - DNA, 569 bp, Homo sapiens
taagcaggtcccaaatattgcatgggatatatttgcaccaaaaaaaaaaaaaaaaaaaaaaggttaatgagaaattcaggtttaattggacctcctgtattttacctggcaagcctaaccctgcataaacacaacctcgagcttgaaactcacagagaagacatggccgtgctcacacacgtgcacaaacccatatgccttacagagtcaacggctgtgatgagggtccagacccttgcacacttttctgtcytctgtctgggctcagagtaaacagggggtcacctggaatccacgtctaagctgggcttggaggtgtcctaatgaagcaggatgctgtcctgcaattccccagctcagctaggactgtagccaggcctagcttccagtctcgggcctagaacaaacagcacagccccagaccttggcaagaaggtttcatctcaaaggccactggtgcaggaactattagaagccccacttctttcctctgtttctgctgccattgccccagtctctgaccctgacactcaatcactctattatcacagcaggtactaggggtggct

SEQ ID NO: 550933 - DNA, 540 bp, Homo sapiens
gaacatgtttgctatgacatgtagttgattgctatgaaatgtagttgacacatgcagaatagaaagatttataaattaaatactcctttattaacattttaatgtgtcaaatttaaatttcagaagcattcatctttcttctctacttgtacatttttrtttacctgacagtgtaaaacccacaaccaaaaaataatggctttttccccatttaaaatactttgtaaaaatagtagcctagttgtcatttgtgagcccaggcttggtcctcaagtctgacatagactccccaaggccctaacgctgaagttctctgagccctaccactgcccaggcaggcccaggaagtgtcccagcagtgcccaagaaggtcacctccacctgtggaatccacagtgtgggtagcccccagggagccacagccatgtagacccagattcacaggaggatgcggttactgcaagcatctgaacctggccccaccacctatgggcagagttggttccagctcagtgtgtccatgggatgtctttaggttca

SEQ ID NO: 550934 - DNA, 540 bp, Homo sapiens
gaacatgtttgctatgacatgtagttgattgctatgaaatgtagttgacacatgcagaatagaaagatttataaattaaatactcctttattaacattttaatgtgtcaaatttaaatttcagaagcattcatctttcttctctacttgtacatttttgtttacctgacagtgtaaaacccacaaccaaaaaataatggctttttccccatttaaaatactttgtaaaaatagtagcctagttgtcatttgtgagcccaggcttggtcctcaagtctgacatagactccccaaggccctaacgctgaagttctctgagccctaccactgcccaggcaggcccaggaagtgtcccagcagtgcccaagaaggtcaccwccacctgtggaatccacagtgtgggtagcccccagggagccacagccatgtagacccagattcacaggaggatgcggttactgcaagcatctgaacctggccccaccacctatgggcagagttggttccagctcagtgtgtccatgggatgtctttaggttca

SEQ ID NO: 550935 - DNA, 540 bp, Homo sapiens
gaacatgtttgctatgacatgtagttgattgctatgaaatgtagttgacacatgcagaatagaaagatttataaattaaatactcctttattaacattttaatgtgtcaaatttaaatttcagaagcattcatctttcttctctacttgtacatttttgtttacctgacagtgtaaaacccacaaccaaaaaataatggctttttccccatttaaaatactttgtaaaaatagtagcctagttgtcatttgtgagcccaggcttggtcctcaagtctgacatagactccccaaggccctaacgctgaagttctctgagccctaccactgcccaggcaggcccaggaagtgtcccagcagtgcccaagaaggtcacctycacctgtggaatccacagtgtgggtagcccccagggagccacagccatgtagacccagattcacaggaggatgcggttactgcaagcatctgaacctggccccaccacctatgggcagagttggttccagctcagtgtgtccatgggatgtctttaggttca

SEQ ID NO: 550936 - DNA, 1316 bp, Homo sapiens
aacttcgtgtcagaagcctggtgagtccctctgtgcctttagtgaagggcactggaatgggtgccctctggagtaggtgcatctgtgagatggtgacggagcactgactcggcagggtggcctagggaccagaagccacaggggcggtgcagggcataggccaggcccagcagctgtagagagcatttgagtagaggtgggcggcacaaagcggggagcccagggacttccacgggccatgcagggagcggatgagggccctaaagacagggaagagtcccgacacagaagggctgtggccaccgaggagtccagccccctctgtcctggcacgctcagcatctgctcagccgtcagcaggggctacttgaatgaattcgactcctatgggagcctttggagtgaagtgcagccccggggagaagcagatagagccccaggggccggggcagcgtgcagggtaggagcacacagccgtgactcactgcccccaccccccagcttgcgtgggtctggcagcgagaaacacaggcccggaagaatcccaggggcacagataaccccaggcgtctctctgtctctctctatctttctcttcctcttgttttaattagcctggggagccggtactccccacgaagccctattttggggaagatgtgcaggcaaggacatcttggatctggtctgtcggctggatgggagactggtggggaatcagcatttctccttgccaggcacggccaatggcctttggcctccaggaaagagcagggaagtcccaggcccccgtgacttagggagcgcctcggagggcaggcagagctctcattccaggatggtggagctcaccaaggtcagggtgggagccgcaggcctggcccctggccatgttgcctggaggtcccatgtgtcctcgggttactcaacccgcatgagtcatttgtgaaacatccaagagacccttgttccctgcagctgcccctccgctagctcttgatagcgctccccgcagattccctgtgaggttgttcagagcttctttcctgccctccctgggcctagaaatagttccagccctcccaaggtgctccctgggccatccccaaacccagcccaggttacctycccaatccccccttttttaaaggtcttgctgtgttgcccaggctgcagagcagtggtgcgattttggctccctgcagcctctacctcctgggctcaagccatcctcccttctccgcctcctgagtagctggaactacaggctcgctccaccacatccggctaattttttgatttttttgtagagatgc

SEQ ID NO: 550937 - DNA, 649 bp, Homo sapiens
cttagcagagaaaggtcctttccaacacctcacaagattgctttccaaaacgtctttaatcaaagccaagtgctaaagttacacaaacacagagaaacacactgggctgagttacacctacagtttctgcttccctatagaactggaagttctttccctgcttacagtttctagcttctcaaatgaaatagcacaacgcttggagcctgattattttaggaaaggtcaagtgagcccaaatgctaatagaatttcatgaaaccaaagagatggcagcttcccaattctaggtgctaagctaaacacactggggttaaaacataaccacatccttgctaaggagaaaatggtcagagtggtcaggcttactgtgtaagctggtcatgtgatgcccacacagttttatggtcttcttatcattgttactggtctgcarttggagatgagtcagtggataggagtgggaaaagacttgtctctctcacacatagaaccctgaggaaggagtaatcagattcatgtaaaaaatgaagagaggaaaaggagaaggagtgtgcactgttaattttggaaccccaattgggataactcatcaatgctcatcatccactagcacgaagcctcatggctttaaccatcatatatccat

SEQ ID NO: 550938 - DNA, 552 bp, Homo sapiens
gtgcatggccactgcaagaagctagcaaagaataaatctgcatatgcctcctcccaggcatgcatgtgtatgcacactgtgtgtgcatgcatgtatgtgcatgtttgtatgagtgcacacatgtgagagtttgtgcatggccacagcaagaagctagcaaagaagaaatctgcgtatgccttctcccaggcatgcatgtgtatccacactgtgtgtgcatgtgtgtgtgtgcatgtgtgtgcatgtttgcatgactgcacacatgtgaaagcttgtgcatggctggagtaacaatctagcaaagacaaaacctgaatatgccacctcccaggcacgcatgtgtaaccacactgtgtgtacgtgtgtgtgtgcattcatgtatgttcttatgcamgcatgagatggcacacacaccaggaacaaaagaaccctgcagacagaagcccacagcccacagagacgttcaacaaatagcccccaacccactcattgccactgccgtacaaatcaactcctgggatccgccacccccctccccgcttcttccaacgg

SEQ ID NO: 550939 - DNA, 618 bp, Homo sapiens
caaatgtgtagtgaattgtgtttggcttcactttttgccaacttacatgctggttgaatctccttcctggctttacagttaaatggcaacacttaatctaattcctaggccttaacagacactcatatagtgttagttggaaggcttatgttgggaatttcttctacccacttcctttctagctgtctgatactctgttaagatgacttacatgaaaaaaagacaaacagacaaacacaaagctgtaaggtttagaaaatgcttcttatctagtgagagatacaatttatcaatttttttaaacagaatttttaggcattatatcatttgcttgctggatacatcaagtttcacaaataatttaaaaattacactgtttggtactttgagttctgtgttcttgttaaaaaatgctgcagatagttatcacaccactacactccagcctggkcaacagagtgagactgcgtctcaaaaaaaaaaaaaaattgcagatagtaaaatataaactgcacttcagcctaggtgacagagtgagaacctgtctctaaaaacataaaataaaaaaattaaaattaaaattaaacaattaaaaaataaattaaaaaaataagacac

SEQ ID NO: 550940 - DNA, 600 bp, Homo sapiens
ggccttctgcagtaagtcagcattaaaaaaataaagctgacgctgggcacggtgggtcacacctgtaatctcagcactttgggagcccgaggcaggaggatggcttgagcccagaagaccagcctgggtaacacagtaagacatcatctctacaaaaaataaaaaattagccaggtgtggtggtgtgcacctatagtcctagctactcaggagacaggtgggaggatctcttgtgctcaggttcaaggctgtggtaagccatgactgcatcacagcacgccaagcctgggtgacaaaggaycctgtttctaaaaaaaagactgagaaaattttatcaaatgtaaacatttaaatgggatctttatgatatgatgctgagcaccttttaagtgtattttgttaggggtgagcaagacgggcttgtgagaatggcacatccaggaaggataaagaagacaacagctgtgaagtctggaatggctacatggagtagcaggctaattaccaagtattaaaaggtcctataacaccagagattgtaaacaggcagcctgtctgagtattgctggccacacaggtttcaaaaaccacagataggcc

SEQ ID NO: 550941 - DNA, 1086 bp, Homo sapiens
agccaggcaggaggccctgccctgggaagctgcatgatgctggggccatggagaagcaggaagcctagaacctacagcatcgttgttttaaatggggcaatgcagagatccacaagagatgctgcaaaaggcctccctggagggacagataggttaggaattaggagggtggagggtgagagtgtgatatggtttgcctgtgtccccactcaaatatctgttatttgaactgtagcttgttacttgaattgtagctcccacaattcccaygtgtcatgggagggacccagtgggaggtaactgagtcatgggggtgggtctttcctgtgctattctcatgatagtgaataagtctcatgaaatctgatggttttataaagggcagttcccctgcgcacactctcttgcctgtcgccatgtaagacatgtctttgctcctccttcgccttccaccatgattgtgaggcttccccaggcatgtggaactgtgagttcattaaacctctttcctttataaattacccctgtgtctttatcagcagtgtgagaacagactaatacaggatgggacttggtgctaagcaggacagcactattagctccctggcatgcctgtaacctgaagggcttgactttcatctatcttacgtaaaatttggttggaataaaagattcaactactaaaaatgctgtaggacagaatgaataaaaggctacattgggagactcttaagggtccttccaccttgctcctggattctgtgaatcggaatctctgtgacagagtcggcctgggctcccagaacctgcgcagggggcagctgggaccttcagagcaatcaagaagcccaagtaaatgaaagaggccctgaaaaatgctgtcagggctccatgtaaatgatgatttaaaatttcacaggaaagagaaaggacacttcaagcaatttcttaacaggcaaagcctcccaaggcaatattactcgctaacagcccagcatctggtgatgatgtgaaaatgcctgtattagaaaactggaaaatgggaccactggagtttccaagaagtggttgcataagctcaaggat

SEQ ID NO: 550942 - DNA, 650 bp, Homo sapiens
ataggcctaaagatgagattttacaaaatattacatgaattaaaaatatctagaaagtgctttatgctcctaagaaatatgatttaaacattattattggttgatagtataatcaaaaccaaaaagcaatgaaacgtgcttttatttctgcactgaagataaatttgggactttttttttcttgagacagagttttgctcttgttgcccatgctggcaatctaggcccactgcaacctctgtctcctgggttcaaatgattctcctgcctcagcctcccgagtagctgggattacaggcgggcaccaccatgcctggctaatttttgtatttttagtagagacagggtttcactacattggtcaggctggtctcaaactcgtgacctcaggtgatctgcccccctcggcctcccaaagtgctgggattacaggtgtgaaccactgcacccggccaatttggggacrtttaaaaagtgaattgtgactattgtaggattagatttaggactattccattgaagttttgttatcctgcagggtagtggagctggctccataccatcacagacactatttgatttgcttttgtttcttaaaggctgctcttgagcatgaagaagccaagatcctccgaatccagcttgaattg

SEQ ID NO: 550943 - DNA, 1624 bp, Homo sapiens
ccccaagtcctgcagaacacttatgaggacccctatatccagggctcccaccttgtcccattccttatcatctcccacctgagatattacattcttgatcttaactcccctggccttgctccatccctgcaatcactcattccataccccttccagaatcatccttcagggtacaaagttattatatcacatccctgccctaaaactttctctggatgccccatgaccccaccatcaccattacccaaatataaatccctaagatactctgcctggctttcaaagcatccatcctcaccccaccccaccccactccccctccagcctcctctctgatgtgaacactctacacccgctagatttgggcacaccaggccagtttccacacccatgttgtgccccatcagttctctactgtgcactctcagcccagccttggctgcacagtggcatgcaagctcctccaggaggcccactgagcttgcctctgtgcttcctctgcacatctgcacatcctctctctagtactgctgcgagctccccaggtccggccccatcctgtctcatctgtgggccctgtcaagcctgatgtgcagctggtgctcagtcagtaggggtgctgggaggaggggtgctggaggaggggtgctgggggaggagtgctggctcataccctgaaatccatcctggttgatgtcaccaatgctggccacagataaaccaaaggcagagccactggggccatgaagaaggagtgaggggtgagcagggaaggaggttcccgcctggttcatgaagacatagatggcaccccctacttcctctttcctctcgaagtagtagggggcgcccaccaggaggtcctgccacctacacaggagaggagggaaatgggagtgtgaggtcagcctccaatatgcagcatagttcttgtttgacaggtgtgactgtgccagggcacagggctctgcaaatggctcttccggccacaggtcatgggtgggaaggacatgtgcatgggaaggacatggagatgccaatatgacccaccaaatagaagacatatgtcatggagacgccatgcaggcacaaatcaaacccaaacaatccacatccactggagcatacaaatcccaagcagaaacaagcaaacgcaggggtcccacaaatgccatgtgcaggtgctcagactcccataaagcctgactgcaaacctctgcaaacaacatgcagacagccgcacaactgcaaatcctccactcccctcacctggcttaggtaagccttcccccgcccwtcgctctccctggccccagaggatgtccctagattctcacccatcattgttcaggtctgccagggcaatggcgctgccaaaataggcgcccacctgcgagccctccagcacctgcctcctccgcaggtctccgcctgcctcctggctcagcaagaacaccgcgcccatatgtcggtgccgtggggcacctgtcacaatggtgatgtttttggggtgcaggatgaagctgcctacctgcatcgtgtaccctgggatagagggaagatgttcaaccaaggtcccagtcaacttcgtctctttctactctggacccatctccctattccc

SEQ ID NO: 550944 - DNA, 1069 bp, Homo sapiens
cagaggctccctcttcccacccaagctcgaacagagtgtttggagactgggctcggacgtcagcacccatcaggtgtttggtgggtagggccaggtggcagtaagtgggcggagactaaaggtctcctccaccaaggaatcaaatcgaaagggaacttcaagaggttactctggccaggcgcagtggttcacgcctgtaatcccagcactttgggaacccggggagggcggatcacgaagtcaggagttcgagaccagcctggccaatgtggggaaaccctgtctctactaaaaaaatacaaaaattagccggtcgtggtggcgggcgcctgtagttccagctatttgggaggctggggcaggagaatcgcttgaacccgggaggcgcaggttgcagtgagccgagatcgcgccactgcactccagcctgggtgacagagtgagacgtcgtctcaaaaaaaaaaaagaggttactatgtactttcttggatctaactcacatttctcttattgcagctcagagacccattttccccggaacattgtttttttgttttgttttgttttgtttttgagacgacggagtctcgctctgtctcccaggctggagtgcagtggcgcgatctccgctcactgcaacctctgcctccggggttcaagcgattctcctgcctcagcctcctgagtagctgggattacaggcgcccaccaccatgcccrgctaatttttgtatttttagtagagacggggtttcgccgtgttggtcaggctggtctcgaactcctgacctcgtgatccaccccgccgcctcccaaagtgctgggattacaggcgtgagccaccctgcctggcctccccgagcattcttttctccatctattcttaaaataataagaacaaaacaccatgtattaagcacatacgcagcaggaactatgctaaatgcttcacaaatgttaaatcctcacaacaatctttgaagtgttatctctgttttaaaacgagaaaaatgaggctcagggaggttaggcaatttggcagaggtcacacaactaggattttcatcct

SEQ ID NO: 550945 - DNA, 525 bp, Homo sapiens
gagtggcaccctcactctgccttactttcagatgagatcgggcctgttcagggtggtatggccatagactctgccttactttcaaacagtgggtctcaacagaggaatgctgccctccctgggaacactggaccaggtctgcgaagatytttggttgtcacactctgtggggaggggtgctactgtcatcgagtgggttgaggccagggatgatgcctgacatcctgcaatgcacagtagctcccaccacaaaaacttatccaattcaacatgtcacagtgccagagctgagaaaccctgcctgaaaaggccacacacagacaggtgctttgtaataggaataattcccagctgtaaattgcaccaagaccaattgctcaattcccccttggagcatccttgctgtcatttttcagctctccctgccaccacatctacctgaagtccccgtgcaccactgtggtcctctgctgacggggaagatggaggggcagccattcgatcagcctctccatggctgggatg

SEQ ID NO: 550946 - DNA, 1838 bp, Homo sapiens
agcatgatctgaaggcagacagcacagaagcaacaccctgggcttagaaggaaatgccatccctgtctcagagactctaggtttttagcttttgaatgtctgtggaataatgggctcatgtcctgccatatggtgacatctaggagttttatattgggtagcaacctgcttttccagaacctcatgacccttcaactaattctgcagccactatcagccaaaaagagcactctgagttccttttggaagttaaagcccattgtcctagaaacctcagtatggagattcaaggtctgaggaactataagccatatgtaggattaccttattaaaccctagaactcaaaagtatcactggattaagcccttttctaccattttaatctcactttttccagtatacaaaggactgcctcaagccatagtacccctacaagtggttggagactagaatcccrtctgtgctctgcaggtggaaagcccaggcttgcagaagtcagaagtaaccagaactgtttagagccaggtccaggaacttcctatggccttttggtagcaactgtgcatggcagccctgttggcgttttctccacaggctcctgaaggtcaaaccggaggagagactcaccatcgagggagtgctggaccacccctggctcaattccaccgaggccctggataatgtgctgccttctgctcagctgatgatggacaaggttttgaatgatgtttactttgttggctgaaaagactgtgttgggaaggaatgctggggcttggctcagtgaggggttagaggcaaaacagtgcagagtacacgatccttcccagagaaacatctctggtttcctgagagtcaggatccaaaataaggaatttctttcggtaaaagaccaaatcaaggcctggtgaatataaactaagggagcactcaaaggaatagcctccatatttctgctacagggctgcgggcacagaacagtttaagataccctccctttccccaaggggtttaaataagactggctgggaaggcaaggccaataaacatgaaacaaagagggaacatttcaaatatcagagctttgcatgttaactttcctgtgaatgctgtgggaattcagaaaaagagcacatctttgaagggatgtaattttcccaaagagaaggcagaacccctcacatgtattaactgtcttctgtgttgcagcatctgagttctttctcatgttcggacatgcgctgtccttgaagaatttgagtagacagtgtaaacgcccatgcgtggcgaacagcataagcaaaaaaacacatgcaaatacatcatcgggaaaaataatttggcctcactaatgggaagttaatgagatgggtgtggcagggccaggctttgcaagtggacagaggggtttaagtcttagtgggatgcagctgagaggccatagtagctttttgagaagagatttgccactaggaaggtatttagagatagtcagacttggcgacttgcagacttgccagcctaatacttctgcagtaatctagaagtcggaggtggctgtgggagcagagaagtagaggtgaatgaacaggctaaatatttttgaagaaaaatttctacagtttttcgtgatagactagatataaggggacagttgtggcatatctggtgataacattgacagattaggaaggaggctggtttgggtgagagggagtcttttaggttttagatattgtttgagatggcagaggaacattcaaatgaatgagatttatagggtgggaccatagtgtggctgtgagctcaaagcggtgacacagacttgagtgttaac

SEQ ID NO: 550947 - DNA, 1522 bp, Homo sapiens
tcattgtggttttgatttgtatttcccttatgactaattgaggatctttccacgtgggtattagccatttgaatagcctatttggaaaaatgtctatttagaatcttgtccctctttagaatgatttgtctacctgttcacttgtttaccaccccccactccccaccctgctgctaatttataagttctgtgagggtaggcaccatgatgcttttgttcggtattacatacccacgacccaaaaaaccatctgacacatagtagaaactcaataaataattgtggctgattgcattaatgtcttctgtactatgctaattagagctcatggaaataagataatcaagggtccaggcactctaactatagctctccactcttctaagctcattgggttgttttatgacctgcttagactttcataagatctgacttgtgtttaatacttggacatgtgctgccctagaaaacctctttctaatctcaatatcaaaagtttggctttccaaggaatgctctgtgtttttagtccacaaacaggacatgcttgccattcctgttactgttttgcctgtagctttgtagccttattcttctggattccttactatgtgagagttaaagaaaaagtgagaagatgaggaaggtattctacatttttgttctttcaggttaatgtggctgtaaagagaggaataagattaatgataatcgctctcctctttttctgacctcctcggggccatccaaagtagtttggaaaagatattgtaataaagcattttgttttgtttttgtttttgttttttttcactcctgaagttcataccccatccccactcttacttaactgcagtggcacttaaaagtcaatgagatcaccccaatataagattaactttgtagaattcatgaattccatgaaccaaaggaaaaatggttactggctagttaagaccatgtacgcacaatgcccattactatttggtcaaataacatatttttatcatttctaatggctacatagcatcccattatatgaaaaatgatgcaattatatgtttattgttgagtggtgaaaatcccatctttattttaaaagtatataggaaaataatgtgaaaatatatgccaactcttaatatgggtatcyaagaatgtctaaggtaatggatggatttcactttactttcttcttattcatctcactttaaaactattctacagtgggaatatgccagttgtgtaatttgtaaaatgaaataataatgatgtgcagctatcagtaaagatattctgtgtccagagtgagccagtgacgccttgtgagtctgaacagagaagcgcctgcctagcttcgttcaggtctcctcgctcctcccaggcctagcctcgccttgtccgctgatctgtctgtgagtcatcatttgctttatttcccaccacacccagtctcaaatgaatgttcacttccttcacagcaagttcctactctaattgccaaggacttctatttctgtct

SEQ ID NO: 550948 - DNA, 1522 bp, Homo sapiens
tcattgtggttttgatttgtatttcccttatgactaattgaggatctttccacgtgggtattagccatttgaatagcctatttggaaaaatgtctatttagaatcttgtccctctttagaatgatttgtctacctgttcacttgtttaccaccccccactccccaccctgctgctaatttataagttctgtgagggtaggcaccatgatgcttttgttcggtattacatacccacgacccaaaaaaccatctgacacatagtagaaactcaataaataattgtggctgattgcattaatgtcttctgtactatgctaattagagctcatggaaataagataatcaagggtccaggcactctaactatagctctccactcttctaagctcattgggttgttttatgacctgcttagactttcataagatctgacttgtgtttaatacttggacatgtgctgccctagaaaacctctttctaatctcaatatcaaaagtttggctttccaaggaatgctctgtgtttttagtccacaaacaggacatgcttgccattcctgttactgttttgcctgtagctttgtagccttattcttctggattccttactatgtgagagttaaagaaaaagtgagaagatgaggaaggtattctacatttttgttctttcaggttaatgtggctgtaaagagaggaataagattaatgataatcgctctcctctttttctgacctcctcggggccatccaaagtagtttggaaaagatattgtaataaagcattttgttttgtttttgtttttgttttttttcactcctgaagttcataccccatccccactcttacttaactgcagtggcacttaaaagtcaatgagatcaccccaatataagattaactttgtagaattcatgaattccatgaaccaaaggaaaaatggttactggctagttaagaccatgtacgcacaatgcccattactatttggtcaaataacatatttttatcatttctaatggctacatagcatcccattatatgaaaaatgatgcaattatatgtttattgttgagtggtgaaaatcccatctttattttaaaagtatataggaaaataatgtgaaaatatatgccaactcttaatatgggtatctaagaatgtctaaggtaatggatggatttcactttactttcttcttattcatctcactttaaaactattctacagtgggaatatgccagttgtgtaatttgtaaaatgaaataataatgatgtgcagctatcagtaaagatattctgtgtccagagtgagccagtgaygccttgtgagtctgaacagagaagcgcctgcctagcttcgttcaggtctcctcgctcctcccaggcctagcctcgccttgtccgctgatctgtctgtgagtcatcatttgctttatttcccaccacacccagtctcaaatgaatgttcacttccttcacagcaagttcctactctaattgccaaggacttctatttctgtct

SEQ ID NO: 550949 - DNA, 1522 bp, Homo sapiens
tcattgtggttttgatttgtatttcccttatgactaattgaggatctttccacgtgggtattagccatttgaatagcctatttggaaaaatgtctatttagaatcttgtccctctttagaatgatttgtctacctgttcacttgtttaccaccccccactccccaccctgctgctaatttataagttctgtgagggtaggcaccatgatgcttttgttcggtattacatacccacgacccaaaaaaccatctgacacatagtagaaactcaataaataattgtggctgattgcattaatgtcttctgtactatgctaattagagctcatggaaataagataatcaagggtccaggcactctaactatagctctccactcttctaagctcattgggttgttttatgacctgcttagactttcataagatctgacttgtgtttaatacttggacatgtgctgccctagaaaacctctttctaatctcaatatcaaaagtttggctttccaaggaatgctctgtgtttttagtccacaaacaggacatgcttgccattcctgttactgttttgcctgtagctttgtagccttattcttctggattccttactatgtgagagttaaagaaaaagtgagaagatgaggaaggtattctacatttttgttctttcaggttaatgtggctgtaaagagaggaataagattaatgataatcgctctcctctttttctgacctcctcggggccatccaaagtagtttggaaaagatattgtaataaagcattttgttttgtttttgtttttgttttttttcactcctgaagttcataccccatccccactcttacttaactgcagtggcacttaaaagtcaatgagatcaccccaatataagattaactttgtagaattcatgaattccatgaaccaaaggaaaaatggttactggctagttaagaccatgtacgcacaatgcccattactatttggtcaaataacatatttttatcatttctaatggctacatagcatcccattatatgaaaaatgatgcaattatatgtttattgttgagtggtgaaaatcccatctttattttaaaagtatataggaaaataatgtgaaaatatatgccaactcttaatatgggtatctaagaatgtctaaggtaatggatggatttcactttactttcttcttattcatctcactttaaaactattctacagtgggaatatgccagttgtgtaatttgtaaaatgaaataataatgatgtgcagctatcagtaaagatattctgtgtccagagtgagccagtgacgccttgtgagtctgaacagagaagcgcctgcctagcttcgttcaggtctcctcgctcctcccaggcctagcctcgccttgtccgctgatctgtctgtgagtcatcatttgctttatttcccaccacacccagtctcaaatgaatgttcacttccttcwcagcaagttcctactctaattgccaaggacttctatttctgtct

SEQ ID NO: 550950 - DNA, 620 bp, Homo sapiens
tttgccctttgaagcatgtgatctttgtacctactgccttttcttataccccctccccttttgaaatccttaataaaaacttgctagtctgagactcaggtgggcatcacagtcctaccgatatgtgatgtcacccctggcggcccagctgtaaaattcctctctttatactgtctctatttctcagccagctaacacttacagaaaatagaaagaacctatgttgaaatattgggggtgggttcccccaatatctttttagtagagacaaggtttcaccatgttggccaagctggtcttgaactccttaccttgtgatccactgacctcggcctcccaaagtgctakgattacaggcgtgagccactgtgcccagctatctcctttattaataaaaactgacatgactaaaatagacatgtctgagaatcaaggaactcaccataatgattactgtaaaaactaagcaaatcagtcatttcctaaggaatggattttcagaaaattagccttatttgtgtttagcatcacttagccaacatgtgttaattcagcctgtaatttcaggtacattatgttctagtgcttgttttctggaacatagaagaaagcctttattc

SEQ ID NO: 550951 - DNA, 620 bp, Homo sapiens
tttgccctttgaagcatgtgatctttgtacctactgccttttcttataccccctccccttttgaaatccttaataaaaacttgctagtctgagactcaggtgggcatcacagtcctaccgatatgtgatgtcacccctggcggcccagctgtaaaattcctctctttatactgtctctatttctcagccagctaacacttacagaaaatagaaagaacctatgttgaaatattgggggtgggttcccccaatatctttttagtagagacaaggtttcaccatgttggccaagctggtcttgaactccttaccttgtgatccactgacctcggcctcccaaagtgctaggattacaggcgtgagccactgtgcccagctatctcctttattaataaaaactgacatgactaaaatagacatgtctgagaatcaaggaactcaccataatgattactgtaaaaactaakcaaatcagtcatttcctaaggaatggattttcagaaaattagccttatttgtgtttagcatcacttagccaacatgtgttaattcagcctgtaatttcaggtacattatgttctagtgcttgttttctggaacatagaagaaagcctttattc

SEQ ID NO: 550952 - DNA, 556 bp, Homo sapiens
attagtctgttctcatgctgctaataaaaacatatccaaggctgggtaatttataaagaaaagaagtttaatggattcacagttccacatggctgaggaagcctcacaatcatggcagaatgcaaaggagaagcaaaggcatgtcttacatggcagcagtcaagagggcttcagcaggggagctcccatttataaaaccatcagatctcataagacttattcactaccatgagagcagtatgagggaaactgcccccatgattcaattatctccacctggccccactcatgayacatggggattattacaattcaaggtgagatttgggtggggacacagccaaaccatatcagaggggaactttacacctcttatgtgaaagaaaaatattaggcatcccttttttgttttcagaagagatcaagagaagagcaatctaactaagccatggcaagtatttactataaaagagtgatgaatataatgtgatgcagaaaataaagataaagtgtttctatgagaatccaaaaagaagcagttatttcaggatggaaa

SEQ ID NO: 550953 - DNA, 556 bp, Homo sapiens
attagtctgttctcatgctgctaataaaaacatatccaaggctgggtaatttataaagaaaagaagtttaatggattcacagttccacatggctgaggaagcctcacaatcatggcagaatgcaaaggagaagcaaaggcatgtcttacatggcagcagtcaagagggcttcagcaggggagctcccatttataaaaccatcagatctcataagacttattcactaccatgagagcagtatgagggaaactgcccccatgattcaattatctccacctggccccactcatgacacatggggattattacaattcaaggtgagatttgggtggggacacagccaaaccatatcagaggggaactttacacctcttatgtgaaagaaaaatattaggcatcccttttttgttttcagragagatcaagagaagagcaatctaactaagccatggcaagtatttactataaaagagtgatgaatataatgtgatgcagaaaataaagataaagtgtttctatgagaatccaaaaagaagcagttatttcaggatggaaa

SEQ ID NO: 550954 - DNA, 526 bp, Homo sapiens
ggcatcacttaaattgtctgtgatgtacttgattgactgtgttttatggctagtgagaaaaatagagatatatagtttacagtaacaaaaaagagaaaggtggctatccacctcacatctaattccctggtttcagaaggtaactcagaaaaggttctctcccacgcaattaagtgagctaatgaaaggcaatttacacagcagaaagagaaaataactaaacaaacttatttaacctatggcctcatcaggaccagagagtctcyttcctgtagtctagaactcctgaacctaagaaacaattcagttgattttcgtcttttgtctgcaaacatctaagaaatgttggttgagaatagagttttgtgttaagctgtttgaatttttgaaaaattatatatatatatatatatattcatgccttatatgtctctaatatcactaaatttaatcaatagtggtttttaaacaaagtatcattttctcaataactgaaaacagaagtattttcctttgtgtctgtctt

SEQ ID NO: 550955 - DNA, 537 bp, Homo sapiens
cccatgtcccattctgagccaattgcaagcttttgcaagaattttataatctggagctctgacatttcccaagtgaatatccacaagtagtgttagtgcccgattgtctgaagaaatattgatctctccaagctacaagcatttcatgtttggagaatatatgatccacactagatattattcttgatctacactagatattcttttactccagatgtaatctacattgaagattgtgaaggatctgtagttctttttctttctccatccataataagcgccattctccagttcctacaggttgttcctaggctttatttacgtatctygttctttcagaaagtcctagactgatgttgtatttttcgaagtaatgctacctgttctatcagcagaacccagaaatttcagtggtttagcaaaaggaaagtttctttctcgctcatgtcacagtccagtgagattattcctgattgggaagctctcctccatatgatgaatcagggacccagaatcttcccatctcgtggctgagca

SEQ ID NO: 550956 - DNA, 845 bp, Homo sapiens
tgaagagcttccctgaatttcagtacctttcaaggcctctcttgaaagaatgtggaattaatttgggtggaggcttgtgcatggacttttttctgagtgtatttggccagtgggccaatggggaagcagaggcatggacagagagaggaatgcggcagaaggagaagctggggytgcaggatgccatttgctgtttgtacggcttcccatggcccactgtagtggctagagggcactgccaggaatccttcatgtggctgttgcttgctgttggggaacatgattcagagctgtgtagctccatgtccagttccactctgcatctcactcacaaagctctagcgttgggctgctgggttttggtgaaagcaggtgctatgaatatattgaaggacaaatcagtccctaagggacttcgatagacgcagtcctaaaaacatttccgggctggtttcttttttttaaacaccagttaaccgttttcagtttaactgtgttttccttcctgaaacctttaagtgagactaattggtatgattttttttttgtatgctttgtttttagggagtttctcaacttgtcaagtctgcgttgcagacagagatgaaatgatttttttttcccacacagaccaagcatgcagaaatgggaatgatttaagtttgtctttaatttaatttctatatctttcttttcctttccttgggaaatagaggaaatacttgggggcattttcaccaaattgtaacttgtaacttcacaagagcccgtcagcaggaatttctatgcgtgttttaatgcctggttgggggagacatgaaatgacaacagacagttgccctcaa

SEQ ID NO: 550957 - DNA, 845 bp, Homo sapiens
tgaagagcttccctgaatttcagtacctttcaaggcctctcttgaaagaatgtggaattaatttgggtggaggcttgtgcatggacttttttctgagtgtatttggccagtgggccaatggggaagcagaggcatggacagagagaggaatgcggcagaaggagaagctggggttgcaggatgccatttgctgtttgtayggcttcccatggcccactgtagtggctagagggcactgccaggaatccttcatgtggctgttgcttgctgttggggaacatgattcagagctgtgtagctccatgtccagttccactctgcatctcactcacaaagctctagcgttgggctgctgggttttggtgaaagcaggtgctatgaatatattgaaggacaaatcagtccctaagggacttcgatagacgcagtcctaaaaacatttccgggctggtttcttttttttaaacaccagttaaccgttttcagtttaactgtgttttccttcctgaaacctttaagtgagactaattggtatgattttttttttgtatgctttgtttttagggagtttctcaacttgtcaagtctgcgttgcagacagagatgaaatgatttttttttcccacacagaccaagcatgcagaaatgggaatgatttaagtttgtctttaatttaatttctatatctttcttttcctttccttgggaaatagaggaaatacttgggggcattttcaccaaattgtaacttgtaacttcacaagagcccgtcagcaggaatttctatgcgtgttttaatgcctggttgggggagacatgaaatgacaacagacagttgccctcaa

SEQ ID NO: 550958 - DNA, 902 bp, Homo sapiens
ttggtttgtaattttaatgacggctgccctttaaggtgggttctctttactagagccaataaattgatctcctggtatctggaatgttgccagctatacatctggatatttgcaattctaagcctaaatatcagaagcaaaaagttaagtgttttcaccttgcagggctatcagtatactttcgctatcttgcttcatggtcagttacttctgtggctcaatgacggaatctagattacagtgatgttaaccacttcaccatcccattgaatatccatctgatctagtacatttatggcattgtgctgacagggcctggagacagatgaggcagataccctagatgttttggcaggtcacattaatttcttgggatgaaacataaattttataaaaattcaggaaaytactatctcatggaggttccccatgggagatgaagtatccctgtgatctaaacttaacaaaatattagctttgagttatgtcaagaaaaaccaatgtctctctggttgactcaaactgaaatttgtgtagctctgactcttggccctcataaaccaataggtctttgatacacaaaatgtctggagttgctcaggaatgctgtatagaaccggaaaaccctgacagaagaatcacagtgaaagcccctagggttttggagcaagttcctgttctctgtggaaagtacctactcttttttgtagaactagctaaaactttgaaaagactgaatgcccaaccattcatgtgtgacattaccacccatgtgagctgggtgttatctgatccacttagccatcaagtagggcatgtccagcaacaccccgtcaaatggaaaagctaaaagtgtgactgggcctgagcagaccccaaggcagaaatgatctgtgtgaata

SEQ ID NO: 550959 - DNA, 902 bp, Homo sapiens
ttggtttgtaattttaatgacggctgccctttaaggtgggttctctttactagagccaataaattgatctcctggtatctggaatgttgccagctatacatctggatatttgcaattctaagcctaaatatcagaagcaaaaagttaagtgttttcaccttgcagggctatcagtatactttcgctatcttgcttcatggtcagttacttctgtggctcaatgacggaatctagattacagtgatgttaaccacttcaccatcccattgaatatccatctgatctagtacatttatggcattgtgctgacagggcctggagacagatgaggcagataccctagatgttttggcaggtcacattaatttcttgggatgaaacataaattttataaaaattcaggaaattactatctcatggaggttccccatgggagatgaagtatccctgtgatctaaacttaacaaaatattagctttgagttatgtcaagaaaaaccaatgtctctctggttgactcaaactgaaatttgtgtagctctgactcttggccctcataaaccaataggtctttgatacacaaaatgtctggagttgctcaggaatgctgtatagaaccggaaaaccctgacagaagaatcacagtgaaagcccctagggttttggagcaagttcctgttctctgtggaaagtacctactcttttttgtagaactagctaaaactttgaaaagactgaatgcccaaccattcatgtgtgacattaccacccatgtgagctgggtgttatctgatccacttagccatcaagtagggcatgtccagcaacaccccgtcaaatggaaaagctaaaagtgtgactgggcctgagcagaccccaargcagaaatgatctgtgtgaata

SEQ ID NO: 550960 - DNA, 638 bp, Homo sapiens
atgaaatacttatggttgtccttcttttgaggtgtattctgatttgtatagtctctttaccaatgcattttttatcaaattgccatttaaaatttttaaaaagtgttcayatttcattactgttattaaatagattgtaaaaaatccaagagcctatttaatattttttttgaaatttatatccctgtaattaattacttcatttagtatcatctgaaaaataaacaaatgttacaaatactgttatctttcatcttgatcacttttatgtcacattccattaatatttatctaaacttttctgttatttaataaataaattttaaaatgacaagagaaagcaacatacaataataaaaatgtgactaaaaatttttaaattttttttttaaaagtgactaagttcataaagttaagctggagccattaagcccttcacagaatcatctattttggtaagataatctaaaaacactaataatatgtgaagtatgaaacctgtaatatagttataaatttatcctcactttttggaatctaagttcaaaaggttatccatatatgaaagtttagaagacatatttatcttatatttatattggttaaaagaaatagtcattttattaaactacttaata

SEQ ID NO: 550961 - DNA, 919 bp, Homo sapiens
cataatgctctctgtggattgctatgattatgatgycagacttcttggctgcttctgaatagctcaagacttctgcaccactgggcagtagggtggtcttctgggggtttcgacttccaaaaacaacagaataaccacactggagcattttcaatcccagtgatcttccaaaatcaccagttccaaaaatacatacagtctcttgcttttctgaagaattcatagtaagaggaagtgcatctatacaagttttctccataactgaaaaataataacacaaatgcccaacaaaatataaatgctctgtgcctggaaaattaaagagagctatattcaagaagtaatgtaattgacttgttgtaatctaattatcttaactatatttacccccaaatttggaaggagtaaaaattgtcatatatatttccccccaaatttggaaggagtaaaaattgtcatatatcttttcatatgtgtcttatttaacaaaatcactggtgaaaagcttctgtttgataaaaggatacagggcaaaatctgacaaaaaatatgctccaataaattatagataaattcacttgtttagtgataccaaaaaaaactaaataaaacattagcaaacacaatccagcagcttgttaatagaaggtttatgttgatcaaatggggattattctacaaatgtgaagattagttctataaattcaatttttgaaacttcattaatataacttaaaagattaaaatttaattttatattaaaagatttaaggaaaaagtctgtcatatctgtgtatgttaaaaggacatctgttaaaattcaacatttattcttgattcatagtgaaagagaaatacatagatatttccttaacatataaaaattattgatcttaacctaaaattcagcattatgcct

SEQ ID NO: 550962 - DNA, 619 bp, Homo sapiens
aattgagatgagtaatctttgtttgtttgtttttggtctgtttttcaactatttttcttcttataacattggaagagcacaaatcccaaaacggtatttttttgaacgttattgtgttgtccaaggcagagttatcttaagtgaaaaatctctgaagcagtaaagaaaatatactgaaagtgcctcaatgatcagaatgttttcttcttgagaaagttatatagtacttttaaaagtacaggtcagagtatgtctttgcactcaattttgatttttatataaaatcctagatgtttctaccacagctggatctctaaggaagtagttaagaaaagaaaaatgtaagcgcagataacatatagttctttttagtcccataggaagccatagtgtcatgttactgaataaaatattttgaggttcacacaattcacatataaatctgtcttaaatatrattaatatatttaatatttttcaaaataaacatgacggtattaggtttgccattaagtaatggcaaaacagcaattacttttgcaccaacctaatactttctgatgataaattcagacaataaaaaaggtaaaagattatttaaaatccatttgtatctgtaa

SEQ ID NO: 550963 - DNA, 631 bp, Homo sapiens
tgaacttgcactatctcatccaatctgagctttacctgaaagttggggctactgcctcagagggaccagatcatgtactctcttttggagtatatgaataagttgtataaaaataacagtatgaataaatattctatgcaaaatgaataaagggcctccaaataaaggaagaaattcaggagagtgacatgagactatgtaaatataaccaggaagacaacagagaataatatgttgtttgagaagaattataaaggttatttttgcctttttcttatttcaactctatttagrgaataaaaaaatgcaatgaagaaataaggctactgcttgggaattgcaaatgtgagctcattttattttatcttctcttaaactatatatcataaagatatatgagagctcagaaatgcacctgggcaataaactattaggtttctgaaatgagttcaagccagggtatcaaagagcttattcaattaggacatagttactagccctcaatcagagattatggataatcaagtttgaaataaagactgttgacccattattaacaactgataaaataataaatttcagaaatatttctagtaatttctgtcaaaacatgtcatgagaatttttaaaa

SEQ ID NO: 550964 - DNA, 631 bp, Homo sapiens
tgaacttgcactatctcatccaatctgagctttacctgaaagttggggctactgcctcagagggaccagatcatgtactctcttttggagtatatgaataagttgtataaaaataacagtatgaataaatattctatgcaaaatgaataaagggcctccaaataaaggaagaaattcaggagagtgacatgagactatgtaaatataaccaggaagacaacagagaataatatgttgtttgagaagaattataaaggttatttttgcctttttcttatttcaactctatttagggaataaaaaaaygcaatgaagaaataaggctactgcttgggaattgcaaatgtgagctcattttattttatcttctcttaaactatatatcataaagatatatgagagctcagaaatgcacctgggcaataaactattaggtttctgaaatgagttcaagccagggtatcaaagagcttattcaattaggacatagttactagccctcaatcagagattatggataatcaagtttgaaataaagactgttgacccattattaacaactgataaaataataaatttcagaaatatttctagtaatttctgtcaaaacatgtcatgagaatttttaaaa

SEQ ID NO: 550965 - DNA, 581 bp, Homo sapiens
gtttcttttacaggtcaagaaactgaaacttacagtaattaattgaactggtcttgaggatatttggttttgagctatttcaaatgaagacaatactactcacctcacaaggttgatgggaggattatagtgtctgtgcaaaacatgagtcatagtgcctgacacagaagttattgtacatacatgtttcctgttctcagtaaatttatggtctagaacactcttcaaaacatatattttgtttgaacttcatcggctctaaaagtgatccattccatctggagctatggcataaaattatktgcatgtagatcttgaataactaccagcagttccttgcttttatatactactgtttcacctgaattcaataaattaaaataggagcaaagaaaactatatttatattttgaatttatattttgaacagtatcattggagcatgacttaaaatggaaaaaaaaagactaaagtggtaattcttattgatgcgtgttgtaacatcaaacacgttttctagtatccctcgtattttttttttgggaggggcgcggcttattgagatattcacaaaccgtaca

SEQ ID NO: 550966 - DNA, 581 bp, Homo sapiens
gtttcttttacaggtcaagaaactgaaacttacagtaattaattgaactggtcttgaggatatttggttttgagctatttcaaatgaagacaatactactcacctcacaaggttgatgggaggattatagtgtctgtgcaaaacatgagtcatagtgcctgacacagaagttattgtacatacatgtttcctgttctcagtaaatttatggtctagaacactcttcaaaacatatattttgtttgaacttcatcggctctaaaagtgatccattccatctggagctatggcataaaattatttgcatgtagatcttgaataactaccagcagttccttgcttttatatactactgtttcacctgaattcaataaattaaaataggagcaaagaaaactatatttatattttgaatttatrttttgaacagtatcattggagcatgacttaaaatggaaaaaaaaagactaaagtggtaattcttattgatgcgtgttgtaacatcaaacacgttttctagtatccctcgtattttttttttgggaggggcgcggcttattgagatattcacaaaccgtaca

SEQ ID NO: 550967 - DNA, 626 bp, Homo sapiens
agaatactacaaaaaaatgatatgtccattaattcaacaacatacacgaaatagactaattcttctgtctttcacacaaaaaggattcagtactrtataaaaaggacagtacacctagccaaatgtggtttgagaaatgtaagactgctataaaatttgaaaatcaatcagtgtaactcaccatattaacagaacaaagaagaaaatatacagatcttttcagtagatgaagaaaaagtattttacaaaattttatgaaagattttcatccatctagaatagtaaaagtttgtcttaaagcaaatgaaaagattaaagaatacaagatctcttgttaaccaataattatgcaaatttatttgattatataaacactttcacagaaccaagaaccatgagatgactattttagataagaaagcctctgggccaaaagtaggaacccttagaaaccatcaaaaccttgaaatctgctctgaatacactcacattccatggacactgacagcacaggacaatgatcaggaacacagactctgatgcccagctgactggggtccatcctggctccaatatccgtccatctgccaactttataatcttggggacactcaagtaactttttg

SEQ ID NO: 550968 - DNA, 626 bp, Homo sapiens
agaatactacaaaaaaatgatatgtccattaattcaacaacatacacgaaatagactaattcttctgtctttcacacaaaaaggattcagtactatataaaaaggacagtacacctagccaaatgtggtttgagaaatgtaagactgctataaaatttgaaaatcaatcagtgtaactcaccatattaacagaacaaagaagaaaatatacagatcttttcagtagatgaagaaaaagtattttacaaaattttatgaaagattttcatccatctagaatagtaaaagtttgtcttaaagcaaatgaaaagattaaagaatacaagatctcttgttaaccaataattatgcaaatttatttgattatataaacactttcacagaaccaagaaccatgagatgactattttagataagaaagcctctgggccaaaagtaggaacccttagaaaccatcaaaaccttgaaatctgctctgaatacactcacattccatggacactgacagcacaggacaatgatcaggaacacagactctgatgcccagctgactggggtccatcctggctccaatatccgtccatctgccaactttataatcttggggayactcaagtaactttttg

SEQ ID NO: 550969 - DNA, 1382 bp, Homo sapiens
ggagctgtccttagggctggcatgtacattttgactgttgtcattggctacatttgaattcccagtcaagagtttgcactaacatccatccttgcatgtgtgtgtgtgagtgtgtgtgtgagtgtgtgtgtgagtgtgtgtgtgtgtgtatggaaaagtccaaataccaaaattgagagactagtataatgaaccttcaggattccattatccagtttcaacagttgtctactcataactgatcctgttttatctgtgctgcaacccctggaattatttttaatcctagatattattttattcataagtattttagtttacgtctctgaaaaataaagaatcttaaataactacaacaccattatcacctatctaaattattaacagtaatttttaaatattattaagtatctaagctgggcatggcagcatgtgcctgtaatcccagctacttgggaagctgaggcaggaggatcgcttgagcccaggcgtttgaatgcagcctgggcaacatagtgagaccctgtctctaaaaatatgtgtatatacatatctagtcagtgtttaacttcctaattttcccataaagatcatccttgtttttatatttatttatttgaatgaggatccaaataaagtttacaaattgttactttgttgctgtgtctttttaatctattttaaaatatagattcctcttagtctttttttttttttttttgccttacaatttgtttgtggaaggtttcccagtctggattttgatgactgtatccctgtggtgtcatttaccatgttcatttgccgttttgtttcctgtaaattggtagttggcctggttaaatgaaaatttatcttttgtccccaaggatataactggaccctaagtgaaattgttcacaattcaattaacattcctccaatgctaacattttcacaaactacatgttagaaatggacggctttaaatcccttagtgcttgtaggttcatcctcttttttttttttttttttggtcttttaaaaagtctgtattactttttctcatgccgtttattttgtcagtaactctctaataccttttctgtttgtagtttttgttactctttcacattgtggtcatttctgktgttttctttttatttttaaatttgtctgtatccgttttacttctcacatctctttcttttgataagggtagtgccttggattcagcagaagctccagctgggagatccaggaaccattaataaacctcagagagatgctaagaatagagaacaagaacagaagcaaggggtgtgctaggcgtcaagggtgaaattacttgtgacttcgttttgtactcttagtaggtccttagttcactgcctctgactttt

SEQ ID NO: 550970 - DNA, 538 bp, Homo sapiens
aagaagacagaagacaacacacttgtcttcactgtggatgttaaagccaacaagcaccagctcaaacaggctgtgaagaactctgtgaggtggttgtggcccaggtcaataccctgattgggcctgatggagagaagaaggcacatgttccactggctcctgatcaggatgctttgggtgtggccaacaaaatggagatcatgtaaaccgagtccggctggctaattctaaatatatgtatatcttttcaccataaaaaaatctgcaacatacgacatgccaggcacaaggggacaaacactgtctgattccacttgtatgaggtccccagggcagtcaaacttatggggacagaaagtagaatgggggtgccaggggcmggaggatgaggagggagtgtttcatgggcacagagcagccgttggggaagatgaaaaggttctggagatggacggtggtgacggatgaacaatgaatgtgaaccgctgacctggacacttcaacatcgaggctcagggagagcagctgctcacaaaga

SEQ ID NO: 550971 - DNA, 630 bp, Homo sapiens
tgacctcgtgatccgcctgcctcggcctcccaaagtgctgggattacagacgtgagccaccgcgccaggactttactgctcatttttttactcttaggttagatttatggttgaatggtcataagcatctagcagagacagcacaaacttgtctcgccccaacccaggaaaaaccagcaattctgaaaacactcctatttttatttcactaacaattgtaaaactatatttaccaaagatctccttcatgtgaacttagaaaaaactccacattttggattagtttcaacatttctgtgcattttcagagtaacttataagagtgctcatttacccccaagccaatttgaatacacgtcccttaaaggattgtataaattggtttagtaacgccatccaaaaatatcatataaattaacatataaacctacatagactcacagaaagatgctcaaacatgcagacgtaagctgacaaacgctgatttaagagttacttattaggagaaatccaaaggtcattctaggctgttggttgccctgacattgctrtcactgcaagactgtgcatttagaagcatttttgttttgtatcttgtgctaaggtcctttgaaaatgttcagctaacat

SEQ ID NO: 550972 - DNA, 742 bp, Homo sapiens
aagtaaagctaattggtgagaaggagggagagcaaaagctgacccttcacatcccctctcatcccagccaatgcacaaagccttccaggtataaatggtttcaagctgggatagaggaaaatctccacattagttaaaagttggaaattctagtgatttaatackactctatgttttaattattcaaatataacttattgggatagaagatgattggagtaatcttgaaaattatggaaaagttataggatcagtccaatatttaatccaaggaagaaacaagatcttataatgggtttaaagggactcgtgtgagtgtgtgtgtgtgtgtctgtgtgtgtgtgtgtgtggtcgaggaagaggaagtgcacctattgagttcagcctgttaaataacagctggaatttacaaaatgtctactacatgcttggtactgttctgttacatgtgataagtcatttaatgttcacagaaaatctgtgaaacaggcattataattaccctcattttacagatgatgaaattgagactgaaaggttaaataatttaccaaggccagacacttaataagtggagaatctgaggtttaaacctaggagtatatagctcaggagttcatgctcctaatcacactatgctttgcttattatctgagaaaatggctacaaaaagatgccgtgggactcacagaaaagggatttttgaatgagcaagttaaaacaatactctagaagcagcaat

SEQ ID NO: 550973 - DNA, 742 bp, Homo sapiens
aagtaaagctaattggtgagaaggagggagagcaaaagctgacccttcacatcccctctcatcccagccaatgcacaaagccttccaggtataaatggtttcaagctgggatagaggaaaatctccacattagttaaaagttggaaattctagtgatttaatacgactctatgttttaattattcaaatataacttattgggatagaagatgattggagtaatcttgaaaattatggaaaagttataggatcagtccaatatttaatccaaggaagaaacaagatcttataatgggtttaaagggactcgtgtgagtgtgtgtgtgtgtgtctgtgtgtgtgtgtgtgtggtcgaggaagaggaagtgcacctattgagttcagcctgttaartaacagctggaatttacaaaatgtctactacatgcttggtactgttctgttacatgtgataagtcatttaatgttcacagaaaatctgtgaaacaggcattataattaccctcattttacagatgatgaaattgagactgaaaggttaaataatttaccaaggccagacacttaataagtggagaatctgaggtttaaacctaggagtatatagctcaggagttcatgctcctaatcacactatgctttgcttattatctgagaaaatggctacaaaaagatgccgtgggactcacagaaaagggatttttgaatgagcaagttaaaacaatactctagaagcagcaat

SEQ ID NO: 550974 - DNA, 647 bp, Homo sapiens
ttattgtgtaatcggaaaattggacttcagaaacatctatattttttacttttgtaatttgtgaaattttttcttgcatttattagttaaaagttttgtctgttttgttaaactttgaagaaaatagtgccatcatktgagctgaaatgtaaacaagaaagtaatgtatccccaagagccaggcatggtggaggcagcttatcaaggtaaagaacccccaaaaagaaaggttgatttcagcgtagacagtgaagatgtatggttcagctaaatgtcttttataagttcacacagagatctctcccagagagatctaaatccctggatgtttctgtgagagtttatattaagaagaccaacatcttgaagcagcaccataatcagacatctttcttgacctccatttctaactgccaagaccaaatatgagtcaacacttccaatctataccgggaaatgcgaggctctgtggcaatactatattattccaaaacagtgcattactttgtataaagatcatttctaatactcacctgttcactcatttgtgtttgactactggcattagtattagcctctgtcaaggatgccaataacaacaaagaaaaatttttaaattaaatcagttttagactttcaaccacaat

SEQ ID NO: 550975 - DNA, 647 bp, Homo sapiens
ttattgtgtaatcggaaaattggacttcagaaacatctatattttttacttttgtaatttgtgaaattttttcttgcatttattagttaaaagttttgtctgttttgttaaactttgaagaaaatagtgccatcatgtgagctgaaatgtaaacaagaaagtaatgtatccccaagagccaggcatggtggaggcagcttatcaaggtaaagaacccccaaaaagaaaggttgatttcagcgtagacagtgaagatgtatggttcagctaaatgtcttttataagttcacacagagatctytcccagagagatctaaatccctggatgtttctgtgagagtttatattaagaagaccaacatcttgaagcagcaccataatcagacatctttcttgacctccatttctaactgccaagaccaaatatgagtcaacacttccaatctataccgggaaatgcgaggctctgtggcaatactatattattccaaaacagtgcattactttgtataaagatcatttctaatactcacctgttcactcatttgtgtttgactactggcattagtattagcctctgtcaaggatgccaataacaacaaagaaaaatttttaaattaaatcagttttagactttcaaccacaat

SEQ ID NO: 550976 - DNA, 2841 bp, Homo sapiens
cgtaaatacttgaaacagtttcggatttcttgatttgattttgaccgagacaccagctaagttgactgcttcttttagccttgatttccctatccgtaaaatggagataataatagtaccttctacctaaggtatttgtgaggatcaaatgagttaattttagttaaacccttggctcagtttctggcatataataaaaagttttcccagcttggagaccttaggcatgcatttcccgcaacaatttaagcagcataatgaattctatagttagccagagagctttattttgtttcacttttttgaaaagtgttggttctgggtatgcatattaatgaatatcaccagaaaaatacactccagtgactaagcctgggaacttagtctaacagcttttgcccttctctcttcctcctctctttcacctcaaggagtgggcaagccagcaccttttctcagcaccatgcatagccaagtggatgcagagaaaatgctgaactttcagaatttcttgaggttcctgaaagcctctgtgtcatcatgaaacagaagctcatcttacaaatctgtctttcatagaagcttcagttactgatgccaaatgtcaacatatcaaattgttggctaattttagccttatcaatgtcttgcagacatgtaattaacaccacagttcagcagcaattcaggcgcggagttccattttgcatcatgattttcgagaccttgaccattagtgctaaggttcaaagtctgaaagtgccatctccatatgggatgtctcctgttcctccacacctccacttgtccttttaaaatcagaatcaaaatggtccaagctcccatttcatgtattgtaggatgtccagtgccttcttggatatacctgggaatctcagagggcttttgcactcccagtcacttctcgtgtggaattctagatgggtccatgtggtggatggtgtcttgcctcctgaagctgttgtttcctcttcatcttactttaaacattgcccaccccctgcctcagaacatccccagatgttctggcaacttctgtgtagtaggcttttactgaaggcttgaaaatggctgagctggacaatggctcaaaacaaaacagaaaacaagttaaaatggaatagtcaacactgtacatttccttagcctctcccaccgtaggaattttctcatcaattgcctttcctgttgggctcccctgtgctgccatatggctggggcttttcacttcctccagctctcttatctcagcttctctcattttggattgctccttaatcttgtctagtgacccatcaatctccagactccaaattcacactacttttgtatagagggtaaaaacatttttgttctttccctcccactagaattccttgtagacatagagctgtctttgtttagaagaccgctttaatgagagtttggggagagagtgagctttcgacccccatgtcaccggtctcactccaaagcatcaaagacagtggaaggggatagagatgggaggagaagagaggcctcagaaagttggagagagagagctgtgtgagataaagtagcaaatgtaagaagccatgtctgctcatttctgcttgccagcctaatgtcagaagcctctgactctgtgatgacacccatctctctggaaacatgtgttgaagacaaaagaggatacagcacacaggccccccatgtcttttgcctgagtcactacattccttaaaagataagtgaccctagtccttgccttttcctacacataagatatcatctgatggggttagcgattgtgcctctataatctataaccagatgtactcttacatccaacttggatgtgattttgcacgtactaaacctctaccacctgtatataagcagtgcgctaaaatactgcaccagagcagtctgatagagctctctaaaggactgttcccaggctataggcttccttcagtccacagtcctcagtaagacttctgaataaagctaactttaattctttaagagcttgatttttttctctagttgacacctgggagagttgaaagtccaagcgagatcccaggagaaattttgggattggtgatgtttacagtgtccatcagccattgttcatgttgccatgatagatgtctcttctttgggccccctgtggaatattcagttaaagagaacattattaaggcattcttgctgtgggtagactcttccgggaaattggagaggaaatgttgtatacgaagttcatgtatctgaagaagcatccacagcagcaggagccacggcaccgagacggccatgaggaaatcagcttttgagacatgaggaaatgtagggacaagactgttctggaatgtgcagatatttaggagttgagctttgggacttcattaggcagtgagattgatgagagctgaggtyccagcaggaaacagttggcattctcagactgggttatttgaggagaatttaactcagggctgttttcgaaacaatgaatacagtccagggaaaccaacaagaaatagtggaggatcctggggctgctgtcagggctgggggagaaagtcaggtttattgctgggtaaatgctgcacctgacatcccagcatggtgaggaccaaaggagcttggggtggcacatggcttgtgtattagcttcttatggctgctgtaataaattactacaaacttagttgcttgaactaatacatatgcattatcatcttatgactgtgaagatcagcagtccagaatgggcctcaaagggctaaaatcaaggtgttggcagggctgtgttcctcctggaagctc

SEQ ID NO: 550977 - DNA, 519 bp, Homo sapiens
ctgaaaccccttcttccatgaatactcacattgctgctctcttctcgaagaagcctttctcactaacgcatctcagtctttccctttccacagacatatcccagaggaataggtctatcccattaccttatttatttttctcatagcacttatcaaaatcgaaattcgttggagttatttcttgattcattgtttatttccaaacmtacacacattagaacatattatccttcatggctagcatggagaaacatttcttccttgttcacctgcctccaattttaagataatatctagcccatactagacactcactaaaatgtttattgaaataaaaattctttctaaaaattatttctactactactgtggaggcctgtgggaaacaaacatgtactgaacaggtattgaacctatgttttctgaagcttttaggtgcgagtaatgagtatatgatattaaagaggaaaatccccagttagttcaagatgatgtgttcatttgttccttaggtcatga

SEQ ID NO: 550978 - DNA, 638 bp, Homo sapiens
attatggttctgctgcaatcaccacccagtgggttattcaagtcctcttccyctccttcagttaggagtcccagactgtggacagtgtggaccccagagttcaaaagatgtgagtcagagtcccagggaagtatttgagtttgtcagtggttctgctaatgaaggtaatggacggtagtatttaaggacttttccagaggcagcctatcatcatccaaaagaactttctgtgataatggagatgctctacatctgcatgatcctatgtgacagccactggctacatgtgacaactgagcactgaacagtatatagtgcaatggagaaactataaatttttaattttatttacatttaattcgtttaaatttaaaaataaagagccatatgtggacagcaaaattctagaattacgacctcactccacacaggaatcatagcccagtttgttttcacagggctcgcagacctcgagacccctagatgtaacagagcatgggctttggaggctgacacactagagtctcttacccaacctacacaaccttgaaattgtactttactgagcctcggcttcttcatctctataatgggaatctcaacaccaaactctcaggatggcctccctcacactgtgt

SEQ ID NO: 550979 - DNA, 1647 bp, Homo sapiens
tactataaagacacatgcacacatatgttcactgcagcactatttgcaatagcaaagacttggaaccaatccaaatgcccatcaatgatagactggataaagaaaatgtggcacatatacaccatggaatgttatgcagccataaaaaagaatgagttcatgtgctttgcagagacatggatgaagctggaaacaatcattcttagcaaactaacacagaaacagaaaaccaaacaccgcatgttctcacttataagcaggagttgaacaatgagaacatgtggacacaaggagggaaacatcacataccggggtctgtcaggggatgggggcaaggggagggataccattaggagaaatacctaatgcatgcggggcttaaaacctagatgacgggttgatggatgcagcaaaccactatggcacatgtgtacctatataaccaacctgtacattctgcacatatatcccagaacttaaaagtataattaaaaaaataatttatttcatttgtatagtccattaaattttttgtacattttttaaacctgcacttttcatagtttttgatacatccttgctccaataaatagcttgctaaaactactaaatctcatagatataccaatggtttgcatcatctaatggcacatttgcttgtcaaactgaggtcagccagtcccccttcattcactgttagtaactcatgtgttgcattgttaaaaacccagtatcacctcatctcccctctagcatcttctctgcagaggagaagccaggcactatatctcccaggatccccttccttgtatagttccagtttacattttccagtgagagagacttgcmtaagaaatggggccctggagagatggtgggacagacctgtacccatcagtggtggctgcaggtagaggagcaggcagatgtcaggttctcagtggcttccctgctaggctagagacccacctgctttgcttgtgtggactaagatgagtgataagagctttctcataggttctggagaatatagcaatctcgcagcaggattctgagaacctcccatccatgcttcaagctgaagtcttcagtatatgcttccctgacctccctactgcagcttccaggagctccaatggtgactggtattattatagtatcctgctgctgctataacaaactaccacaactatgtggcttaaaacaacaccaatgtattctcttatagttctggaggtaagaagtcaaaaatgggtcactatgggctaaaattaacatgtcgtcagagctgcatttcttctgaggctctaaaggaaaatctgtttcctcaccctttccagcttcttggggctgcctgcattctttggcttgtggtctcttcctccatcttccaagtcagcagtcacatcactttgacctctgattctgttgtcacagctctaactctgatgctgctttctactcctttcacttataaggactattgtgattacatcgaacctgcccagataatccaggataatcttcccatctcaagagcctcagcttaatcacatctgaaaatttccttttgccctattaggagacatttttataagttccagggattaggacacagacatatttaggagaccgttattctgcctg

SEQ ID NO: 550980 - DNA, 1647 bp, Homo sapiens
tactataaagacacatgcacacatatgttcactgcagcactatttgcaatagcaaagacttggaaccaatccaaatgcccatcaatgatagactggataaagaaaatgtggcacatatacaccatggaatgttatgcagccataaaaaagaatgagttcatgtgctttgcagagacatggatgaagctggaaacaatcattcttagcaaactaacacagaaacagaaaaccaaacaccgcatgttctcacttataagcaggagttgaacaatgagaacatgtggacacaaggagggaaacatcacataccggggtctgtcaggggatgggggcaaggggagggataccattaggagaaatacctaatgcatgcggggcttaaaacctagatgacgggttgatggatgcagcaaaccactatggcacatgtgtacctatataaccaacctgtacattctgcacatatatcccagaacttaaaagtataattaaaaaaataatttatttcatttgtatagtccattaaattttttgtacattttttaaacctgcacttttcatagtttttgatacatccttgctccaataaatagcttgctaaaactactaaatctcatagatataccaatggtttgcatcatctaatggcacatttgcttgtcaaactgaggtcagccagtcccccttcattcactgttagtaactcatgtgttgcattgttaaaaacccagtatcacctcatctcccctctagcatcttctctgcagaggagaagccaggcactatatctcccaggatccccttccttgtatagttccagtttacattttccagtgagagagacttgcataagaaatggggccctggagagatggtgggacagacctgtacccatcagtggtggctgcaggtagaggagcaggcagatgtcaggttctcagtggcttccctgctaggctagagacccacctgctttgcttgtgtggactaagatgagtgataagagctttctcataggttctggagaatatagcaatctcgcagcaggattctgagaacctcccatccatgcttcaagctgaagtcttcagtatatgcttccctgacctccctactgcagcttccaggagctccaatggtgactggtattattatagtatcctgctgctgctataacaaactaccacaactatgtggcttaaaacaacaccaatgtattctcttatagttctggaggtaagaagtcaaaaatgkgtcactatgggctaaaattaacatgtcgtcagagctgcatttcttctgaggctctaaaggaaaatctgtttcctcaccctttccagcttcttggggctgcctgcattctttggcttgtggtctcttcctccatcttccaagtcagcagtcacatcactttgacctctgattctgttgtcacagctctaactctgatgctgctttctactcctttcacttataaggactattgtgattacatcgaacctgcccagataatccaggataatcttcccatctcaagagcctcagcttaatcacatctgaaaatttccttttgccctattaggagacatttttataagttccagggattaggacacagacatatttaggagaccgttattctgcctg

SEQ ID NO: 550981 - DNA, 545 bp, Homo sapiens
gctggactggacttgagaggtggaaggtaagggagaaggagctcggggatgccaccttgtgcggcttgtgcagctaagtggatgatgctgccattcactgagtcagtagactgtggaggagaagcaggtttggamaagcagggcctgacttttaaattaactgcaggtggggctgggcacggtggctcacgcctgtaatcccagcaccttgggaggccaaggtgggcggatcacgaggtcaggagtttgagaccagcctggccaatatggtgagaccccgtctctactaaaaatacaaaaaaattagctgggcatggtggtgcacacctgtaatcccagctatgtgggaggctgaggcagaagaatcgcttgaacccaggaggcggaggttgcagtgagctgagattgcgccacggcactccagcctgggtgacagagcgagaccaggtctcaaaaaaaaaaaaaaaaaaaattaactccaggtgtttctgcttgaaagacagctcagagatttgggttatcaggctcactgccgtggcttccat

SEQ ID NO: 550982 - DNA, 545 bp, Homo sapiens
gctggactggacttgagaggtggaaggtaagggagaaggagctcggggatgccaccttgtgcggcttgtgcagctaagtggatgatgctgccattcactgagtcagtagactgtggaggagaagcaggtttggacaagcagggcctgacttttaaattaactgcaggtggggctgggcacggtggctcaygcctgtaatcccagcaccttgggaggccaaggtgggcggatcacgaggtcaggagtttgagaccagcctggccaatatggtgagaccccgtctctactaaaaatacaaaaaaattagctgggcatggtggtgcacacctgtaatcccagctatgtgggaggctgaggcagaagaatcgcttgaacccaggaggcggaggttgcagtgagctgagattgcgccacggcactccagcctgggtgacagagcgagaccaggtctcaaaaaaaaaaaaaaaaaaaattaactccaggtgtttctgcttgaaagacagctcagagatttgggttatcaggctcactgccgtggcttccat

SEQ ID NO: 550983 - DNA, 1503 bp, Homo sapiens
ccttctgagtgaggcagcaggcatgtggacaccacacccagggatgcacggggggtggggaaggggcctggcagaagggcaggtgcttctggttctccctagattctcaacctttgtggcagcaagagggacagagccctgtccatatgacaaggagggggtcaacagtgctgaccccctggatgcctgtcttcacataagctagacggcctgtggagtgtggggtcacccctctctttcctgcttattattctatgtaatgaataaatcctagactcatgaatttgaaaacacacacacacacgcacagcatttttttgggccacattctgactattataaagtttcctggcttccctctgacctgtcaggggccagtgaaagttaaggaggaagaagcagggaagggcatacctttgggtcatgcatcctataaggaaggtttgaacccaagtattcaaaaaaagtaaaaatctcttctctccgcacttgtttcccctctgctagcacaggctctgggaggacaggggatcctgtccgttttgtgcactgctgatccccagtgcaagtggagcaggaggctctccagctgggtgcagggctcatgcctataatcccagtaatttgggaggctgcggcaggcggatcatttgagcttaggagttcgagaccagcctgggcaacatggtaatatgtgcaactcgatttacccaaatgtgtgtcaggtttacccacaacacgatcaggtaagggagagaagcatccataagcttggccacctgaacatcatctgagggggaccacagctccaacttgctcactggctctgccaccttatggacaggaagccacagtccctctcccccagaagttaaggatataaaatcgtccagggagggtgsccgccgttgatgtagaggacataggtgaagccatctttgaggacccctcgaatggagtagtaataggggagatagtggtgctgcttgaagtctctgttttcatagaagtttattgctgtgttgttggtggtgaggacatgcaggtaaatggctttgcagtggtcctgggcggtggttgatatgtgatcctttaaactttcaagtaagagggaaccttggggagaagaggtaaaggtaatgcaggcagagcagttaggaaggaaggatgactgggctaggatgggggctttgcatgagtctctcggagatgtctcggcccaccgtatcagagaccagcctttcttcaccaccactgtcaaagtccctaaaatctcatggccagatggagcctggtagctacagactgctgggagggactgcagaggtggcctggtagcgccctcccatgggctgggcccgcatggagactccctttcagacaacaaacagggtaaatgtgagcccaggaaaacatggactagatgggcctgggtttaaaattaattaagactctgccgctcactggccgtgtggccgagtggggtgggacatcggagaaacg

SEQ ID NO: 550984 - DNA, 582 bp, Homo sapiens
ccctaaattacttaacttttttgagttttagttttttcatctgcaagcaggaaaaataatagcaccactttcataggattactatgaaggttaaatgaaatataaggcatgtaagacacagcaagcactgggcatagagcaagctctcagtaagtagtaattattttattatccccctgtattttctgtgaatataagtctgtagagataaaatcagcagaaatgcatgttcttaattctaagaatttttctcgtagtttttytggaggggttaaatttttcctctatgctttcactttttggaatattttttgaatggccactcatcttttctcttttattttccattaaaaaattctaatttctgtgagctttttatgactttatcttttacttcttttattctgccataatctttcttgttctcaaatggttcttaaaaatagcattttattttagtttcattgctgtaatatcttctcctatctgtgagcatattaattacagtttttaaagaagttttcttttactccctgcattgccttttttcttacagccttctttgtcccatgtaatggtttt

SEQ ID NO: 550985 - DNA, 777 bp, Homo sapiens
gctaatttttcacatgaaatggtctacaacaggaaaaataacttaaagacaattttagagatgggtaggatattttccacagtggactccaaggtcaaacgacaaaactacaacaaatttaaagatctcaatttactttattatgagcctagaattgggcaacactccattccagaaaacagaataagtgttcccacgagctgagcagaaggggttggctttacagacagaagggatgaagaaagcagaagcaaagaacaaagagcatatccctggtttcaaagctacttttctggtaaggtgggcacaggaagacagaacaatagagaataactgactaggttattctcaggttgcttcaggctgctgcttttgtgtgaggattaaagcagagagaattcattatcatgctgcttaaaaatggaaactggcctgtttgggaaatctctctcctgtcagataacaacttagttttggttttgtaacctggaactttagcataggtgactctattttratttttagtctggtcctctggggtctagtgcaggagcttcatccaaaacaatgatctcccataattttactttacttaacaccagcttttacagggcaggcaaaaacctctgatggagcattacatgacaatattccagaatctctgacttaatccttagaacctgaaaaggcttttttgttttgttttgtttttgagacagaatcttgctctgtggcccaggctggagtgcaatggcatgatctcggctcactgcaacc

SEQ ID NO: 550986 - DNA, 1080 bp, Homo sapiens
ccaacttttgccctggaggaagacattgtctttaatataatgaacaacaaacaaacctgccttctcccctggcgsgagatactacctctatctcccaagactgtttgctatacaaacatcctggggaatagtctggaataaaatcattcagtgctccagctcacaagaggtacaaaaaggtgatagatccatggaaaattatttcctaatagacacaattcttatctcctcctggggatatggccaatagttgttactagaaatcagatcatcactggactttctagcagttaccacagaggcagaatttcatttggcactgaatgacccttgagtcatagaagactagaggtaaaaggagcctgcaagaaagtgataagaacttccttaccaacggctccaagctccttatccaaccaccctctgacatcagctgttgtacaaggaaaattggcagaaagcaggtaagcctcacccatagattttgctcaaataaacagagcccttaatgtccttcatagtcccaaaacagcttgggtctggtctgcaacttcagctcttcactctgaacctaagctaattttaagagtttggtgcttgtttcagcagcacatagactaaaactggaatgatacaaagaagattagcatggccccaatgcaaggatgacaaattcatgaagcattctataattttttattattaaaaaatattaataaaataagagtttggaagagtaagctaattttgttacttttatgacactggaaatcctatatgtatatccatttggctttctttaagcattaaaaaaaattagaactacttcttttggagtaaaaccagatgagtcatttctttcattactctttcattccactggtattttttgaggtcattctgtgtgccaggagctgctctaggcagcagcaaattggtggtaaatatgagcataaaggcctgcccttggagagcttacattttaatgaaggaaataaaaaaataaaaggtttttaaaaacacaaacatttcaaagactcatacataaaatgaaagaaataaaaaggatgacatgataga

SEQ ID NO: 550987 - DNA, 2018 bp, Homo sapiens
taaaaggatttaagtgatacaatatatgtctttgatcacaatggaattaatagggatggtttcagtgcatatatatatatgtcaaaacatcacattttacattttatgtgcagatttttgtatgttacactttgctaaagctgcttttaaaaatatatataaagagcatgaaaaagcaagccttgttatcagggatatataaagaactacaaatcaataacaaggacaaacttaagagaatatagatgatagtcatgaaaaggcacttcacagaagaaatccaaatggccaatagacaaatgaaacgtttccagagtcgacccttccccgctctgcaaaatcacttctcaagaagaagccacagagtcaggtgtgttcagcacatttttgctcacaacatgtgattatatccttggaaaccaagagttgtgaccccaccattctgggttacacagatggtctagccagagtgaccaaagtccttgtctaaatgtctgaagtgggagtggaaagtggggagctgcctaggacccaggaaataggggacatttttcagttgcatgagtttctcctgagtcctcaatggctccatttataaatgtccctaacccygggtcagtgtgggtatcgggggaggagactaaagttggtgatggggattggggggatggggattctgcctaattatttctaagcttctgacagcaccctaaagcacaaagacaaacttctctttcacaattattttctgaggattaatgccagaaaagaagcccccaagggtaaagggagctctcattccacttcttctatcaacaatgccctctttgtctctctccttcccaccagacaagaccagcctcctcccacagccatacgttgacaacacgtgccaaggcctggggcaacagggtacccagggtgaagggctcacccaagagtagggagcgaagagaaatgtggaagctcagcacctctgtgccccaagaacgatgatgaagtggcgtcatttgtctggagtaatacccaagattcattgcctcacgccaaggaaatcaagaaggtggagacgcacaaggaggagtttaagattggaggtttaataggcaaaagaaagagaaaaaagaaaagctctctctcctgcagagagagagggacttccgagtgggtcttccggttttgtggtgaaatgcacggggggggggttttatagacaagcttgaggaggcagtgtctgatttacatagggcccgagagattagtcagaccaggtgtgccatttgcatagcgcaccaacaagttggccatctcaccttaaccttttattatgcagatggggtctctacttggccatcaccacgttgcctgcttttttactgcaagcgtgttgacaaaggaaagggaagagggcacctccatgttgaatatacctggcttccaggtgtcccttttctattggcacagctgttggcatttacctatgcaagcttttagcttgcttatctatgcttgcagcttaatttttcaggctgcttattgttagaaaagaaattatttgggggctgcttttcattaaagggaaatcttaccacggactctcttaccctcactatctgcctaaataatttttttctagctcctgtatcaatgacagaagggatctttcttctccctccctcttttccacacctgggtgcatctacctggtttgggggagggtgagcgacacaaggaacaaaggttgagaaggaatcagcagaagaaaaggctcagaactgaaaacaaagcatcttccacagagtcaaatataacagcacagggcctaggatactgtgtgacctagagaaaagggagcaaagccagccttgggcccatctttccgcagaaatctggaagaaacaaaactataaactggtgaggtcttaagagtgcacaggttttaaatctgtaatattgaccaacagtcagcaaatacatttctttctcaccagtatggcaatgattcaactgagcaacaa

SEQ ID NO: 550988 - DNA, 2018 bp, Homo sapiens
taaaaggatttaagtgatacaatatatgtctttgatcacaatggaattaatagggatggtttcagtgcatatatatatatgtcaaaacatcacattttacattttatgtgcagatttttgtatgttacactttgctaaagctgcttttaaaaatatatataaagagcatgaaaaagcaagccttgttatcagggatatataaagaactacaaatcaataacaaggacaaacttaagagaatatagatgatagtcatgaaaaggcacttcacagaagaaatccaaatggccaatagacaaatgaaacgtttccagagtcgacccttccccgctctgcaaaatcacttctcaagaagaagccacagagtcaggtgtgttcagcacatttttgctcacaacatgtgattatatccttggaaaccaagagttgtgaccccaccattctgggttacacagatggtctagccagagtgaccaaagtccttgtctaaatgtctgaagtgggagtggaaagtggggagctgcctaggacccaggaaataggggacatttttcagttgcatgagtttctcctgagtcctcaatggctccatttataaatgtccctaaccctgggtcagtgtgggtatcgggggaggagactaaagttggtgatggggattggggggatggggattctgcctaattatttctaagcttctgacagcaccctaaagcacaaagacaaacttctctttcacaattattttctgaggattaatgccagaaaagaagcccccaagggtaaagggagctctcattccacttcttctatcaacaatgccctctttgtctctctccttcccaccagacaagaccagcctcctcccacagccatacgttgacaacrcgtgccaaggcctggggcaacagggtacccagggtgaagggctcacccaagagtagggagcgaagagaaatgtggaagctcagcacctctgtgccccaagaacgatgatgaagtggcgtcatttgtctggagtaatacccaagattcattgcctcacgccaaggaaatcaagaaggtggagacgcacaaggaggagtttaagattggaggtttaataggcaaaagaaagagaaaaaagaaaagctctctctcctgcagagagagagggacttccgagtgggtcttccggttttgtggtgaaatgcacggggggggggttttatagacaagcttgaggaggcagtgtctgatttacatagggcccgagagattagtcagaccaggtgtgccatttgcatagcgcaccaacaagttggccatctcaccttaaccttttattatgcagatggggtctctacttggccatcaccacgttgcctgcttttttactgcaagcgtgttgacaaaggaaagggaagagggcacctccatgttgaatatacctggcttccaggtgtcccttttctattggcacagctgttggcatttacctatgcaagcttttagcttgcttatctatgcttgcagcttaatttttcaggctgcttattgttagaaaagaaattatttgggggctgcttttcattaaagggaaatcttaccacggactctcttaccctcactatctgcctaaataatttttttctagctcctgtatcaatgacagaagggatctttcttctccctccctcttttccacacctgggtgcatctacctggtttgggggagggtgagcgacacaaggaacaaaggttgagaaggaatcagcagaagaaaaggctcagaactgaaaacaaagcatcttccacagagtcaaatataacagcacagggcctaggatactgtgtgacctagagaaaagggagcaaagccagccttgggcccatctttccgcagaaatctggaagaaacaaaactataaactggtgaggtcttaagagtgcacaggttttaaatctgtaatattgaccaacagtcagcaaatacatttctttctcaccagtatggcaatgattcaactgagcaacaa

SEQ ID NO: 550989 - DNA, 2018 bp, Homo sapiens
taaaaggatttaagtgatacaatatatgtctttgatcacaatggaattaatagggatggtttcagtgcatatatatatatgtcaaaacatcacattttacattttatgtgcagatttttgtatgttacactttgctaaagctgcttttaaaaatatatataaagagcatgaaaaagcaagccttgttatcagggatatataaagaactacaaatcaataacaaggacaaacttaagagaatatagatgatagtcatgaaaaggcacttcacagaagaaatccaaatggccaatagacaaatgaaacgtttccagagtcgacccttccccgctctgcaaaatcacttctcaagaagaagccacagagtcaggtgtgttcagcacatttttgctcacaacatgtgattatatccttggaaaccaagagttgtgaccccaccattctgggttacacagatggtctagccagagtgaccaaagtccttgtctaaatgtctgaagtgggagtggaaagtggggagctgcctaggacccaggaaataggggacatttttcagttgcatgagtttctcctgagtcctcaatggctccatttataaatgtccctaaccctgggtcagtgtgggtatcgggggaggagactaaagttggtgatggggattggggggatggggattctgcctaattatttctaagcttctgacagcaccctaaagcacaaagacaaacttctctttcacaattattttctgaggattaatgccagaaaagaagcccccaagggtaaagggagctctcattccacttcttctatcaacaatgccctctttgtctctctccttcccaccagacaagaccagcctcctcccacagccatacgttgacaacacgtgccaaggcctggggcaacagggtacccagggtgaagggctcacccaagagtagggagcgaagagaaatgtggaagctcagcacctctgtgccccaagaacgatgatgaagtggcgtcatttgtctggagtaatacccaagattcattgcctcacgccaaggaaatcaagaaggtggagacgcacaaggaggagtttaagattggaggtttaataggcaaaagaaagagaaaaaagaaaagctctctctcctgcagagagagagggacttccgagtgggtcttccggttttgtggtgaaatgcacggggggggrgttttatagacaagcttgaggaggcagtgtctgatttacatagggcccgagagattagtcagaccaggtgtgccatttgcatagcgcaccaacaagttggccatctcaccttaaccttttattatgcagatggggtctctacttggccatcaccacgttgcctgcttttttactgcaagcgtgttgacaaaggaaagggaagagggcacctccatgttgaatatacctggcttccaggtgtcccttttctattggcacagctgttggcatttacctatgcaagcttttagcttgcttatctatgcttgcagcttaatttttcaggctgcttattgttagaaaagaaattatttgggggctgcttttcattaaagggaaatcttaccacggactctcttaccctcactatctgcctaaataatttttttctagctcctgtatcaatgacagaagggatctttcttctccctccctcttttccacacctgggtgcatctacctggtttgggggagggtgagcgacacaaggaacaaaggttgagaaggaatcagcagaagaaaaggctcagaactgaaaacaaagcatcttccacagagtcaaatataacagcacagggcctaggatactgtgtgacctagagaaaagggagcaaagccagccttgggcccatctttccgcagaaatctggaagaaacaaaactataaactggtgaggtcttaagagtgcacaggttttaaatctgtaatattgaccaacagtcagcaaatacatttctttctcaccagtatggcaatgattcaactgagcaacaa

SEQ ID NO: 550990 - DNA, 537 bp, Homo sapiens
gtgagtaaaagaattaaaaagataagtgccaggttatcgcgttcaagtacacggcaagaggagatgatttcaagttcccattctaaatcaagagactcctggctgggcgcggtggctcacgcctgtaatcccagcacttcgggaggctgaggcaggcagatcatgaggtcaggagatcgagaccatcctggctaacatggtgaaactcagtctctactaaaaatacaaaaaattagctgggcgtggtggcrggtgcctgtagtcccagctactcaggaggctgaggcaggagaatggcttgaacccgggaggcggagcttgcagtgagccaagattgagccactgcactccagcctgggtgacagagcaagactgtctcagaaaaaaaaaaaagagattcctgaagtggtggagttggaaggggtctcagcggtcacctgccaagctcaactgccaacctggacaaggatgtcctgcgaacaccccacttctgacatgctgctaggcagtttcagcccatatgccaccacagatgga

SEQ ID NO: 550991 - DNA, 669 bp, Homo sapiens
tcaacttactagctgtatgtccttgagtaacctctctgagcctcagtttccccatctgyaaaatggggataatacctgcctcgtagggttgtcgggaggattaaatgagctcatatcatgtgaagcactagaacggagcttgtatatattaagtgctatgtggccatttgctgttaatactttttttttttttttttttgagacagagtctctgtcacccaggctggagtgcagtggctagatctcggctcactgcaacctccacctcctgggttcaagcgattcccctgcctcagcttcctgagtagctgggattataggcgaccaccaccacacctggctaatttttgtatttttagtagagacggggtttcactatgttggccaggctggtctcgaactcttgacctcaaatgattcacccgccttggtctcccaaagtgctgggattacaggcatgagccaccgtgcctggccagctgtaaatacctttaagatgaacataacgtctgccttccgcgcgtgttgggagcctggtgcattgtttgcccaggtgtgctcttctcagaacactgatcccttgtgttgttaaatgttaaataagaagggtcctgtccaagcccagttgccttaaggaagcctggggttaaaagctagggaggcttctct

SEQ ID NO: 550992 - DNA, 513 bp, Homo sapiens
ggttgttaaagttttcatacatgattactgagaaaagtactgatgataaagccagttctgtctgatttcaaaagttattcagttgatgtcctgcctttagaatccgaatagtagtacaacacagtgaaaactacaaggcaggtaatactaacttcatattaccgatgaggaaattgagtctcagagagagtagctgggttcagataatgcaaacaaacaggtagatagatgggtatttagataaayggaaacacttactgcacatatcccatgtgactagcatctctctgtgcatttttctacaatgtattcccattaaacctcacctccagaaagcatgagttaggtattcaaatacttgtcaaacagatggaaaacagactcacagaggtttatccaatgtcactcaactagtccttaactattactgcatttacttaactgataacttaatgaatggacttgcacctcattttttattccgtctattctgttctagtctcactcatacct

SEQ ID NO: 550993 - DNA, 529 bp, Homo sapiens
gccgggcatggtggcgggcgcctgtagtcccagctactcgggaggctgaggcaggagaatggtgtgaacccaggaggcggagcttgcagtgagccgagatggcgccactgcactctagcctgggcaacagagcragactctgtctcaaaaaaaaaaaaaaaaaaaaaaaacctttggccctttggctgggcacggtggctcctgcctgtaatcccagcactttgggaagccgaggcgggtggatcacctaagaccaggagttcgaaaccagtctggccaacatggcaaaaccccgtctctactaaaaatacaaaaattagctgggtgcgggtgtgggcacctataatcccagcaacttgggaggctgaggcaggagaatcacttgaacccaggaggtggaggttgcagcgagccaagatcacatcattgcactccagcctgggcgacagcaagactctgtctcaaaaaaaaataaaaaaataaaaaaaaataaaaataacctctaaaaaattgacatatcacctcattc

SEQ ID NO: 550994 - DNA, 529 bp, Homo sapiens
gccgggcatggtggcgggcgcctgtagtcccagctactcgggaggctgaggcaggagaatggtgtgaacccaggaggcggagcttgcagtgagccgagatggcgccactgcactctagcctgggcaacagagcgagactctgtctcaaaaaaaaaaaaaaaaaaaaaaaacctttggccctttggctgggcacggtggctcctgcctgtaatcccagcactttgggaagccgaggcgggtggatcacctaagaccaggagttcgaaaccagtctggccaacatggcaaaaccccgtctctactaaaaatacaaaaatkagctgggtgcgggtgtgggcacctataatcccagcaacttgggaggctgaggcaggagaatcacttgaacccaggaggtggaggttgcagcgagccaagatcacatcattgcactccagcctgggcgacagcaagactctgtctcaaaaaaaaataaaaaaataaaaaaaaataaaaataacctctaaaaaattgacatatcacctcattc

SEQ ID NO: 550995 - DNA, 537 bp, Homo sapiens
tcaagcgattctcctgcctcagcctcccaagtagctgggattacaggcgcccaccaccacacctggctaatttttgtatttctcatagasacagggtttcaccatcttggccaggctgatctcgaactcctgacctcaagtgatctgcttgcctcagcctcccaaagtgttgagattacaggtgtgagccactgcacccagctgtttttgtactttttaacatgtttaatggttaagaaaaaaaatcaacagaagaatattaaaaataaaagaatattttgtgacgtgaaaattgtgaaattcagtgtccataaataaagtttaattgaaatgccattacacccatttatttatatgttgtctatggctgcttgcatatggcaacagcagagatgaagagtccagctgaggttggatgatccataaggcctaaaatatttactatattgcccttcacgggaaaacttggccaatctagcaactgctgggcacgtaggcaggacttcatgatagctgcagtgattctcatttcacaat

SEQ ID NO: 550996 - DNA, 537 bp, Homo sapiens
tcaagcgattctcctgcctcagcctcccaagtagctgggattacaggcgcccaccaccacacctggctaatttttgtatttctcatagacacagggtttcaccatcttggccaggctgatctcgaactcctgacctcaagtgatctgcttgcctcagcctcccaaagtgttgagattacaggtgtgagccactgcacccagctgtttttgtactttttaacatgtttaatggttaagaaaaaaaatcaacagaagaatattaaaaataaaagaatattttgtgacgtgaaaattgtgaaattcagtgtccataaataaagtttaattgaaatgccattacacccatttatttatatgttgtctatggctgcttgcatatggcaacagcagagatgaagagtccagctgaggttggatgatccataaggcctaaaatatttactatattgcccttcacgggaaaacttggccaatctagcaactgctgggcacgtaggcrggacttcatgatagctgcagtgattctcatttcacaat

SEQ ID NO: 550997 - DNA, 537 bp, Homo sapiens
agcactttgggaggccaaagcaggtggatgacctgaggtcaggagttcgagactggcctggccaacatggtgaaaccccgtctctactaaacatacaaaaattagctgagtatggtggcaggcacctgtaatcccaggtactcaggagtctgagtcaggagaatcacttgaacccaggaggcaatggttgcagtgagccaagatcayaccattgcactctaggctggatgacaagagtgaaactctggctcaaaaataaaataaataaataaataaataaatatttattcagtgttttctttatggtagccactggtctagcacagaacatgtgtggtgaataagtgaaaaggcctctgctctcatggaatttatattctaacgagagaagatggacaaaaaattaataagcaaatagaaaatgttggattcatggctagataaaatcttaagcacaggggttttcttggggtgcttggaattagaaggcatatctggacaggtcacccacagttgtgggtgtaacaaaatgactca

SEQ ID NO: 550998 - DNA, 537 bp, Homo sapiens
agcactttgggaggccaaagcaggtggatgacctgaggtcaggagttcgagactggcctggccaacatggtgaaaccccgtctctactaaacatacaaaaattagctgagtatggtggcaggcacctgtaatcccaggtactcaggagtctgagtcaggagaatcacttgaacccaggaggcaatggttgcagtgagccaagatcacaccattgcactctagsctggatgacaagagtgaaactctggctcaaaaataaaataaataaataaataaataaatatttattcagtgttttctttatggtagccactggtctagcacagaacatgtgtggtgaataagtgaaaaggcctctgctctcatggaatttatattctaacgagagaagatggacaaaaaattaataagcaaatagaaaatgttggattcatggctagataaaatcttaagcacaggggttttcttggggtgcttggaattagaaggcatatctggacaggtcacccacagttgtgggtgtaacaaaatgactca

SEQ ID NO: 550999 - DNA, 537 bp, Homo sapiens
agcactttgggaggccaaagcaggtggatgacctgaggtcaggagttcgagactggcctggccaacatggtgaaaccccgtctctactaaacatacaaaaattagctgagtatggtggcaggcacctgtaatcccaggtactcaggagtctgagtcaggagaatcacttgaacccaggaggcaatggttgcagtgagccaagatcacaccattgcactctaggctggatgacaagagtgaaactctggctcaaaaataaaataaataaataaataaataaatatttattcagtgttttctttatggtagccactggtstagcacagaacatgtgtggtgaataagtgaaaaggcctctgctctcatggaatttatattctaacgagagaagatggacaaaaaattaataagcaaatagaaaatgttggattcatggctagataaaatcttaagcacaggggttttcttggggtgcttggaattagaaggcatatctggacaggtcacccacagttgtgggtgtaacaaaatgactca

SEQ ID NO: 551000 - DNA, 581 bp, Homo sapiens
agtattttagttccagctctctgctgaaagtggttgtaaaaatttatctggttagtaactgaaactttgactcagtggtagcctaaattcaatgaggttgaaatcctagaacttctgtggcatactatgaaggaaggaataaaagrgcatatggaggtaggtaggtattttggagtagatttattccatgtgtcttgcacaatcgattctctccatgccatcaccaccacacgagacactgtattctcagagagatcccaaaggacattcttttaacttaagcattgagaaatacattgacaaatagaatgccccagaagtcactctcttctataagccagagatgatggtgggagatgctgccaatgagatagcttcctgaattcactggggtttctggaattctacaggggcaaggtaattccaagtggtaatgcctagcctttagaattaaggggagaccattagtagaaggcaggagtagccaattagcatggagcatttttattatctgcatggattttttggttatagataattatggtattcataaaagcaaatatataaacacttttctaaaa

SEQ ID NO: 551001 - DNA, 548 bp, Homo sapiens
gtttaagattagcacaactgatggctcttccctgcctcagcccagctcagccacctgcttgcaygcaccaatcaataatcccttcttgaccttttccatatctctgggcttgacctattttcacttttggtcctcatcttgatctaacccattatatttggagatccctttgctcacttgagccctagatagtcctctgacataacagaagtctcagccttggcacacatctccaaccttctttccctacatgaacccttgacttcaagaaactagtctactcatagagccttgggtgaaccatgccatgcacatcgacaatttcattctccaaaaggcctgtcctgtgagactcaggcccaggttcttctctcaagaagccttctccaacttctttgcctatgaaaatcacctcagcctctgaactagaataccttactgtcttctccagtgactcacatagccggtcccagaaaactgtgtcccagaggatgtctccaagggaaaagctccctcttggagattaacaacacacattagcatattaa

SEQ ID NO: 551002 - DNA, 548 bp, Homo sapiens
gtttaagattagcacaactgatggctcttccctgcctcagcccagctcagccacctgcttgcatgcaccaatcaataatcccttcttgaccttttccatatctctgggcttgacctattttcacttttggtcctcatcttgatctaacccattatatttggagatccctttgctcacttgagccctagatagtcctctgacataacagaagtctcagccttggcacacatctccaaccttctttccctacatgaacccttgacttcaagaaactagtctactcatagagccttgggtgaaccatgccatgcacatcgacaatttcattctccaaaaggcctgtcctgtgagactcaggcccaggttcttctctcaagaagccttctccaacttctttgmctatgaaaatcacctcagcctctgaactagaataccttactgtcttctccagtgactcacatagccggtcccagaaaactgtgtcccagaggatgtctccaagggaaaagctccctcttggagattaacaacacacattagcatattaa

SEQ ID NO: 551003 - DNA, 547 bp, Homo sapiens
tcagacagaccccattctaattctggcacagctctcactagaaagactacgaggtcaaggatcatgtctgttttgtccatcaatgtctggtacacgcacagtgcctgatacaggccatgcagtcaatgagtattcaatgaatgaatgaaagacaaagcaggtctcaacccaggtgattttgcccaacagagcatatttggcggtgtacagagatagttttggctgtcccactagcatctagtgggtaaaagtaaggatgttttgcatgaaacatcctacaatgtataggacaaagaatgacccagccccaaatgtcaacagtgccagggttgagaagtcctgctgtacagtcaggccaaacagggatggatttctaaacactgaccccagctgttaggccttgagcaaatcacaaaatttctgtcttaatatcctcatctgttgaatgggattctaatgggatcttgtattgtacacttgtaagctaatacatattcaaatgagaagaactgcataatccytaggaagtggttaacacagtgactga

SEQ ID NO: 551004 - DNA, 551 bp, Homo sapiens
gactcygtcttaaaaaaaaaaaaaaaaaaaaaaaggaagcatgtgaatgcatgctttgaaacggaacgtgtatctttttgcgaataatgtcacctaattcttaagctactttgggagcataatacactatctgatcaatttgtgcattcaggactaagtcctttataagggtggtggaaattttgctttcagatgtgttccattgaggatataactagcctttgataatgaatggatttttccattcaaaataaagatatcactcaggagggttccaatatatcttctcattatatggcctggacttcgcatacttaaatgagcttacctcaacctacatttccaaggtcttcccctccctctcttccctctccacttttggctatagtcatgtgacttttcaaatatacacacagatattaccaaatatgttcccagacatgtagaggcagcatgttgtagtaattaagactatgaactctagacctaggctcttggattcaaagcccagctttgacaattactgttcctttgggcaagttacttagtaa

SEQ ID NO: 551005 - DNA, 881 bp, Homo sapiens
acagagggagctgttaaaattcccaaggtcgtgactgcatctcaagtagatactaaagaaaccaggaacagcaatgctgttacacataaggcaaggtacatttactctctaaaaaccaaagaggatggaatgacttcccaagaaacaagtcctctttattcaaatgtattttaaatgatgctacttagataaagaaatgcttaattccactaaacacactgctttctccactccagaatctcaccacagtgacactagtgacattttggggctggatgattccttttagtgggggctgtcctttacattggaatgtatagcagtatccctggcctctaccaactagaaagtaataccataacacttctaacaatggcaataacaagaaatgtctccagacattacctaatgtcccagggtgcaggggggagatgctgaccccagctcagaaccatagctgtactctaccaatcctagtacaatcttcaacaatgattcttctgtagccctcatacatactgcatgcaagacaaataattaatgcccccaatgctgataaattgctccatgataaattawattttcttactttcattctagtttttaagaatgaaaacaatgtagttatatggaaaacaatgtagttatatgaaaagaaataaaccaagcgtaagatgctcaaatagtataaaaatcgtagggagagatgggtattaatgaagagctcaaataaagcaacttaacataaaatatcacagacacactttgggcaaaggcaagcaactttcttgtgcatattttaaagttaaatttaatgcagttatttaatctctgaaattcaagttcctccaaatataccattaatatggttatcacatttt

SEQ ID NO: 551006 - DNA, 1894 bp, Homo sapiens
cgtcatttgttctacaaacatatgttgaacaccaattacatgtcaggtgttatgtcaaagtagtggctattcaaagatgaataaaatacagcacttaccttggaaaagctctgagaaagacaaataactgtgatagaagagttgttaatatttctcctcttattttcactttttatttcacaccattcactttatattttgaaaaaatgaaattagtctgtgtcttagcttgagttgctgtaacaaaatgccataatctggatggtttaagcaacaaacacttattgcttagctagctagttttttggcctcttcttataagggtgctattcccattcatgtgaattccaccctcatgacctaattatctctgaaaggccccaccttcaaatactatcaaactgggattagggtttcaacatatggatttggaaatatggggaggtgagtcagaattattcagtccattgcatagtctcttttactcaatctttataagtcaatgaagtgagacaaggaatgagaactttgggataagagtcccagcactctcagttggcatgcctctggctggagcctctgggatgcctccttttgcttcttcttagtcatccagttctgcccatgtgacctttcactggatagaagggctaggattcaatggataacaggtcttggtggtagggttcacattcattcattccatcagtaataatgtaccgagcaggggaccagggatatagaagtgaaaaagataaagtcctttccctcatgcagcttgcatcctgtgggaagtgcctctacacatttgcagttgatagaggaactggaaagcaacagacaatacccacaggaactaccaccacgtgaaatggtcatagaagcacaatgtgggtcccttaggtctgcaggagctatcccatgtcatacctggacaacgggattgagggagaatatattctgattcattgtttaaaaactttggatgacacctaagctatttctgcaaaggattgtttgcaagtaaatataccactatgtgttattcattttaaggaatcttactgagttcaagtaagaaaatgcatttatttctccttctattccttcctctccacctgcccatttcatgatctccttatccatccacgcgtttgggggcatacmatgggcacgtgtactctgaattgagttagaataagttcagattttcttttctacccaggagccaggttttttgtttatttgttgttgttgttgttttattaatcagaagatcatttaggcattcatagacagtaagagttcacactgaatattggtgttcaaactcctgaaaagatgtgtggattgtatggcctgcaccgaacagaagtaaatccagttctctatttgaataaacaaaagaggtgaaagctgcttatcataaaatgtttttagaaggactggtatggatttcctatttcaagaattatacttttttagcatataaataaaattttatcagtaattttcatcttccctattagggaattatctcttctccttagtaaataaaatatcagaaaaataaacatagaatactgtttaattttctccttgcttgcatttttcctatggaaaattgattcaataaaatttatggaacatgtcctcaggtcagaatagttctatgacatattattttttgtctgaaccaatgttcatagctagaaacaccaaaccttttaatatttattttcttgacttgtacaattaatatgaatgtttattcatttattatatattatacattttcacataaatgaatatatgaactaatatagttttcagtaagtatggaattttaaatattgaattgtgtaactcttgtggctaattagacaataccagt

SEQ ID NO: 551007 - DNA, 649 bp, Homo sapiens
tgaacatttcagtcagttatgcagttgggcgtttaaaaatagattttgtttgaagaatgatgtaaataactctaagataggctattcataaactaacagagatggaaaacatttcctacatcttagccactgtactatctggaattccacagtagtataccaaaaacttcagtgggccctgcaaatcaagggatggtggtgctagcatatttggtctctggtcaagaaagggatctggagagtcctatagcaagttttcatattgtaggaaaagcctgggtgaaattcatttttgcctgctctgatggcttaagaaagcaatgcctgtcataatccagagagacacaaccctgaacaccataatcccgaatgttgagattccaacagattaaaacstctaaggatcttttgatccttaacatttaaaatccgtaacatctaaaactctgaaaatcccaattctaaaagattaaaatcctgagtgctgaaatccaagaagccaaattctggggaaagggattagtgtatatctggctgtgtgaaggatagttacatcgtgtcagttgcatcatgttaggtaaaactattaccttattattgtctttatttggaattaagtatggtttaaagagatgtgtgtgggtgccaa

SEQ ID NO: 551008 - DNA, 1224 bp, Homo sapiens
tgtttttgtacaacccataagcaaaggatgatttttccatctttaaatgaccggaaaaattgaaaggaaaataatattttgttgcaagtaaaaattacataaaatttaaatttcagtgtctataagtagttactgcacacggccatgctcatttgtttatgtactgtctatggacactttccagaagcacagttgagtagcttccacagggactgtatggccacaaaacctaaatacttactatctggccctttacagaaaaastttgccaacccttcttatagaatatttacttttttactttcgctcactgaagacaaagcaaaggtaaccttctaccccttagaattatctttcctcagaagccctcctggcactttatcactattttggaaagaaagtagaaagcaagctgaggagaagtgaagagatgaagggtgcaggctatggcaccccacaaaactgagtgtgaatccttaaatgggggccatgtgaatatcaccataccaactatctgcaagaattaggagacaagaattgattttaaaggacgaaaaagggtcaagtttccagactgcaacagagcctgtgattgtcaggagggcagaaaaaaaggagaaggaaagtgaaaagataaaaattaggactaggaggatggacttcttaattattcaccaagaggtgaccttaagtaagaaatagagacttcgcatggattccagcaaagacatcaagaccacaattagggaagtatggatagatgtggttggatcaagtaaggcagcagtaaaaccctttccaaggttaaggaaatcttggattgcatctattcagtacagatgtaattgccttagttgacattataaagtccctgttgccagaagtaagcattttcatatgggcataccttgctttactgtgctttgcagatattgcgtattttacgaactgaatgtttgtggcaactcctccattcagcaagactgttggtgccattttctaataccatgccttcatttggtgcctctgtgtcacattttggtaattctcctaatatttcaaacttttttttattattatatcagttatgatgacctgtgatcagtaatttttgatgtattattgtatagtactcaaaagaaagggcttgagtatgtgttgctgctactataaggaaaaatgagaaaagaaagagccacatttacatggctgtggaatgcccag

SEQ ID NO: 551009 - DNA, 1224 bp, Homo sapiens
tgtttttgtacaacccataagcaaaggatgatttttccatctttaaatgaccggaaaaattgaaaggaaaataatattttgttgcaagtaaaaattacataaaatttaaatttcagtgtctataagtagttactgcacacggccatgctcatttgtttatgtactgtctatggacactttccagaagcacagttgagtagcttccacagggactgtatggccacaaaacctaaatacttactatctggccctttacagaaaaactttgccaacscttcttatagaatatttacttttttactttcgctcactgaagacaaagcaaaggtaaccttctaccccttagaattatctttcctcagaagccctcctggcactttatcactattttggaaagaaagtagaaagcaagctgaggagaagtgaagagatgaagggtgcaggctatggcaccccacaaaactgagtgtgaatccttaaatgggggccatgtgaatatcaccataccaactatctgcaagaattaggagacaagaattgattttaaaggacgaaaaagggtcaagtttccagactgcaacagagcctgtgattgtcaggagggcagaaaaaaaggagaaggaaagtgaaaagataaaaattaggactaggaggatggacttcttaattattcaccaagaggtgaccttaagtaagaaatagagacttcgcatggattccagcaaagacatcaagaccacaattagggaagtatggatagatgtggttggatcaagtaaggcagcagtaaaaccctttccaaggttaaggaaatcttggattgcatctattcagtacagatgtaattgccttagttgacattataaagtccctgttgccagaagtaagcattttcatatgggcataccttgctttactgtgctttgcagatattgcgtattttacgaactgaatgtttgtggcaactcctccattcagcaagactgttggtgccattttctaataccatgccttcatttggtgcctctgtgtcacattttggtaattctcctaatatttcaaacttttttttattattatatcagttatgatgacctgtgatcagtaatttttgatgtattattgtatagtactcaaaagaaagggcttgagtatgtgttgctgctactataaggaaaaatgagaaaagaaagagccacatttacatggctgtggaatgcccag

SEQ ID NO: 551010 - DNA, 1224 bp, Homo sapiens
tgtttttgtacaacccataagcaaaggatgatttttccatctttaaatgaccggaaaaattgaaaggaaaataatattttgttgcaagtaaaaattacataaaatttaaatttcagtgtctataagtagttactgcacacggccatgctcatttgtttatgtactgtctatggacactttccagaagcacagttgagtagcttccacagggactgtatggccacaaaacctaaatacttactatctggccctttacagaaaaactttgccaacccttcttatagaatatttacttttttactttcgctcactgaagacaaagcaaaggtaacyttctaccccttagaattatctttcctcagaagccctcctggcactttatcactattttggaaagaaagtagaaagcaagctgaggagaagtgaagagatgaagggtgcaggctatggcaccccacaaaactgagtgtgaatccttaaatgggggccatgtgaatatcaccataccaactatctgcaagaattaggagacaagaattgattttaaaggacgaaaaagggtcaagtttccagactgcaacagagcctgtgattgtcaggagggcagaaaaaaaggagaaggaaagtgaaaagataaaaattaggactaggaggatggacttcttaattattcaccaagaggtgaccttaagtaagaaatagagacttcgcatggattccagcaaagacatcaagaccacaattagggaagtatggatagatgtggttggatcaagtaaggcagcagtaaaaccctttccaaggttaaggaaatcttggattgcatctattcagtacagatgtaattgccttagttgacattataaagtccctgttgccagaagtaagcattttcatatgggcataccttgctttactgtgctttgcagatattgcgtattttacgaactgaatgtttgtggcaactcctccattcagcaagactgttggtgccattttctaataccatgccttcatttggtgcctctgtgtcacattttggtaattctcctaatatttcaaacttttttttattattatatcagttatgatgacctgtgatcagtaatttttgatgtattattgtatagtactcaaaagaaagggcttgagtatgtgttgctgctactataaggaaaaatgagaaaagaaagagccacatttacatggctgtggaatgcccag

SEQ ID NO: 551011 - DNA, 1224 bp, Homo sapiens
tgtttttgtacaacccataagcaaaggatgatttttccatctttaaatgaccggaaaaattgaaaggaaaataatattttgttgcaagtaaaaattacataaaatttaaatttcagtgtctataagtagttactgcacacggccatgctcatttgtttatgtactgtctatggacactttccagaagcacagttgagtagcttccacagggactgtatggccacaaaacctaaatacttactatctggccctttacagaaaaactttgccaacccttcttatagaatatttacttttttactttcgctcactgaagacaaagcaaaggtaaccttctaccccttagaattatctttcctcagaagccctcctggcactttatcactattttggaaagaaagtagaaagcaagctgaggagaagtgaagagatgaagggtgcaggctatggcaccccacaaaactgagtgtgaatccttaaatgggggccatgtgaatatcaccataccaactatctgcaagaattaggagacaagaattgattttaaaggacgaaaaagggtcaagtttccagactgcaacagagcctgtgattgtcaggagggcagaaaaaaaggagaaggaaagtgaaaagataaaaattaggactaggaggatggacttcttaattattcaccaagaggtgaccttaagtaagaaatagagacttcgcatggattccagcaaagacatcaagaccacaattagggaagtatggatagatgtggttggatcaagtaaggcagcagtaaaaccctttccaaggttaaggaaatcttggattgcatctattcagtacagatgtaattgccttagttgacattataaagtccctgttgccagaagtaagcattttcatatgggcataccttgctttaytgtgctttgcagatattgcgtattttacgaactgaatgtttgtggcaactcctccattcagcaagactgttggtgccattttctaataccatgccttcatttggtgcctctgtgtcacattttggtaattctcctaatatttcaaacttttttttattattatatcagttatgatgacctgtgatcagtaatttttgatgtattattgtatagtactcaaaagaaagggcttgagtatgtgttgctgctactataaggaaaaatgagaaaagaaagagccacatttacatggctgtggaatgcccag

SEQ ID NO: 551012 - DNA, 1404 bp, Homo sapiens
tcaatctcctgttgaaatttgatccctggtgttcgagatgggacctagtgggaggtatttggaccatgggggcggatccctcatgaatggcttagtgccattcctgcagaattgagttctcactcctggttccagcgggggatatcgctgctaaaaacagtctggcagctcccctctctcttgctcttttgctctctccctgtgatgcctgctctccttcaccttccatcatgagtagaagtcccctgaagccctcgccagaagcagaggctggtaccatgcttcttgtacagcctgtagaattgtgaaccagataaatctgttttctttacaaataacccagccttgtatgttcctttatagcaatgcaaaatggactaaaacagtaagtcccaatgtgcataaattttagtatgtatcatatgatatggatcaggatctccaaaaataagaatgtgtatggtctaggaaggtctcaaaatggctctttcaaggtgtctatacactgatatccaggctccaaggagatgatagtgtggagccttctctctaaaagtcctaagactgatagattcagcacagtatttggcccggagtggcctgagacaatacatttctttcttttaattttattttttttgagatggagtcttgctttgtcaccgaggctggagtgcaatggcaccatctcggctcactgcaacctcctactcctgggttcaagagattctcttgcctcagcctcctgagtagctgggattacaggcacgcaccattacacccagctaatttttctttttgttttggtatttttagtagaaacgggttttcacagtgttggccaggctggtctcaaactcctgacctcgggtgatccgcctgcctctgcctcccaaagtgctgggattacaggcataagccaccgcccctgccccaaagtgttgggattacaggcgtgagccacggtgcctggctggtaaacattatttcgtgaaacttttttgtttggaatcgcagtgtaaaatatatttctgggagtcatggtcaaaagagttggagaaaagtgcgtctctaagttttctcccaattagtgccccctcttgagttcctggccatctgttaaatgtgtgccatgacagacgatggacagtagagggcagacaatccccrcacagcagcaaaggctggacttcggaggagttggaaaccacaggcgaatgccaagcaggacagaagcctgaagccaggcctgaagcttctgaaagagacagggcacacgtacctggtcctcctaggcatcgcagcactctctgtgtgatataactgcagccactttccagtctccatccacaggctggatccttgtctttggatatttttcacctccctgggagtacttccagg

SEQ ID NO: 551013 - DNA, 2704 bp, Homo sapiens
gcatgcaagaattaatgaaagactaaatttttctggagttatcccaatacctattctgtttgtatcacatccagctttgagattgccttccaaaaactagccaaggattagtgctaccttggtcctgcatcaaagaatggaccttgtctctttggatactcttgaaaaaataccgaatttggagtccagaatccaggggcctggtctcacaactcataaatgaaagttacctccaaatcaattatccagcagtgcatttgttctctagctctctgtttggtactataatcttcaaaaaaaattttctttcaagaaagtgagaataagaaaaacaataaaccacatctgggctcagaatacctcatgggtatattcaaaactgccttacagttttgaaacaatagtagtcccttcttacagccacactgtatatatgaagctttcagatctataataacatactgttaggtacttactatgtttcaagaacttatcatacataatcctcaaccttcaaaacaagaatgcagaggagatgtttttattatttcaattttatcaggtagaaaactgaacttcatagagatgaagaaacttgagcaaattcacacagccagagaagaaaggagagtggtttgaataccacattgcctcattttattcttgtgcattttattccttttcagtattttaaattagcacaaaatacctcaaaaaggaaagatgactgttaaaagggttacatttttaacatactgaaggcaattagtaaagatgttaaacaaaattttaccagtaagtgtggtttgctttcaaatgtcaaagataaaaataatgctaaaatatttttggcatctttattggacatcatcgttgggaacaagctaacgcaatggttttagtcatgctccctcaggaacacagctaagaattaaggactagattaaatttagtgtggagctactgtatgcagctgtctcttataaagcagatgttatatcctgtcattgtcatcatttttgcagaaaagtacatttttattggctctaaagtgtgaaaaagtgaaatatttcctatacaggaaccctggaagctgtctgtccaaggagaagagcctattcccaagctgactatatagcaacactaaaagtatttatttattcaaactgaatcttaaagacctatgatcagtctttaggtggccatatacactccaacaggattataacctgccagacaagaataaacttcaccagcaggagaagaagtagggagagattccaggcaagtgagttttccttgtattcctctaacttggagtcaaatatgcatggatgctcagaaatccactgaccaagatggccttaacattccccttagcttgactaaactttaaacagatttattcctgactataaacccctgacctccatttactgagagcatctaatttaggaaacttgcaattgtagattctttctatttcccttttgagatgtacatctcccagcctcttgccagttttacacccgaggaatgtctttctctaggacctgggagccacccctttgaaaaaggtgccccttttccaaaaataagatagtgcccctctctctcagtttcggtgggagggtaggagtcaaacttggataagcgcaattagaaaacgcagatggcctaatcacatggaccaacctccccctcaacatcctgtagtacttctccactagctcaccccagtgcttaaaaactctcctgcattttttcccagtagaagttgaatttgatctctcactcctattacaatagtcttgactttcactgtaatcgttttgaataaagtcttccttgcccgtttaactctggtacaatttctctttgacaccacagaacaaattctttcagaaatatattgctggacggtcaattttctaaaagctatacattccactcagtaatcaaattgccaaaatatttgcaatatcaatgctagccattctcactggagttctctctggagatttttgtatgtctccaaccaggaacccataacattaattaataaatatttttcattccattgcactgtgagcttctgggaggcagagatcgttttaatactacttttctgtttccagtatctaagccagtgccttgaagaatatcactgcatcacactaggggaagcaatcaggcaacctcccacgacattatatatagggtgaccataaatttatcatctgtaccaggacagttttgagaatgaaaggaggcattaaaataattttatgtaatttttgraacattgtgttgccagataaattagttttatgaaattatagataagaaaaactcaccaaaatatttatttttaagatgtctcatcaaatttatttatttaactgttattaggttcagggatacaaggcaggtttgttatatgggtaaactcatgtcatgggggtttgttgtatagattatttagtcacttgagtactaggtctagtagccagtagtttcatttttcttgatcttctctctcctctcaccctccaccctcaagtaggctccagtgtcttttgttcccctctttgtgcccatgtgttctcatcatttagctcccacttataagtgagaatgtgcagcatttggttttctgttccagtcttagtttgctgaggatatggcctccagctccctccat

SEQ ID NO: 551014 - DNA, 3177 bp, Homo sapiens
ttttttgtaaagacagggtctcactatgttgcccaggctggtctcaaacttctgggctcaagcgatcctccagccttagcgtctcaaagtgctgggattacaggcgtgagccactggcccctcccctgctgtcttaccactggcgcccccaccccccgctgtcttactacccagcgamgtaaccttgggttgctccttactccctctgcacacaactttattcgcccataaaatgtagataacaatacctgctttgccagccccatcagagcgttttaaacatcaggtggtgctcagaagcatttcaataaatgtcagctatgagcatcattctttcctagaagagcaaagacaccaggccaaatcccaaatttgctgagtgggccacagcagagccagcttcggacaggagccgagccagctggcccttcacgctgttcctttagccctccgggtctgggggctcagtcagggggcccggagccatccatccttctgccagggactcctcctccctggctgccagccagaggcagctcaggcgaggagctgcagggtgcctgggggtgagccctgcgctcttggtgaagttctggctggtctgggaacggagcaggctgagctgtcaacactcccaggggccaggagctcgttctgctgatcccaaagttaacccctgcagtccctgactccagcctcagtcagccctgattcaccagcaacatctgaggccacatgtggcctcccctttccccaccacgtcccatcccttctgtccagtcactgaagtgaggtgaccccgcacttcaccccaacgcaaacgcgcactcaggaagtttaaacagacccattctaagggccacgtctttctgagaatgggagggaagccctttccgaaggcagaggaccggtaagggcccttcaaagctctctgaaacagcaacacggtcggagggaggtcattagcagtgctgtgtggcttcctcatcctcatggtaagtgagcactgggagtaagacaatcagcccttcagaaaccactcgggcctggagaacgcagccagggctgagccacagagatggggcaggagcagttctggcctccaatatacagcggcgctttgctcctctcgcacaagtgaaatcacagctgatgtctccatggctttgaagagcctcacacacaggcccgctggaccacgtgggccctgctcctccatcaccagcagctctgtccccattagcagagcaggtgagaggaaatgccacacccagagtgccagacaacagggcgcacagcccccaacctgctcagccggggaggtgtcctcagccatctctcctacaactgccaggaagaccacagaagccggcggttcccaagtctacgcagagttagttaaggaggaaggccaggcctctggcagagctagggcagcaagaatacacaaatgtcctgcccatgtgccccagctcatagacctctctggaaaaacttctgcctagacaccaaaaggccagatttttcaaccttctttcccagagggtgtcaccgaatccatgacagatgggccccaccgccaggtcctggcattcatggccccaggtctcatcttatttatccttatggttatttttgcattcaaggctctagaatcagaaagaaacttagaaagtaactagcccaactctttagcccaactctttcttttcacagaggaggaaaccaatgcccagagaggaaaaaggagcttgccagaagtcgccagtgcactgggacaaagctagaactagagacaaggtctcctgaccccgcagccgtagtcttcccatagggggcccagacaaatacaacttccccttctcccagacgtttctaagctttggatgctcacatcctgccctgtccctgggagctggggcccctggattgctcatctgtccccctattgttcctacaaaggacagccccttggtgagtctcagagggctgtgtcggggcagccacagtagtgtcaggctggcgccctgagcacagctttttttttgagacagtctcgctctatcacccaggctggagtgcagtagcgcgatatcggctcactgcaacgtccacctcccagtttcaagccactgattctcctgcctcagcctgttgagtagctgggactacaggtgcatgccaccatgcctaggtaatattttttatatttttagtagagatggggtttcaccatgttgcccaggctggtctcaaactcctgcactcaagtgatcctcccgccttggcctcccaaagtgctgaggttacaggtgtgagccaccacgcctggcctgtatggagattttaggaaggacccagggtgagggttagctccctgcattcagcattaagtctgtggtattcctggcgtcagcagaggcatgcaggaatggttgtcatcaccaccaagagacaaaggacagttggttccatgagggctgtgtgagatcagctcttagctatctgagttcaaggtggcagaggccaaaagaagatgggaccagaagagcattccagcgtctgggtcattagagaagggaagaccctcccagcccaccttgccgctccgtgaacagtacaaactctggatgcctccagagcaaatctgaccattaccctgaattttcactccagagtacaggtgtccagaacacccagccaccctaaggggaaccatcctagaaatctcacgtctaggccaggtgtggaggctcatgcctataatcccagtactctgggaggccagatcacttgaggccaggagtttgagaccagcctggccaacatagcgaaaatctgtctctactaaaacacacacacacacacacacacacacacacacaaataaccgggtgtggtggcacacagctactcaggaggctgaggcacgagaattgcttgaacccgggaggtggaggctgcagtgagccgagatcacgccattgcactccagcctcagtgacaggagacactgtcctagaaaaaaaaaacacacacacatctcatgtcttccctgggagcagccttgctagagcctctgatttacatccccagaccccttaaccccagacacatggggatgcactttcctgggtgagctgcaggctccatcccgcccctcaggccgggcctcca

SEQ ID NO: 551015 - DNA, 664 bp, Homo sapiens
atttctttacttaatagtgttaatattccactttctaggaaggcttacccatcaattaaaattatttgagacattaaaaaaagaaacttagggtagctgctattgaagactaaggactagggccagagagamgcctgcctccaagtagtccacagaatctgcttgttaaaatgttcgtgatttggaggcccaggtagaaggggcaggttcctctgaagcgccttggcatgccctatctttggcgttccggggtcgccctcctctgctagtctgtgagcagtcagaaggttgtatctcctgttcattcctctccttgtctcttgctgctcagaacagcagctttaagaacagggtggctgagccctaagtgtacctttggagcatcctgtgtgtcttcagcattgattgactgtttttactgtggatttaatttcagttactttactctggtcttactacttcggcttgactgtgacatcgttgagggcaggggctgtgtcacctctaaccaaagggcctccccagatgcctagcctggtccaagcgttccatcaagagtcagtaccagcgtttattgctgtccagtctgtgcaagctccatgctggctgctgggtaagagccaagggcagccaggcctaatggctcatgcctgtaattccagca

SEQ ID NO: 551016 - DNA, 769 bp, Homo sapiens
tgcccagctccattttgtacttttaatagagacagggtttcaccatgttggccaggctggtctcaaactcctggcctcaagtgatccgcctgccttggcttcccaaagtgctgggattacaagtgtgagccactgcacccagcctgaatttctccattcttcccacacaccctccccaggttctccttcctgacctctgacccttcttttttttcttctttttttttttttyttttttttttttttttgagatagcatctcacgctgtcacccagactggagtgcagtagcacgatctcggctcactgcaacctcttcctcccaggctcaagtgattctcctgtcttagcctcccaagtagctgggattataggcacacaccactaccgcctggctaatttttgtacttttagtagagatggggtttcaccatgttggccaggctggtcttgaactcctgacctcaggtgatctgcccgcctcagcctcccaaagtgttggggttacaggggtgagccaccacgcctggcccccttccttcatcttagtcaatcctatgccacctcttcttcctccagtcccctcacctgatggtcccgacacttcatcatccaccacctcctggagggggtaccctgaggtgctccgctgggggctctgctcttcctggggctgcggttgatggctcatcatgatctttcccaaaatctgtcccatctcaccaaacctagtctctgttctgtccttggtcttcttctggacactgctg

SEQ ID NO: 551017 - DNA, 769 bp, Homo sapiens
tgcccagctccattttgtacttttaatagagacagggtttcaccatgttggccaggctggtctcaaactcctggcctcaagtgatccgcctgccttggcttcccaaagtgctgggattacaagtgtgagccactgcacccagcctgaatttctccattcttcccacacaccctccccaggttctccttcctgacctctgacccttcttttttttcttcttttttttttttttttytttttttttttttgagatagcatctcacgctgtcacccagactggagtgcagtagcacgatctcggctcactgcaacctcttcctcccaggctcaagtgattctcctgtcttagcctcccaagtagctgggattataggcacacaccactaccgcctggctaatttttgtacttttagtagagatggggtttcaccatgttggccaggctggtcttgaactcctgacctcaggtgatctgcccgcctcagcctcccaaagtgttggggttacaggggtgagccaccacgcctggcccccttccttcatcttagtcaatcctatgccacctcttcttcctccagtcccctcacctgatggtcccgacacttcatcatccaccacctcctggagggggtaccctgaggtgctccgctgggggctctgctcttcctggggctgcggttgatggctcatcatgatctttcccaaaatctgtcccatctcaccaaacctagtctctgttctgtccttggtcttcttctggacactgctg

SEQ ID NO: 551018 - DNA, 602 bp, Homo sapiens
tctccaagatccagcacagcatctcttccctgaagcactcaccagcccaccccacacagagccaggctctctcttctgtgttcccagtggacttagtacagcctctgtgaatagcactccacagacaccctctgttgtcatgattgctgtctttgtcacttaagtgatctcctggggggtaggagacaaagcttgttttctctatccctaggcttgatcttagagcatgatgaagtgttgaccccaggaaatgtgcattagataaatgatttggaaattcatgagattgttttctcttccttttccataacatattgaccaggagattttcaaagggcacaaagatcatctcctataacaggccataaaatgcactgtttccctgtggaggtcactggcgggtcatgatgcctccctgggaactttattatttcagttgagatcagacgtcactgatgagcgagtggaatgtgaatgcgtgtgttscttctggttcgctgccactgcctcactccctgctcacttgcagtttaattatatatttttctccctcaacttcaatgaaacaaaaagacaaacacaagcacttaagggaggcaatt

SEQ ID NO: 551019 - DNA, 548 bp, Homo sapiens
gacccagagatcaaatcaaacctacacctactattaaaagatacttcaatcccaaagagcatgggccctcataaaaaatgataaacaaacccctccagcctctctctccagcccttcttctcaaygcccttttataatattcatgtcctcagatttatgtcgaccatatattgcctagatgtgtctccccattccattaaaagggacttaagggatgggagatgggtcacagaaggcagcaaacaataactgacagttgagtttattttttaaaaccaaaaaaacttccatgttttcatttaactttaaatgctaacaaccatattccaggctcgacatgcccgtaaagctgtttcacagtccagggaaaaaatttttttattgtaaataatgttcaccatccacatcttaacagtctggatgctgaagcatttttcatttagagtaatgatctccaggagtaaaaataatataattataactgaactacttggtcagctaaatcacaaccagaaatgcactggtatgtatttcattcaccgtgtcaa

SEQ ID NO: 551020 - DNA, 548 bp, Homo sapiens
gacccagagatcaaatcaaacctacacctactattaaaagatacttcaatcccaaagagcatgggccctcataaaaaatgataaacaaacccctccagcctctctctccagcccttcttctcaacgcccttttataatattcatgtcctcagatttatgtcgaccatatattgcctagatgtgtctccccattccattaaaagggacttaagggatgggagatgggtcacagaargcagcaaacaataactgacagttgagtttattttttaaaaccaaaaaaacttccatgttttcatttaactttaaatgctaacaaccatattccaggctcgacatgcccgtaaagctgtttcacagtccagggaaaaaatttttttattgtaaataatgttcaccatccacatcttaacagtctggatgctgaagcatttttcatttagagtaatgatctccaggagtaaaaataatataattataactgaactacttggtcagctaaatcacaaccagaaatgcactggtatgtatttcattcaccgtgtcaa

SEQ ID NO: 551021 - DNA, 1207 bp, Homo sapiens
cattttcccaatgactgactaagcttcaaaatacagcttagaaaacgattaacatgtagttttccttttttcctagccgattcagttctacttagataaatctggctaccaatcaagacatatataaattaattttttttctactcaattactaccatttttttctttttcaccttttccctaattttctctagtaacacttttcctttggtttgatcagttgaactcaaaaggtttagtacctaaaatgagtatcaactgttattggaatagcacttgggaaatgccattctagaaaacgcaaatgtttaaccgaggtatttgacataaagttaagcatccattctcaacatgacaatgtctcccgtgttaatcacgaggttaatggctgctcttggctagattacatgaccctgcataatactgtaatgctccctggtgaggtactgcagagctatgtgcacaaacacctactcatttaagcgttcaataaataggaagcatcatttgaaaccactgcagtagaataaattaaaaataatgcatttctattggcctgctttgcttcttgagctggcttggagtgctgtttgtgacatagaagacacaattagttaattagtggcaacttcaagctctttagacttcaacacttctcgttcttcatgcctcagcatttttttttgcagtaataatggtattcttcattagcatcaccactgttttggggccaacacctccaggaactggagtgatataaccagctttttgtctgactccttcaaaatccacatctccaactaacttgggtttgcagttacgggatcttgaactctatttattcccacattaatgatggctgctccttccttgatcatatgtgctgtgatgagatttggaatgtctgcagcagatattacaatatctgcaagaatggtatgyttcttcagctgctctttgggagtgtatccatgagatattgtaacagtagcatcacctctgggaccttcatgcgccccatctgtgtgcagtaacattgcaactggcatttcaacattttttgaccttccagccacaaccacactcttccctagggtgggaatgccagtttgcttaattatttcccacacaccccatggggcagctggtaacgtggaatactggtccaaacacatttgccctacattaattacataaaagtcatcga

SEQ ID NO: 551022 - DNA, 1207 bp, Homo sapiens
cattttcccaatgactgactaagcttcaaaatacagcttagaaaacgattaacatgtagttttccttttttcctagccgattcagttctacttagataaatctggctaccaatcaagacatatataaattaattttttttctactcaattactaccatttttttctttttcaccttttccctaattttctctagtaacacttttcctttggtttgatcagttgaactcaaaaggtttagtacctaaaatgagtatcaactgttattggaatagcacttgggaaatgccattctagaaaacgcaaatgtttaaccgaggtatttgacataaagttaagcatccattctcaacatgacaatgtctcccgtgttaatcacgaggttaatggctgctcttggctagattacatgaccctgcataatactgtaatgctccctggtgaggtactgcagagctatgtgcacaaacacctactcatttaagcgttcaataaataggaagcatcatttgaaaccactgcagtagaataaattaaaaataatgcatttctattggcctgctttgcttcttgagctggcttggagtgctgtttgtgacatagaagacacaattagttaattagtggcaacttcaagctctttagacttcaacacttctcgttcttcatgcctcagcatttttttttgcagtaataatggtattcttcattagcatcaccactgttttggggccaacacctccaggaactggagtgatataaccagctttttgtctgactccttcaaaatccacatctccaactaacttgggtttgcagttacgggatcttgaactctatttattcccacattaatgatggctgctccttccttgatcatatgtgctgtgatgagatttggaatgtctgcagcagatattacaatatctgcaagaatggtatgcttcttcagctgctctttgggagtgtatccatgagatattgtaacagtagcatcacctctgggaccttcatgcgccccatctgtgtgcagtaacattgcaactggcatttcaacattttttgaccttccagccacaaccacactcttccctagggtgrgaatgccagtttgcttaattatttcccacacaccccatggggcagctggtaacgtggaatactggtccaaacacatttgccctacattaattacataaaagtcatcga

SEQ ID NO: 551023 - DNA, 641 bp, Homo sapiens
gaataaccagtcaccagtgcattggagctacaacaggaaacaattgtgaatccttgttttagaaagttatgcatctgtcaacattaatctctgctgagatttggattttaaataaagcttttatgaagtctgaagttaaatataaaaaaggaggttctaaattcattcttatttaaagattcactaaaggcaaaggcatgtgtttttccagatggtaaaattccaaacaccactctgtgctcttcctcactatgttctcgaatttttttttcaaaatgttttgaaaaagtcacagtgactcttcaaacagcagaaattcagccccacgagttgtttctggtgcttccctgatgaaattccagttggttctagtggttttagaatgagtttttaaagcatttgttaaaattcactctgaaatsaaatgtattcctcctcctggagttttgtcttccctgcctggaacactggaataaataagtgttgcctcctcttgtgaagtgcatgatattatgaccttcagtcatcacctgggtattcatggagttagaatatctgcaaataattagctaaagaaaatggagtatagatataccatggaatacaactcagccacagaaaatgaaatcacgtctcttgca

SEQ ID NO: 551024 - DNA, 641 bp, Homo sapiens
gaataaccagtcaccagtgcattggagctacaacaggaaacaattgtgaatccttgttttagaaagttatgcatctgtcaacattaatctctgctgagatttggattttaaataaagcttttatgaagtctgaagttaaatataaaaaaggaggttctaaattcattcttatttaaagattcactaaaggcaaaggcatgtgtttttccagatggtaaaattccaaacaccactctgtgctcttcctcactatgttctcgaatttttttttcaaaatgttttgaaaaagtcacagtgactcttcaaacagcagaaattcagccccacgagttgtttctggtgcttccctgatgaaattccagttggttctagtggttttagaatgagtttttaaagcatttgttaaaattcactctgaaatgaaatgtattcctcctcctggagttttgtcttccctgcctggaacactggaataaataagtgttgcctcctcttgtgaagtgcatgatattatgaccttcagtcatcacctgggtattcatggagttagaatatctgcaaataattagctaaagaaaatggagtatagatataccatggaatacaactcagccacaraaaatgaaatcacgtctcttgca

SEQ ID NO: 551025 - DNA, 544 bp, Homo sapiens
atgggcatcacacagtagttttgaaaatatcatccacccacctatccatccatctatccatctaaaattgcatccatacatagcatgagagagcatgcacgcacgggagagggtgatttcgatgcaaacacagacatacactcattactcttaggagcacgaagatgtacagaaaagccactgaatagcttacattgttatggacacaaagctgaaaacaatataacatcataggatgatcttattcatgcaaaaaatcatttaygtgacagagaaagaaaaatccactatcagagttcaagatttaacacacttttctcagtgacttgaaaatagagattaaaaaatatatctatatagatttgaataacactcacaagactaccccagtaaatagatacaaattcttaaatgcacacataacatttaccagtagagaccatatgctgggcactaaaaccaattttaataaatctcaaaggtctgaactcataccaaatatattctctgaccacgatgggcttgggtaggaaaccagtgacaa

SEQ ID NO: 551026 - DNA, 661 bp, Homo sapiens
tcaaagaaaaagctaaagttctacaataagctatagggtcttacatgatctgattctgctgacattcaatcccaatacccactgtgttgcccaatttttcttttcttttctgtaatactcacttatcaccctwtaaccaattaaacaatgtatttctttatcatgtcagttgtttatgcctgtttccatgattggaatgcatgagcttcatgaggcagggttctctggtttctttctagatcacactaagggcctagaacagagtttggcacacagtacaaagccaatctttgttgaatcaatacatttattacatcttaagcatcctcagaaatcagacacatataccaggtgaattagatgattggtctcaatttgtgaatgatttttcacttccttctaaggtgcctcagtaaggatgcacataagaatgagctgggaatcttttttgatgccacatactccgttttgagagattctaatttcatggtttcagcttaggccccagcaggtttctaaggaaataaaaacaagcaataaacaaaaaccttccatattggtgggagatataaacccattactatggtttttctgaagagaggttattccccctaaatattttttttttttattttttgagacggagttttgctgtttcgcc

SEQ ID NO: 551027 - DNA, 661 bp, Homo sapiens
tcaaagaaaaagctaaagttctacaataagctatagggtcttacatgatctgattctgctgacattcaatcccaatacccactgtgttgcccaatttttcttttcttttctgtaatactcacttatcaccctataaccaattaaacaatgtatttctttatcatgtcagttgtttatgcctgtttccatgattggaatgcatgagcttcatgaggcagggttctctggtttctttctagatcacactaagggcctagaacagagtttggcacacagtacaaagccaatctttgttgaatcaatacatttattacatcttaagcatcctcagaaatcagacacatataccaggtgaattagatgattggtctcaatttgtgaatgatttttcacttccttctaaggtgcctcagtaaggatgcacataagaatgagctgggaatcttttttgatgccacatactccgttttgagagattctaatttcatggtttcagcttaggccccagcaggtttctaaggaaataaaaacaagcaataaacaaaaaccttccatattggtgggagatataaacccattactatggtttttmtgaagagaggttattccccctaaatattttttttttttattttttgagacggagttttgctgtttcgcc

SEQ ID NO: 551028 - DNA, 1181 bp, Homo sapiens
ggctccccatctcccagcaaccgggacttctccctcctccaggccyccgggactctgcctagcccatgccctgggatgtttatggatgtgtccactgcccagcttctcaagaacagaggctgggtgtgagcccacaccgattcctagtgcttagcataagcctggtccaaggaggcacccactggtggtttgcaaagtgaagtctctggtaattgaaagggcagtgtgaccacatccttggagtggaaagatgacaggcttcgagagcagacagccgtgggcagttgtggcccttggacaagtatcttagcttatctgagcctcagtttcctcatctgcagaatgggaatattagcacctattcccctacaaaatagcacagcaacacaaggctaaagagaggtgtttgttgtttttgtttttgttttgagatgaagcctcactctgttgcccaggctggagtgcagtggtgcaatctcagctcactgcaacctctgcctcccaggttcaagtgattctcctgcctcagcctcacgagtagctaggactacaggtgtctgccaccgtgccttgctaatttttgtatttttagtagagatggggtttcactgtgttggccaggctggtcttgaactcctgacctcaagtgatccgcccacctcagcttcccaaagtgctgggattacagcgtgagccaccatgcccggccctaaggctggagagagattttagagagaccaaccgcgtgaagccccgtctaccagatccagcacaggcgctcaaaaaaatcagtccctgctccagctctgggcttctctgtcactggccttctgtgcccagtcccccggaaactgatctgagctggggtgtgagccttcacagcagcgtgtagggaaagtgctgggccagggtcctccgccctgacttttgggctcatcctgccacttcctgcctatgtgtgcaaacgagagctgccttttctctctgaatcccagctttctcaactgtaaaatgggtactccagcctgcctggcccacctcacagtggaggtccaggtgctgtgtagactgttgagggccatgtgtcaggtggcccaggccacccagggactgggcaacctcactggcaggtgggcatagggacggctcttgtccaggagggcctgcctggatggtgagcc

SEQ ID NO: 551029 - DNA, 441 bp, Homo sapiens
gggataaactggagagtcagggggtcttaaaagccagacagaaatagggcttactcgtacattaggaaagaagaaggcaacattgatttactcttaataggacagtgagaaagccacgttttgggtaaaatagtctgacagaggtagtcacgatggctttgacaggtagaaagtgggagacagttgtccagctaaggagcttgtccagctaaggagctgttgagggagaagatgagaaatctgatctgatcactctcctgttgacgacctatgtgtatcaaggcctaagctcctaggcctggcatgcaaagcttcaygatcatgttctgggtctgaccttccttcgaagtctcagctccttccactgactccacctgtcatgcccaccatgctgcactccgaggacatgaccagctatccccagatctgcaccttctacaa

SEQ ID NO: 551030 - DNA, 559 bp, Homo sapiens
gctttggaggctgacaaacggggaccagatcccagctctgaccctcaaaagctgtgtgacctcaggcaagtcactttatctctctgagcttcaatatgttccactataaaatgtggataacagctacatgataggtttgttgtgagatggagaaaatgggtgtcaggatcctggcacatgcaggcactgagtggcatcctattactgaagcctggatctgcttcccctgccaggttgtgagtgcgtttgggtcagggtgcaggtcccattcagtgccacattcccagagcacccagcacaggaccttatgccataggtgctcacaaatgcattcaccccagctgctggggacgggggtagagagatgatgggtccccctcccccacagctgaggaggccacagtcggggtggcaagtacagagtgaagcctccagatcagggacgggagatgaatgtggagggaggggctggagcctgagggagagctgctgatatgcactggggggttttactggttttcattaaaattccttsccgaagctggagcagctactacca

SEQ ID NO: 551031 - DNA, 630 bp, Homo sapiens
ctgaatatattgcaccgcctggaggcattgcagcactccctaaccccccatatttggcagtatttttgcccagatttacagatgatcaaactgaggctcagggtgattaagtgacatgcacacagcctttatgtagcagagccagagttcaaaccggtatctgttggatatcaagaaccatgctgtctctcatgcaaaggaatagaaagaaaggaaaaaaaaccrcaacccatgctgtctgtgggctagaacactacttttctggtgaggacttatgctacatgctgtttaaaaggaataataagccttacaggatctagtatattgttcccagtttttagatagaaaaaccaaggcccagagagggcagggacttgctaggattaggcagtccctgggcgctggccctgtcagcaggtcctagggctcctgccttctatccaggacactctaaaacagggaaggacaggtcagtggctcacgcctgtaacctcaatgccttgggaggctgaggtgggaggatcacttgacgctaggagtttgagaccagcctgggcaacaggcaagaccccatcactacaaaaaaaattttttttaatttttttaataaaaataaagaggcaggaccct

SEQ ID NO: 551032 - DNA, 630 bp, Homo sapiens
ctgaatatattgcaccgcctggaggcattgcagcactccctaaccccccatatttggcagtatttttgcccagatttacagatgatcaaactgaggctcagggtgattaagtgacatgcacacagcctttatgtagcagagccagagttcaaaccggtatctgttggatatcaagaaccatgctgtctctcatgcaaaggaatagaaagaaaggaaaaaaaaccacaacccatgctgtctgtgggctagaacactacttttctggtgaggacttatgctacatgctgtttaaaaggaataataagccttacaggatctagtatattgttcccagtttttagatagaaaaaccaaggcccagagagggcagggacttgctaggattaggcagtccctgggcgctggccctgtcagcaggtcctagggctcctgccttctatccaggacactctaaaacagggaaggacaggtcagtggctcacgcctgtaaccycaatgccttgggaggctgaggtgggaggatcacttgacgctaggagtttgagaccagcctgggcaacaggcaagaccccatcactacaaaaaaaattttttttaatttttttaataaaaataaagaggcaggaccct

SEQ ID NO: 551033 - DNA, 604 bp, Homo sapiens
tggtatgatcttggttcatcacaacctccacctcccaggttcaaacgattctcctgcctcagcttgccaagtagcygggattacaggcatgtgccaccatgcctggctaattttgtaattttttagtagagacagggtttctccaagttggtcaggctggtctcaaactcctgacctcaggagatctgcctgccttggcctctcaaagtgctgggattataggcgtgagccaccgcgcccggcctggtttctaaaactgggggcctgagacctccatgttgagctgttttcttggaatgatgaagtgcccttacaccacacacaatgtctgttccagaaaggctttggacagcaatgagtagtgaatgaagtaagccatatgaaggcaggattagctatggggctgggagggcaactaagtttaaggccattcgcttggccattcttccttcttccttgcttacacagcccaccgttgctcagatcacataaagtggccacagtcatctcagtcctcaatggcagatttgttattgcccagtagcctccttggtagctagccgtggccatacgttccagttctggataaatgaaacccaaagag

SEQ ID NO: 551034 - DNA, 645 bp, Homo sapiens
agtggcatgatctcggctcattgcaacctctgcttcccaggttcaagtgattctccttcctcagcctcctgagtatttgggattacaggcgcccaccaccacgcccagctaggttttgtaytttttagtaagacgaggtttcaccatgttggccaggctggtctcaaactcttgacctcaagtgatccacccacttcagcctcccaaagtgctgggattataggtgtgagacaccatgcccagctggccccatattctttatttgcagttgaaggtattctgtctaatagccttattgtcctcccctacctatacacatgagggacccgtcctagagattttgtgtggtaatgacggctccaggaaacttcaggcttgaatttcccagtggtctgggccctgtgagatatatgcatctttcttaggagacaggagttcttggagaaaagctatcatgctccttatccatagggaatgaagaacaagctagcagggcttgcttcgtaattgcaaggccaggtacaaaataaaaacctgttaccccttgtttaaaattgacaggaccccgtgtgattgcacaggtcaccggttcatgaagccaaaccttcaagagagagatggttgtgggttcctgcctgccagcca

SEQ ID NO: 551035 - DNA, 1415 bp, Homo sapiens
gcggggttacaggtgtgagccaccacacccagccaggtggtacttttctttttgagatagagtcttgctgtgtcgcccaggctggagtgcagtggtgtgatcccaactcactgcaacctctacatcccaggatcaagtgattctcatgcctcagcctcccaagtagctgggattacagatgtgtgctgccacacctggctaatttttgtatttttagtagagatgggttttcactatgttggcaagtctggtctcaaaatcctgacctcrggtgatctgtctgcctcagcctcacaaagtgctgggattacaggtatgagccaccgcacccagccaggtggtactaattcttcactactgatggggaaacagatacccagcagaaaggtgaccgccccacaattttatatttagtcccttggtctccttctaatgaggaatgaggcctgaggttccagtattactttcaataaatatttatgtttattacctacttagctctttgaaaaatggttacatcaaaggtgtattaatctatgagctcctggcggacgaggacagattgttggagtgtcctcctagcatgttaaaaattagtgacgatgataacgacgctgatgacaatgatgattaggctcagcactagggcctggatccagtcccttaacttctctggatgaagtgtcttcctttgttaaatcaggataatgagactctcctgctgttgtttgtgaggccaattaactactgtcttgcaaggactcagacctacaaacactttgtaatctattcaaatgtaaaaggcttgatgaggactttggtttgtgaacttaagcacacaaaagctaggaaacgcaaaagttcaggcctgccttgtgaagccggctgccttgtgaagcctgctgccagctccatcctcctctgtcccaaagtagtttttctagtgattacaattctgcagaactagaaactaatggtgctgcattacaaacaagcaaaaactgatatgaaatgagtataaattggccttcatcgagaaattcttttccatttataaataatgtcatgaggtgtgtgtgtgtgcacatgtgttgtgttatttgggagtttttttttgttgttgttgtttgtttgtttgttttgagatagagtctcgctctgtcacccatgctggaatgcagtggagcgatctcggctcactgcaacctccgcctcccgggtgcaagtgattctcttctctcagcctcctgagtagctgggattataggcacccacgaccacgcctggctaatttttgtacttttagtagagacagggtttcaccatgttggtcaggacggtcttgatgtcctgacctcgtgatccacccacctcagcctcccaaagtgctgggattacagttgtgagccactgtg

SEQ ID NO: 551036 - DNA, 545 bp, Homo sapiens
gacacctcttgtcagtgaccgagctgagctccactacctggccttctgactccaaatctcatagtctttctgttacatcatgctgcctccctgcatccatttgacactaatttagtyaggctacattaagtccccactgtgtgcacgatgctgaggacaatgccaggatggaaggggcatggtccctgtgccccaggagcttacagagtaatagaagagtaagactaatatgtccatgaccataacacacaaggtagcatgtgattgtcatggataatgtgctctagaaatgtacccttctgatgagcgatgaggaggagaaaatgtgaagacttcatagaggagaaaaaaatttgagtttggcattgggagaatgaggagtctgctgggcagagatggagagaaagatactgcagttgatgtcagcaaatgcacagaggtgggaaggcaagcagcacaacaggaagtccaaccagaaaagcaggttggaatgagatattagagggttggattaagggatttggacttgacttggtatccaaggg

SEQ ID NO: 551037 - DNA, 842 bp, Homo sapiens
ttagtccttagcagaggcttaatcataaatgtcaaccacatttgaataggaaaataggtggtaaaacaaacactgagacgtgattttacaatctgtaataattgtccaaagatacttactgcaatgctattttatttttaattcgtttatgtttttatcaaagtaatatacatagtagttaaaggcaaatagtaccacaggcatataaagtgggggaaaccgatactgcttgactccatcttcttcagtcccaagaacagccacagccactttcaatacatagcactgtttccctcactatttccttattcctaaataacacgctcatattgctactttttaatttgtcaatcttacgtagtaaatgttgaagtcctgttgtggaagatgagaaatyagcatgcttccattaagtgtctctcccatttccttaccccattctatgtacctatttatgttcacatgtgtgtatattagttatatcacatagctatatatattaggatttacgttactacggctatatttgctcagttgcttactttacttttcccgaacttagtaacagtttcatttattttcatttgctttatttctatatacctacgcttaatttttcctacatacaacataagaagcaaaaaaatcttgttattctttccacacagtcaaaaacaacagattcctatcaattccatttctcttccctgaagaactctctcctagggctcttctcatgccccaatctagctgctgatctctaggtctcctgaagaggtattctggggaacatcccaccaatcaccatcctgacagttcctttctttctctcctggatggat

SEQ ID NO: 551038 - DNA, 549 bp, Homo sapiens
ttgaactggagagttcctatccagaaaaatgaaaaaatattcatccatccatcattagttggcttcaaattacttctgagattcagggagacactcttttctttccctcctccagtgatttttcatatcgtaaaaggtgaaattattcacaaattcaaagattcctcttataaaagtttctcaagagtttgtttatagatcattaaacacttaacagcgggagaaactaaaaactaaaatgttccaagtcactaygggttaaaaatattaacaagaaattaagatttactatatcacaaagtgatttaaaagatggatatctatatgagtggttgaatattttcatttttctgcacaggaactcttcagttcagtacgaaacatatggtgtctgtccaggcacgagcctgcaaagctccaggcacgagcctgcaaagctctgtaaagcacaaggggcctcttcagtaggcagcccatatcccaccttgccctatcacctgcctcagcaaggtgacacagattgtgctggacaggaagagcccttctcta

SEQ ID NO: 551039 - DNA, 1470 bp, Homo sapiens
ccatcctggctaacacagtgaaaccccgtctctactaaaaaatacaaaaaaatagccaggtgtggtggtgggcacctgtagtcccagctagtcgggaggctgaggcaggagaatggcgtgaacccgggaggcrgagcttgcagtgagcccagatagcgctactacactccagcctgggcgacagagtgagactccgtctcaaaaaaaaaaaaaaaaaagtatccagaaagaggagagcccaggcagctgttggcagggccagcgacttccctccttcttgggccagttgtaggcccagggagcctgcacaaggagaggggttatgccatcctcctacccacagaaagggtgggaagtggggcgccagcctgctgagcttgctctcagctggactcccccgcccgtccgcatcacagagcaggcggactcaacccctctgagctctcaggctgatgggggagatgcactcagatatagagatcatgatggcagaaaagaagttctagagtcaaagtggtcacacgtgttggggagcggttgcttcttcctggggagcgctgagaaggctatctaggggaagagacatgcaatgatgatgacaataatgtaaccatgagagcaaacatttgttggggcctccctaggtgcccacaccatgcccagctcttcatactgaaggaggaggaaagggtgatctgggaatgggaaacaggccgtgccagggcacagggtgtcagccagcaggagcagggtgtggggatcatgccagctgccggggtgagccggcatcaaggacatcacacagggcatcaggccctgtgttcagcacctcacatgtgagggggctgttgctacccgagccacacgacttaaggagactgaggcgtggagagagggagacagtatcacacagcccgtgaaagagcaaaagggccaagccaatagcaagcagacagggtttagagaagggtcagctgttgtctgcatgtggcagaaacttgggcatgttccaatagaaggagaggtggcaatgaggcaggacaaacaggctgacattttggggtccccaggtagaagccagtcaccgcctctgacagcgaatggctgccctttccctgggctgcagggaggggaggtggaggattgggtgggatgtacaataggtgtgaggagatgggtgggaagtttaggaccttcctgcctggctgccttgcagagggtgaaatttaccaaaggtgaagttcacctgaaaacccaaccgccttcttgtgatgggacgtttaatgtgcaagccacaggtagctcataacactgttaactttcgagcctgcgagcaggaggcattctgattatctgttcatttctagaaacgcttgagccagagggactgtttgttgcctagagaacaaagctaaaacatcggaatgaaattgagagagaaataaaatttcctattctaagcatagccta

SEQ ID NO: 551040 - DNA, 1470 bp, Homo sapiens
ccatcctggctaacacagtgaaaccccgtctctactaaaaaatacaaaaaaatagccaggtgtggtggtgggcacctgtagtcccagctagtcgggaggctgaggcaggagaatggcgtgaacccgggaggcggagcttgcagtgagcccagatagcgctactacactccagcctgggcgacagagtgagactccgtctcaaaaaaaaaaaaaaaaaagtatccagaaagaggagagcccaggcagctgttggcagggccagcgacttccctccttcttgggccagttgtaggcccagggagcctgcacaaggagaggggttatgccatcctcctacccacagaaagggtgggaagtggggcgccagcctgctgagcttgctctcagctggactcccccgcccgtccgcatcacagagcaggcggactcaacccctctgagctctcaggctgatgggggagatgcactcagatatagagatcatgatggcagaaaagaagttctagagtcaaagtggtcacacgtgttggggagcggttgcttcttcctggggagcgctgagaaggctatctaggggaagagacatgcaatgatgatgacaataatgtaaccatgagagcaaacatttgttggggcctccctaggtgcccacaccatgcccagctcttcatactgaaggaggaggaaagggtgatctgggaatgggaaacaggccgtgccagggcacagggtgtcagccagcaggagcagggtgtggggatcatgccagctgccggggtgagccggcatcaaggacatcacacagggcatcaggccctgtgttcagcacctcacatgtgagggggctgttgctacccgagccacacgacttaaggagactgaggcgtggagagagggagacagtatcacacagcccgtgaaagagcaaaagggccaagccaatagcaagcagacagggtttagagaagggtcagctgttgtctgcatgtggcagaaacttgggcatgttccaatagaaggagaggtggcaatgaggcaggacaaacaggctgacattttggggtccccaggtagaagccagtcaccgcctctgacagcgaatsgctgccctttccctgggctgcagggaggggaggtggaggattgggtgggatgtacaataggtgtgaggagatgggtgggaagtttaggaccttcctgcctggctgccttgcagagggtgaaatttaccaaaggtgaagttcacctgaaaacccaaccgccttcttgtgatgggacgtttaatgtgcaagccacaggtagctcataacactgttaactttcgagcctgcgagcaggaggcattctgattatctgttcatttctagaaacgcttgagccagagggactgtttgttgcctagagaacaaagctaaaacatcggaatgaaattgagagagaaataaaatttcctattctaagcatagccta

SEQ ID NO: 551041 - DNA, 1470 bp, Homo sapiens
ccatcctggctaacacagtgaaaccccgtctctactaaaaaatacaaaaaaatagccaggtgtggtggtgggcacctgtagtcccagctagtcgggaggctgaggcaggagaatggcgtgaacccgggaggcggagcttgcagtgagcccagatagcgctactacactccagcctgggcgacagagtgagactccgtctcaaaaaaaaaaaaaaaaaagtatccagaaagaggagagcccaggcagctgttggcagggccagcgacttccctccttcttgggccagttgtaggcccagggagcctgcacaaggagaggggttatgccatcctcctacccacagaaagggtgggaagtggggcgccagcctgctgagcttgctctcagctggactcccccgcccgtccgcatcacagagcaggcggactcaacccctctgagctctcaggctgatgggggagatgcactcagatatagagatcatgatggcagaaaagaagttctagagtcaaagtggtcacacgtgttggggagcggttgcttcttcctggggagcgctgagaaggctatctaggggaagagacatgcaatgatgatgacaataatgtaaccatgagagcaaacatttgttggggcctccctaggtgcccacaccatgcccagctcttcatactgaaggaggaggaaagggtgatctgggaatgggaaacaggccgtgccagggcacagggtgtcagccagcaggagcagggtgtggggatcatgccagctgccggggtgagccggcatcaaggacatcacacagggcatcaggccctgtgttcagcacctcacatgtgagggggctgttgctacccgagccacacgacttaaggagactgaggcgtggagagagggagacagtatcacacagcccgtgaaagagcaaaagggccaagccaatagcaagcagacagggtttagagaagggtcagctgttgtctgcatgtggcagaaacttgggcatgttccaatagaaggagaggtggcaatgaggcaggacaaacaggctgacattttggggtccccaggtagaagccagtcaccgcctctgacagcgaatggctgccctttccctgggctgcagggaggggaggtggaggattgggtgggatgtacaataggtgtgaggagatgggtgggaagtttaggaccttcctgcctggctgccttgcagagggtgaaatttaccaaaggtgaagttcacctgaaaacccaaccgccttcttgtgatgggacgtttaatgtgcaagccacaggtagctcataacactgttaactttcgagcctgcgagcaggaggcattctgattatctgttcatttctagaaacgcttgagccagagggactgtttgttgcctagagaacaaagctaaaacatyggaatgaaattgagagagaaataaaatttcctattctaagcatagccta

SEQ ID NO: 551042 - DNA, 621 bp, Homo sapiens
ccttctccctgactggatagatgttggaatgacatacagtttaataaagaaattaataccagccttctccctgactggatagatgttgcaatgacatacagtttaataaagaaattaatamacgacaggttttgaaggagacattccaagaaagaagaacgtattaccctattgattgaggtgaatattcaaagccagcaataaccaggagcatgggtgaagtataagccgcaacaggcatcccatcagcctgtcaacagaaagttcagggcacagcaacactgaagacacaaggaccaacaatggcataagccatatcttcaacagaaaatcaggtgcaacagactgataacagagtgtcatggccttgagaataaaccctatctagttcgtttcctgaagagaaaggagagtgaggcaaccaactggaagaggtggtaggatcagcagcccagcatgatgagtaagcatgtcttgagaattttcaaaacatttacaaaatggttcttagccttgactacaccttagtgccaccttggagcactttcaatgatccaggtgcccaggcagtgccctatgacatcagaatctctggttataagactcatagttttaaaactc

SEQ ID NO: 551043 - DNA, 557 bp, Homo sapiens
ttaaaaaaaatttaaacaccaatagaaggtgtttaaatagaaggaagagagatttgggatgacatcaaagtctcttttcaatcatacttcatttttttcaattttatcctcaataaataactacattttagaaaggcatccaatgtattacraaaaatgtattttataaatgcagtgttttatgcaagctggaagttagacaatagcgtcgcaaatagtgaagactcacgcctccaatattttttaagctacagaatagaacacattccttcatagtctccctgcacaatcttcatcacaccccactttacccattgtcttttggcttctttaaaaggcacatcaaaagtcctgcatttactctaagattgccttttatcacacaaaagtgggaaagcccaaagagaaaactaagctaagtaacccttcggcaggcatcattgagtatctagtggcgacgctaagagctcccacttaccgtaagcctccctgttcccactgctcagtgtgtgagggaactaacaataagtaagacacaaaggccttacaggctgttt

SEQ ID NO: 551044 - DNA, 557 bp, Homo sapiens
ttaaaaaaaatttaaacaccaatagaaggtgtttaaatagaaggaagagagatttgggatgacatcaaagtctcttttcaatcatacttcatttttttcaattttatcctcaataaataactacattttagaaaggcatccaatgtattacgaaaaatgtattttataaatgcagtgttttatgcaagctggaagttagacaatagcgtcgcaaatagtgaagactcacgcctccaatattttttaagctacagaatagaacacattccttcatagtctccctgcacaatcttcatcacaccccactttacccattgtcttytggcttctttaaaaggcacatcaaaagtcctgcatttactctaagattgccttttatcacacaaaagtgggaaagcccaaagagaaaactaagctaagtaacccttcggcaggcatcattgagtatctagtggcgacgctaagagctcccacttaccgtaagcctccctgttcccactgctcagtgtgtgagggaactaacaataagtaagacacaaaggccttacaggctgttt

SEQ ID NO: 551045 - DNA, 516 bp, Homo sapiens
gattattaataatgccaccacattgatggctcagctgaggactagaaaataagtctttaacaaaatttcctatttgtattttatttttcttgcaatgatgcacagctgagaacagaaaataagtcttaacactctcccaaagatkgcaagatgcacagtcaccatgtctaatgattccacatctgatgctctcaaggccctagcattattcacaaaatgacttaattacaaataacattgtactgattatctgttatataacaaattatcccaaaacttagttaaaacaacaaacatttattatctcatagttcttgtgggtgcctctggtttgatgtctctcctaaagtttgcattcaggttgtaggacagggctgcagcctcatctgcctgtgagaggatttgcttctaagctcacccatgtcattgttgatggaattctcatctgtttggctgaggccctcattcagttgcttgttggttatgagcatcagttccttgttacatggaccttcc

SEQ ID NO: 551046 - DNA, 517 bp, Homo sapiens
tgccttgtccttttsgcaataggaggtggggccttcctgaatgtcagggcttcctgggtggttggccatcctggaaggcagaagtttgtgagcagtgaagttttccttcaaacattggttggggcctgggctctgggagaagacaactggtctaggggctcttgctggggaaggcgctggccactgcaaagtggtgggcgcaggccagggatgaaggagaaagtgctagtaggccactttcctctggaagggctcctcttatgattctgctggcagtcacatccagtgtgaaggtctttgttattctttgatcttttattcttttttgttatttccaatccttcagtaaagttgggcacttgaacagatttttcagttccacaaattgaagagcacctcccatattctaggatactgaagttagcatggcagacaagtgtcctatctttatgggctttctaactttagatcctgaggtctgaagggaattaaggaatgagctggcatccaaaattgg

SEQ ID NO: 551047 - DNA, 1888 bp, Homo sapiens
ttcagcctgccaattttagtacagtaaattctatgaaaaaatttaatgctaccaaactcattcatatttggtgagtttggttcagattttctttcccctcaccttggactacttgagctcctgtcatcaaggctggcctcacccctgggtcactgggaaggccctcttccccctctcccaccttcagtgatgcctgaaatactttaagtaggagaccagtcaatcaattttgcctccacaatatgagtaacacctagcactaaattcatacaaagagatgaaaactgaaatcagacatttcctaaggcagcgagtatgggtcgataggaaggaggagaacacacaggggtgctcaaggccagaagggataccagctggaccctgtctcagagaaagcaaaaaaaatggtgaacaacaaagccaaatgtcagttttacccaaggcttgcgttaatgaaccttcactacctacttgatgaccccatgatggaaaacatgcttcttctgtcggcagtttgtgctgtgaaaggctaaagacattaaaattgtaattaaatacaaatttataaaaattctaagacaaaggttttattctgattctctgcaattcaattcagaccatcaccaacaaatcagttataaatacctacaaaaatccttaagcttggtccaaaacaatgaaaagtctcatcaacaagaaacataaagtaatgagaactgaaataaaaatcattttcagaatgcaagtggatatgatgagactacatgtcacaggccccacaattcaaataatcttgggtgttctctaagatcattaaaaatcactatgaagaaaggacatgtgattatcatgtttgtacaaataagggtaaaaggttagtatgatgattctcgtacaggagtaatttggatgtgggaagatattagtaactataaataaaatcattaagaaatcaaaagtgcttagtaaaggtattttcaaatcttcaaggaaagacaattttaagttttataaagtaaagtgacattactctgtccatggatgttcrtctgtattctaaaggccataactgaccctaggaaagaaaattctaccaagatgtagtaaggacacttgtgagaagctaaatcaattacaaaaccaatggcctatctgaatgcatcactaacgtgcatggtcttgcccttgaacttgttggagtgctatttgctacactgtacattactagaggaaataatcaatagtcgtatcagtttatgacaggcccagcaattgaatatctggagttttcctgagacattaaaattgggcatcctagatcccatgtatatgactgaggcatcatttctgaattctgatttcaattggcaagtggtcccacattgtcaccacttctttcacatctttccttctagtatattctaggaaggacagccttccttgatgcccatactttgagctgtctctgcactgatgctgtgtgttttcaatttttttctgttctatcaagcaagggtggacttagagaaagaataaagcactgcacagagcctctagactatgtgttagttgcaaaatgaagaaggcagtagaagaggaggagagtcatcttccatattctcttttgggacactgaatataggtgaaattctagataaatggaagagtcttactaaaataaatccacaaactcatagactagaactaagcttatcctgttaaatattttatatgatatagctcttagccctgcactttctgactttaaaatgtggtagaaaatactaggaaagacttggatgaatatgtttcatggtggccaggttagaaccataggcacaagatagttacagagaatgaactgttgaatgtaagcaaatctttcact

SEQ ID NO: 551048 - DNA, 1098 bp, Homo sapiens
ccttcacactgacataggagtgctctgttatatacacgtggcagaaaactgcacaagtgaaaagaattgtttggaaacagagaacagtggtcacgaggtatagacttttccaaatcaaggcaccttgatcaacttttctaaatcaacccacctggctattctcttcagtataacacatacagagttagattttttatatatgtacatgagcacctgagggtatacgtctataaatgtgtgcttgcaaacacatgaaactcagatgttgtaaagccagccaacaagcacaagtagtatttaatcttttcattatgtaatgagagacccgagtcacgcaagtgtgtactcactgtagaaaccatctgaccataatacagtggaaactgtggtacacagactgtatttttaaatcccttctttgacagttgctgagatctcccaaagctgcatattaaagtgtctaattcataaatttttcctttacactccatttcaggacaatctcagtggcccaatcaagaacaccgtattttgctattagaattctcataagcttatctaaaaatctgtcatctgccttggttyttgagttcagctttctcagtcatttaagaatgactccatttctcccatcaaggtagtgatgaatttagtttccaaatggaggtcacatttctagtctttttaatttcctttttattgtctgtggtgctaataattattactaggacattatcactatcagggtgaatgggtcctgaaaaatgttttctttatgatattaatagcagaagctgttttaatagcaatggaagtaactgacacattacctcttatatcagctactataaatgtataaaatgcactagcttctttcaaatagacagaaggacaataatatacttagatattctactctttggtgttgcaaaaaaattgagagtgaagcttctggagaaattttatatgcagtttaattggcaccacaaaaataaacccaggaatgttttcatagaaatacaaatgaagcaaaagtctaactatgagtttatatgtatagaacctcaaagtaaacacaccaccaggagacacttgaca

SEQ ID NO: 551049 - DNA, 1098 bp, Homo sapiens
ccttcacactgacataggagtgctctgttatatacacgtggcagaaaactgcacaagtgaaaagaattgtttggaaacagagaacagtggtcacgaggtatagacttttccaaatcaaggcaccttgatcaacttttctaaatcaacccacctggctattctcttcagtataacacatacagagttagattttttatatatgtacatgagcacctgagggtatacgtctataaatgtgtgcttgcaaacacatgaaactcagatgttgtaaagccagccaacaagcacaagtagtatttaatcttttcattatgtaatgagagacccgagtcacgcaagtgtgtactcactgtagaaaccatctgaccataatacagtggaaactgtggtacacagactgtatttttaaatcccttctttgacagttgctgagatctcccaaagctgcatattaaagtgtctaattcataaatttttcctttacactccatttcaggacaatctcagtggcccaatcaagaacaccgtattttgctattagaattctcataagcttatctaaaaatctgtcatctgccttggtttttgagttcagctttctcagtcatttaagaatgmctccatttctcccatcaaggtagtgatgaatttagtttccaaatggaggtcacatttctagtctttttaatttcctttttattgtctgtggtgctaataattattactaggacattatcactatcagggtgaatgggtcctgaaaaatgttttctttatgatattaatagcagaagctgttttaatagcaatggaagtaactgacacattacctcttatatcagctactataaatgtataaaatgcactagcttctttcaaatagacagaaggacaataatatacttagatattctactctttggtgttgcaaaaaaattgagagtgaagcttctggagaaattttatatgcagtttaattggcaccacaaaaataaacccaggaatgttttcatagaaatacaaatgaagcaaaagtctaactatgagtttatatgtatagaacctcaaagtaaacacaccaccaggagacacttgaca

SEQ ID NO: 551050 - DNA, 1076 bp, Homo sapiens
gtcaaaataaacttaaatattctctgaatcacaacttgactatcacaagaaagctgaatgactgttacctacaaatgagatttttaaaatgcataactaaaaatagaatcagttatttggcatcaaagaatatctggaaatgtttgattacctttaaaaacatttttgaatgttcatcttcaggtaaccagtctttgtacagagcaatccactgggaaacaagatgcaagactttacgtttcctacgcggaacrtctgagttttcctctttgccttgatacttcttagcagaataggtgcaaatggttaagaaaaaattatattgttgaaaattttaaaatatgaagacatccatttactcttatttttacaaaatatgtgaaggcatacaagtgtataaacatgcaggaagaatagaatatgcgtagggagagcaaaaggtgtgcactgagaagagcaaaagtaaactgaggaaaatgactgaagtatactcggtaggcagccaggaagtgaagggttggaccatttcactgacagctgctgacatggtttcataggcaacatgcagttaatgccagcccaaggagatactaggtggtccattaatttcaacagtgactctaagaagagagctagcctcactacacaggtgaatactatttcaatacattttaggtcagaatgaggccagatgctgtctagtcctcagaaattcacattctgtaaaaccaggtgcttctaaagtagttccaaatgagtatagatttctgcaacagaatttgtaacatgattcaaatgcccactcctaggaacttacttgaaaacattggatacatgtgtgaacacagaggtaaaagggactgctaattttcattttaaaataaaatgaaaattatttcattttaaaataaaatgaaaattatttcattttaaaataaaatgaaaattatttcattttaaaataaaatgaaaattatttcattttaaaataaaatgaaaattatttcatttaaaataaaaaaaggaaataacctaaatgcctcagcaactgagaacagttgactaagttattatat

SEQ ID NO: 551051 - DNA, 1076 bp, Homo sapiens
gtcaaaataaacttaaatattctctgaatcacaacttgactatcacaagaaagctgaatgactgttacctacaaatgagatttttaaaatgcataactaaaaatagaatcagttatttggcatcaaagaatatctggaaatgtttgattacctttaaaaacatttttgaatgttcatcttcaggtaaccagtctttgtacagagcaatccactgggaaacaagatgcaagactttacgtttcctacgcggaacgtctgagttttcctctttgccttgatacttcttagcagaataggtgcaaatggttaagaaaaaattatattgttgaaaawtttaaaatatgaagacatccatttactcttatttttacaaaatatgtgaaggcatacaagtgtataaacatgcaggaagaatagaatatgcgtagggagagcaaaaggtgtgcactgagaagagcaaaagtaaactgaggaaaatgactgaagtatactcggtaggcagccaggaagtgaagggttggaccatttcactgacagctgctgacatggtttcataggcaacatgcagttaatgccagcccaaggagatactaggtggtccattaatttcaacagtgactctaagaagagagctagcctcactacacaggtgaatactatttcaatacattttaggtcagaatgaggccagatgctgtctagtcctcagaaattcacattctgtaaaaccaggtgcttctaaagtagttccaaatgagtatagatttctgcaacagaatttgtaacatgattcaaatgcccactcctaggaacttacttgaaaacattggatacatgtgtgaacacagaggtaaaagggactgctaattttcattttaaaataaaatgaaaattatttcattttaaaataaaatgaaaattatttcattttaaaataaaatgaaaattatttcattttaaaataaaatgaaaattatttcattttaaaataaaatgaaaattatttcatttaaaataaaaaaaggaaataacctaaatgcctcagcaactgagaacagttgactaagttattatat

SEQ ID NO: 551052 - DNA, 1076 bp, Homo sapiens
gtcaaaataaacttaaatattctctgaatcacaacttgactatcacaagaaagctgaatgactgttacctacaaatgagatttttaaaatgcataactaaaaatagaatcagttatttggcatcaaagaatatctggaaatgtttgattacctttaaaaacatttttgaatgttcatcttcaggtaaccagtctttgtacagagcaatccactgggaaacaagatgcaagactttacgtttcctacgcggaacgtctgagttttcctctttgccttgatacttcttagcagaataggtgcaaatggttaagaaaaaattatattgttgaaaattttaaaatatgaagacatccatttactcttatttttacaaaatatgtgaaggcatacaagtgtataaacatgcaggaagaatagaatatgcgtagggagagcaaaaggtgtgcactgagaagagcaaaagtaaactgaggaaaatgactgaagtatactcggtaggcagccaggaagtgaagggttggaccatttcactgacagctgctgacatggtttcataggcaacatgcagttaatgccagcccaaggagatactaggtggtccattaatttcaacagtgactcyaagaagagagctagcctcactacacaggtgaatactatttcaatacattttaggtcagaatgaggccagatgctgtctagtcctcagaaattcacattctgtaaaaccaggtgcttctaaagtagttccaaatgagtatagatttctgcaacagaatttgtaacatgattcaaatgcccactcctaggaacttacttgaaaacattggatacatgtgtgaacacagaggtaaaagggactgctaattttcattttaaaataaaatgaaaattatttcattttaaaataaaatgaaaattatttcattttaaaataaaatgaaaattatttcattttaaaataaaatgaaaattatttcattttaaaataaaatgaaaattatttcatttaaaataaaaaaaggaaataacctaaatgcctcagcaactgagaacagttgactaagttattatat

SEQ ID NO: 551053 - DNA, 550 bp, Homo sapiens
ctgaccaacacagtgaaaccccatctctactaaaaatacaaaaattagttrggtgtggtggtgggcgcctgtaatcccagctactcgggaggctgaggcaggagaatcgcttgaacccggaaggcagaggttacagtcagccaccgggattgcagcattgcactccagcctgggcgacaagagcgaaacttcgtctcaaaaaaaaaataaaaactaaaaaccaaccaactttttaaacattattccaacagcattttgcatgtaaaaaaaccaacaagacgtcacctctcttctcacatttatttatttgtccccctttctccttccccccatgttcctcacactgtcatccccacctcaggggaacagggtgcagagacggatcccgaggctgaacccgagctggagctatccgactacccatggttccacgggacactgtcccgggtcaaggctgctcaactggttctggcaggggggccccggaaccacggcctcttcgtgatccgccaaagtgagactcggcctggggagtacgtgctgaccttca

SEQ ID NO: 551054 - DNA, 550 bp, Homo sapiens
ctgaccaacacagtgaaaccccatctctactaaaaatacaaaaattagttgggtgtggtggtgggcgcctgtaatcccagctactcgggaggctgaggcaggagaatcgcttgaacccggaaggcagaggttacagtcagccaccgggattgcagcattgcactccagcctgggcgacaagagcgaaacttcgtctcaaaaaaaaaataaaaactaaaaaccaacmaactttttaaacattattccaacagcattttgcatgtaaaaaaaccaacaagacgtcacctctcttctcacatttatttatttgtccccctttctccttccccccatgttcctcacactgtcatccccacctcaggggaacagggtgcagagacggatcccgaggctgaacccgagctggagctatccgactacccatggttccacgggacactgtcccgggtcaaggctgctcaactggttctggcaggggggccccggaaccacggcctcttcgtgatccgccaaagtgagactcggcctggggagtacgtgctgaccttca

SEQ ID NO: 551055 - DNA, 633 bp, Homo sapiens
tggaaattaaaataaattctgtttaaagggaaaactaatttttagttagaaattaaactcaaagtataatttgcttatacattaataaagtatatataacgtaaagtatatttaaccttttaaagttttccccttccctagataattttgttatttaaatgaattgaattataaaataatctcatggcactgtgtaatattttacgatacaatccagttaaagaggtgctaaatattttagaaacagcccaccagagggcagtcagcttttagtctaacgtgttggaaatagataaatttattatgatggctaagttttaaataaaatatctatttaaatcacataacttcttgcatctaggaggtgaacaaagtgaagttatgacttgagattgagaagcctgaggcttcaaaccattttgataaaaaatcaccaaaggactaacaattctaacaattgcccttctgtactccctcacactcaaccttttcattgtgatatttatgtttggttataaagtaagatttattttgatttgagatgttttggtgcattaattttttttctaatcagtggagactttgggacaagctcctgctaagagagmaagagagaagagagattttgttttc

SEQ ID NO: 551056 - DNA, 324 bp, Homo sapiens
cttccatattcgggtgctttaagtagaatcactcacagatcagaagcacaagaagtgatagagcccttcatgttatatcttagggcaagagctcaactattcatagttttctgagaagacaggcatgccagaaagtcaccttccttattttccaacttacatgtataaaagagtatgttctctgtaaaatactataaactttcagctgggcatggtggcttacgcctgtaatcccagcactatgggaggcagaggtggacggatcacttgaggtcaggagttcragaccagcctggacaacatggtgaaatcccgtctctacta

SEQ ID NO: 551057 - DNA, 536 bp, Homo sapiens
caagcctgatctgtgagtaatctcctgaataatctttaatgagtaagcattaagtcaatagacattggaaagaactccagtaacctaattccccatcccccaccccacccatgacaatttatagcctcatttgacacaggaggtgatcaacttgtttacctggctctgttgggcataagttcttaggtcaataattratgcggtaaccataattttaaattaatataatgatttccatttcagttcagttcataaaacctgtctgcgtcccagtatggtacatgatgaatataattttccattttatagctggagaaatcgagccaggaagcagtgatgctagaaggggacactagtcagcgaagtgctggtgtaaatgttttaacaaccagctctctgcgggaagaagtcctggtttgtagtggatgccgatttccatcgtgtaaatactcccaccttggctgattcaagctaccaacatggcatcactgaatgcagagttgggaagaattgcacattttcagctcttgtgagct

SEQ ID NO: 551058 - DNA, 1869 bp, Homo sapiens
ggagtctcgctctgtcgcccaggctggagtgcagtggcgggatctcggctcactgcaagctccgcctcccgggttcacgccattctcctgcctcagcctcccaagtagctgggactacaggcgcccgccactacgcccggctaattttttgtatttttagtagagacggggtttcaccgttttagccgggatggtctcgatctcctgacctcgtgatccgcccgcctcggcctcccaaagtgctgggattacaggcgtgagccaccgcgcccggcctgaacaaagggttctgatgttaaaatgcatgcaaaagcataccaagtttcctcctaattttattattctaccattctaagatggagagtggtggctgctatggtttggatatgtgtccccacccaaatctcattttagttgtaatcccccatgttggagatagggcctrgtaagaggtgattggatcatagtggtggatccttcgtgaacggtttagcaccacccctttggtgctgttctcatgatagagttctcacgagatctggttctttaacagtgtgtgatagctcccctctctccctccctcctgccctggccatgtgaagtgctgctcctcctttcaccttcagccaccattctaagttttcccaaggcctccccagaagccaagcagatgccaccatgcttcctgcacagcctccagcaacatgagcccaattaaacctcgtttctttataaattacccagcattaggtatttctttacagcaatgtgagaatggactcatacagtggcctaaatcacatttttggacagaacaaacttcataaagggactatggctttggtaataatatccaacaagccccctaaccaataaactcaccttctttggggttcctcttacctggggcactttcccagtctacatctctgttggaattgctcccaccacctactcccagtctgtagatgtgggctaaggcagccatgtttgaaccatgtggctttagtcatttcaataacagccattgggatcaaaggtaacccttatcctaatacaggaaaatcaggtccctcttcctcccacttatgcaaaccatgttaagtaccctaatccattaggaaatgtgcttattctggttggagacagcctgtgaacaaatggtacctctgtctgaattacaaaaaggacctcttgtggtggaaggcgtggagaagcagagcatgggttgtatttcaggtcccacttgcccccttggctaggcactgtcacacaggacacagcccgcatatccatcagcagtacccctgcaatagcttagcccagggattggcaaacgagggtctgtgggccaaattcagcctgtcccgtttccacaagtaagtttactagaacagagccatgcccatttgtttactattatttgtggctactttggtgctataagagcagagttgaatagttgctacagagactatacggtttgcaaagcctaaaatatttattaactggccttggcttagcccatgtctgatattcattttcttcaggtccatactccaaaataatgaaatgagtctactgctgagtacagaatatagcaccaactattggagctgaaagggtgctactgactacttggtcggcatttgcttttaaataaaatgcaatgctggatcctatggattctaagaatatatggatcctatggattctaagaatatatggaattttgtttctatttaagagaaatggatggggaggaaggaaggaggagagaggaagtgggaaagcggaaaggggaggggggaagagagggagagggagagagaaaacaaacactagcccatccgaagaacttttcaaaac

SEQ ID NO: 551059 - DNA, 1810 bp, Homo sapiens
tgtttctcccacaggaatctttttcagtgaactaaaacgccatcctaattgtatgttcagtccctctgttgacttcctttcttattggcaagatttttgcttaaagaaaaaactaaaacttcattggccttttgcgaagcttgagatgtatccacactggctcctcttggactcaatgctccatttgattcttcccctcctttgccaccttcagtcttctacccagttccctttaatcattgattgttcccccttcaaacccatatttcttccattgggtcaatcaatggataaaaatgtactgaaaagaaacatgagagttacggttgtcacataaagggatcaaaaagggacttctaggaacgctgatatgccttcaaaacacagcgaaggtgccattgtctcctttttgggtaacctatcttcctcatagagccccaacagtcacaagtaggttcagccctaattcattcatgggctccaccctgaattcggtaatctagttaatttaagaaacagaaacttaaaaagccacctgttcaactaaatggatcttccaaatacaactctccaatattttgctgcccattttcaaacttcttgtaaaaaagatttacacctataagaaaactctccatttgtaagggaatctccctctctacaccaaaaccactggaaacccataccatgggaaaggcattcccttaaaaatttccataacaaacttttgtttaaggtatttttcctggctatgtgtcttaaatgggcctttacctatgcccttctttgtcttggcaaataatgaagtttacatacaagttctctgtctttgagacagaaattttctctcttaattcacctagggccatccctttagaagtgcaagtttaaggttgcctagctaacagttgcatagggcaatgaaacaggtgatctgaagattgatggtctaaatcgggtggagaagggctatttggaagttggcaaatgagaatttcaatgaaagctgcaagatttgattctgtgtctctttatgttatatgtctatatctgttatgtatatgtgatatttctaagtgaaccaacataatctttggtaaacaaagctagttttaaaattgttggtaaaggccaggtgcagtggctcatgcctgtaataccagcactttgggagaccgaggcgggtggatcacctgaggtcaggagttcaagatccacctggccaacatgacgaaaccctgtctctactaaaaatataaaaattagctgagcatggtggtggatgcctgtaatcccagcaactcaggaggttgaggcaggagaatttcttgaacctgggaggtgggggttgcagtgagccaagatcatgccattgcactccagcctaggtgacaagagtgaaactatgtctcaaaaaaaaaaaattgttgataaaatggaaagtcttcagaactatactaaatataattcagacatttttgcctgggtctactggttagccaggtaatttaaggtgtctsagctacaatttttaaggccatgaaactgctgcctctgtaatattttttatgcttgtttaatttctctgtaatctaaagctgtaaacgctggctgctggattcttccaaatccctgtaaatatctttatgtgagcttctatctttggttttgagcctctggatgctggagtctggagaagtggccatagtaagacctggaaacacatgtgtgtccatggcacgtggcccaccaactgccatgttcacacctctgtcctctgtcctgggttgtaaacctggtatatggatcc

SEQ ID NO: 551060 - DNA, 1041 bp, Homo sapiens
gtgctctcactatattgcccaggctggagcacaatgtctaattcacaggtgcaattatggaacactacagcctggagctcctggtctcaagtctccttcgacctcagcctctcaaatagctggaactacaagtatgtgccactgcaccaagctggcaaataatttttaataaagaatttatccraggataaaatattcaattgagaatctaatcttaaggtttaaataattttttaaaagatcctgaaataatggaaaattttaatcccgtataactgatatcataaatccaaatcaattctgataacagaataagcatcgtaagtttcccctctaagttttaaaatgttgtaaatatttcaaaaggtacttgtaaatctgtaattatgtattaaaaacaactatctgggtgtttttagggtgacacagaagattagagttgaaatcccagatctgccaccattcttcgatgaatagagaaagcagatttttaaagtcagaacaaagttcaaattccagttccacatgctaactagccatgtgacccttggcaaatgagtctccctgattcttgattccagcacatgtaaaatggggaaaataacaccccacatagatcataaggattaaatgacacatacacccacacacagctatgttgtgtgattgtgtataaggtgaatagtatactgtttcataaatgttatcttccatctttttcccttcttatctgtaacattgatacctttttctgaatctttaaaataatgagtctgtctcccatatcccttttagttctctaaatttaaatctggagagcacactaacatactttctctcaagtagtgggtgctacacatgtaccacttcacagtattttaaaatataaaataaatgctttcaaaaatatctttcaccagtaactttttataatgtgtccacaatctcttcaacaaccccggggccagatgtgttttggagttgagaaattgtttaattttagaaaggtaatgatatgcacacatcatatattacacaatg

SEQ ID NO: 551061 - DNA, 1041 bp, Homo sapiens
gtgctctcactatattgcccaggctggagcacaatgtctaattcacaggtgcaattatggaacactacagcctggagctcctggtctcaagtctccttcgacctcagcctctcaaatagctggaactacaagtatgtgccactgcaccaagctggcaaataatttttaataaagaatttatccaaggataaaatattcaattgagaatctaatcttaaggtttaaataattttttaaaagatcctgaaataatggaaaattttaatcccgtataactgatatcataaatccaaatcaattctgataacagaataagcatcgtaagtttcccctctaagttttaaaatgttgyaaatatttcaaaaggtacttgtaaatctgtaattatgtattaaaaacaactatctgggtgtttttagggtgacacagaagattagagttgaaatcccagatctgccaccattcttcgatgaatagagaaagcagatttttaaagtcagaacaaagttcaaattccagttccacatgctaactagccatgtgacccttggcaaatgagtctccctgattcttgattccagcacatgtaaaatggggaaaataacaccccacatagatcataaggattaaatgacacatacacccacacacagctatgttgtgtgattgtgtataaggtgaatagtatactgtttcataaatgttatcttccatctttttcccttcttatctgtaacattgatacctttttctgaatctttaaaataatgagtctgtctcccatatcccttttagttctctaaatttaaatctggagagcacactaacatactttctctcaagtagtgggtgctacacatgtaccacttcacagtattttaaaatataaaataaatgctttcaaaaatatctttcaccagtaactttttataatgtgtccacaatctcttcaacaaccccggggccagatgtgttttggagttgagaaattgtttaattttagaaaggtaatgatatgcacacatcatatattacacaatg

SEQ ID NO: 551062 - DNA, 1470 bp, Homo sapiens
gggaaaacagacaaatatttgtaaggcaaataaacgcttaaggtaggaaaaattagcatccttgaagaaaacagcccaggaattcctgtattttcttaagagagtagaggtgggaagaaagcaatgttccagcattgagaaaacatcaacagaatgtctttgagacaacggcaatacaatgtctactgcatagctcgtcttcacatatattatcacagataatcttcccaatgacactgggggtgagggggaatagttttatcccagtattacagatgaggagatggtgatgcacgaaggtgagactttacaaatccacacaactgttgggtggcagagccgcgcgagactcaacgcatgggatgcttcatttcatggttcagctcctcctgttaaactattctctgtagcacagagaagaagcccacgactatcaaaaccattgctaactgaaacagaatattataattcatgtgtaagaaaagcttcagaaatgagtgcaaggctctgagggaagtttgctgtgtgggatgctaccctgggctgcctgtggagatgaatagccgcgccagaacagatttttattcatttggaggtcgtgaataaaacagttttagactttggagcagaaagaaattggttagggggcagggggtgatttttttcccctaggtctttgtattttaataagtgggaggcttttttttgtattttgttttttgggcttctttttcttattctattaaaaaagggggtccctaggactgcactgtgacatttcttctattttgtcagataaggggaactcaacagctttttcactctccctttgtgtcattaaaaaacaaagcatttcaaccaaaatatttgatgtttttctaccagtgccttagaatgttattatgtgtggataggaaacatctcccctgaaagctcaaggcttccccttctctacataagcccaggtgggtaggaggtttgggacgatactagggttgtgagcaattaatcacaaatttactgcaaagtcctctgaattcgctctgtgatttggcttcttaaaactaacttacatctcacagagttcttacgggaaaaactgggggaaaggacacagtgaacccctctgtgaaattttactagttttaagtaaagattttgtgccaggcactaagttcagatcttcacgtgttrtctcatttaatccttaagacaatggttattatccccttttacttgaaaagaacattgagccctagataagtcagttagcttgcccaaggtcacgcaaatcctgagaaacggaatccagcgtccctgatccccgacctctgtacttatgcaatgtaaggacttagagccaaaatgcttggcttcaaattctggtttcatagctgtgcgaatttgggcaagttttaaaatttctgtgcctcagtgtcatctccaaaatggagaatagggataggaaca

SEQ ID NO: 551063 - DNA, 564 bp, Homo sapiens
gttgactttttaaaatggcccttttggctactaggcaccacacagaatataaaccagtaaaatacatactggcatgagtaagcctctctcgagtaatgtccaatgcctctctcgagtgatgaacctgagatggagttggcctagcagctcaaacagggtgagcaggttgtcaagtcagaagagcccagaactgcacactcattgtctttatgccttttaaccttggcttgggaggtgaggggagaaaggggctayatcgtatctagtctataagacgtcacctaggtttgggtatatattttcttgttgaaccacagttgtgtaatgttcttactttcatatttcatttcttaccatttcactgtgtccactgtaggtttcagtgcaacagcacagtccacaacctaccacatcctaccatctttctcccttcatacaaattgttcactttccaaactgatatgtatttcaatttagctttcctgccctctgtatctgaaaaaattatgtcctgcagtaaggacacaaacatctgccataggagaggaattcatattacaaatt

SEQ ID NO: 551064 - DNA, 562 bp, Homo sapiens
atttttgtatttttagtagagacggggtttcaccaacttggccaggctggtctcgaactcctgacctcgtgatccacctgcctcagcctcccaaagtgctgggattacaggcgtgagccaccgcgcccggcctgatttcctttcttttgrgtatatgcccggtaatgaacatggggattttactgtgtgcaggaaggaggggctgaggacacccttgaggcctccccagcagtgcctgtttctccgggctcagggttatcaggtagctcttgggacgtgcttggacctgtctctggttcaattaagtagaaacattccatcagcatcctagccagcctgtcttcatccgtggctcccaccaagccagatgtaaagaatcgctggacttctacctcccaacatcactctctctgtccttcacaatatgcagtcccagagctcagagactgactggattacagccttcctaattcaatttccttggagttttctctctgaggagctcagtgctctgaactgtgaacttaccaagttttgcttgtttgtgtgtctgtgtttttat

SEQ ID NO: 551065 - DNA, 602 bp, Homo sapiens
cgttcttcaggttgaacttgwaatgtcttcctgagactttatgtatcatcccaatggggcctgtggtcccaggaagatgtttatttgttatggtcacagggaatgaatggatgtgggttaagctgaactaggagtgagaataagtaaaatccctgatctctcaccttttccaggctttggtccttgctattgcccttgaatcttcttactgccctatggtgaagtccaataaaccagtcagcacatctttatcaagtacctgctaaatactcttaagacactaaagagtgatgcatccaaataaaaagaatcgaggttgtgcaaggcatagctcattcttcctgtttcttaacagagcatggcaatttattgcagtaagcattttccatcttttctcaggtgttgtccccatgacagcccgagataggcatgattagtatctatcctctttttacagagaaagaaatatgaggctcattcaggttaaatcatgccaggggcatatagctacaaggtgacaagagctgagattcaagcccccatctgttcaactctaaagcctgtggctcttatccattgtgctagtgtgatttaggatttac

SEQ ID NO: 551066 - DNA, 497 bp, Homo sapiens
tgatagagctgcagttatatggcacatggcatcgatatggactgaagggatgagtggtgggtggtaagaagaatcaaagccagtgatatagtctgttatgcacgtgaacttgggtttacctgtgggtggccatattcctccatgtagaccacaaaatagggagagtgcatctgtcttgaaaaagactgacacagatacttaaaaacagaaaggaaggatatctctatcctgatgactttcctatttctggttctaggtctttcctgagtcttggctacatctccattcttggtttctgtgcaagatctctgagtccttttaataaatccactctgtgtgaatactaaaaggaaaatggaaaggagggcaaatagaattagctgattttctcatgaggaatcacagtaccaacaagagctcagattarccatagctgtgtgtgtggccaggtgggagacatggtaactgtaagcaggtaagtagagggtgattttccc

SEQ ID NO: 551067 - DNA, 550 bp, Homo sapiens
tttgattttttgtaactggagtttatattattctacaagattaaggtaaagtgactcactgaaaatattacattgactactgttatggtaatattttattgtcatggcactattaatttactaatattttggacaaaaggaacatttttcagatagactgtctagagggctctcttgattaagattactttatttctgtttgtgtgtttgaaaagaaaccaaggagaatatatataataaaatagataaaagagctaaaaaaggaaacacaattatttttgcaatttgagtactttgtttctgattaattctgatataccacaaggcgaatataactaataaatcaaacggagttaatctaattacaaggaaattcataaaatagggatattaaatggcaaagtcaatgattgtatatttactcgttaaaatgctatgtawtagtggacatgaatgtttgtgaaaataatgtttcatgttttgagaaaacatactgtttgttatttactactctaagtgcttctaaactcatttaacccttaaaacaatc

SEQ ID NO: 551068 - DNA, 804 bp, Homo sapiens
tttcttggacaaattttatccttttacatttaccttcttcagaggtcagtggaaaaatgggggaaactattcctaatctatttcaacagggagaaagttatatttgttgtacagaatctaggctatttatttcaatttgggacatgcactgaaggtgggttttgaaaaaaaaagctgatccaaggggcagtaattttctgtaattattcataaacagcctttaatggcaggaataattttaccagataactattaactaacattaattcaaccaacaagcattctttgggtacttactatgtaccagatactattctgggtattagaaagagaattctaggaaactgaaaataaccatttgaatagtgtaaattcgctactcccacaaagttgactttctaggctcaaagatagagaaaatgagtttttcttttttttttttgtatttttatttttgtatttttatttttttaattttattgttattacactttaagttttagggtacatgtgcacaatgtgcaggtttgttacatatgtatacccaaaggccttgagctatagtttcagtactgactgatctagtttaatcagcaccagctatgtgatagtaaatatctatagtggataaaccttttagcctttctggcattgcttatgtttgtactagatccttatattatgatccaatttaaaaatatgcataaagaggaaaaggagtaaggaaagatatgaggaagagatttgcttggctaaaatcccrggcaccagagaagttatgcataatcacttttaataagggtc

SEQ ID NO: 551069 - DNA, 2238 bp, Homo sapiens
tctcattttgtttactttatatgtgctaagatgattactaattttaaaagaagaaaactataatcttcgtggccctgtaaattatttgatttttaaaaagctaagtattcatagcattgaaactagatttttaaaaaagaaaacattcagttcagaaatagtaataaaacccttgtttgacatcatgtagacaaagctattaattgacctatgaatttattgcttttatgtgaatttgtgattaatttgaatatggttgtaagtaatgctaatgatctgtgattcaaaattagggttattttggttggttggttgatttgttttcatgaggatgaggcctgggagtgtgtggaggcatcagtgggggtgggtccccttgcctagagggagatataatggaattatccgcagctatagktctttttctaccagagtaactgtccatttacccccttatgttgagctattaaatatacataataaaacttggaaagtcttttattctgctttcacccaattacatttttaaaaatgcattcaaatatatacagtcaaaaaacgtgtattagtctttggtatgtaggcttctctgtaactaagatagctacctatatttaaaatattgtcagatatatactactaaaagggcatgtatcatcagatatactcttattttgattacagtttaaaacttgattacacttaaaaacctaaaatatgttctttgtgagaattttcaatatttggggaatgaatggccaccatgggtgaatgttgagaattcttttgaaaggaaatttcttacattcattttataaatcaggtgaatgcaaaagataagagtgtatgtttttaatacatacagtttgattacagttaaaaacttcagacaaggtacataaaaggtacaaggtacataaaaataaaatcttaaactaaggagataaaccataaacacttttggctaatcctaaggtgtttcttaaaaaggaattttaaggtgattttttaaaattctagaaataatcttagtgtaagatggtgttataagatattagaaaccttaaaagctgccttataacaccatcttatacttctcaatatatttccatttacctttccatctgcaatactaacaaaagaaaacaaatataagtgcatcacatataatcaagaccatttttactatcacatgaatattaaaacaataatgtcttacaaacagcatcagtcttataaatgaagttttaaaaacatacactctcatcttttgcattcacttgatttataaaatgaatgtaagaaatttcctgtcaaaagaattctcaacattcacccatggttgccattcatttcccaaatattgaaaattctcataaagaacacattttaggtttattgtcaacctcatttgatgtttcttaaagtgaggtccatgaaccacttacatcacaatttatttctgaaacttgttaaaatgcagatcggaatctctgaggtggggcctgggaatattcatttaaccatccctgaagggcttctgacacgttctgatgttggaaacaccttcaaatggcagttgcaggagcacagggccttattaacctatctgtcccctgcacctgggcctgtacctggcacagaagtgcgctgagcagagtgtagttgagacgcataactggcctgctgcttggatgacctgagaccacagcagtccttctcagctcacagctggtcagggtaggtgccttcatcctcaagttccccacagcatgcaccacgcagcccgtttgggatgcatgggcaccaaggaaccctcgctttgtgtgttactgaactgacctgacattctaaccagaaaataaattcttgcaggagaaagatttgttttgtttcttttgttcattcaacattcatggtatacatgtttattgagcacttactccatgccaaatgccatgtttagaactggtatggagcaagaacaaaatagacatatttttagaccactggaaaccccttgactcctggaatggttctcaggagggataatcctgtacctaagtggcaatttagacttatagtgtgtatttccatctactagaatagtggtgtcagagcatttacagcttacatacatagtatctccttatatacttcccttttatatttcctacatattacagttacaacatcatagatcctctttcaatgatgtgcacaagtaggtaagtatta

SEQ ID NO: 551070 - DNA, 1315 bp, Homo sapiens
ttgagatccttcctccctctcctctgagccatgttggtgagattcacatttgcctttcttgcagtggccgccacaggacttctttctctcccctttctgaagtgcctgcagctgggagatgaacttggtcttccatgctctgaagttggcctcaatgctgccgtgcttgcttttaaccacgtcgcagtcgccctcccctcgactcatcacacgatgcacgccaagcatccagagccacttgtcaacatttttgccaacctgcgaggaaaagatagataggctaaaagcatggttctctaaatcagggttttccagactgctctgcaaaagcccaaagtccttctggggcccctggtcatgggctaccactaagaaagaggaaattgctggcaaaatgaccttcaagccttcaagctccagccttgacccagaagagggtcattttatgtattctacttttctgccttagatttattgttttaaacaaaaggacaaacaaaccccctttatcaaatgaagggttaatgactaaaaaaaaatttgaaacctaccattctatatcatgataagaacaaaacaggagttaacaaaataaatgagttccaaaaatgtaacaaagcctatggggcctaagcctattccgttataaaatgaaaatataatcaatttggcaagattcgtaatttcctaaactcagtaatttatttcactgtgatatgaagcaattaagctgaggaacaggggttatcagaggcatagttaagagttcaaaaacttaataagcttcctgagtggcaaggcattaaacaaaatatttacatatctacgccaggcgaagtgtctcacgtctgtaatcccagcactttgggaggctgaggcaggcagattgtttgaggccaggagttcaagagaattccttgaaccctggaggcagaagttgcaatgagccgagattgtgccattgcactccagcctgggcaagagagtgactctgtctcaaaaaaaaaaaaaaaaaatttacatatctgaattttcccawtcatagtctaatttatttgaaaatatggggagaggccagatgcagtggctcacgcctataattccagcaccttgggagaccggagtgagaagaatgctcaagcccaagttcaacaccagcctgggcaccaaagtaaaaccccatctctacaaaaaatacaaaaactagctggatgtgtggtgggcgcctgtggtcccagctactcagtaggctaaggtgggaggatcacctgagcccagggaggtcgaggctgcagcaagccactgaactccaacc

SEQ ID NO: 551071 - DNA, 1315 bp, Homo sapiens
ttgagatccttcctccctctcctctgagccatgttggtgagattcacatttgcctttcttgcagtggccgccacaggacttctttctctcccctttctgaagtgcctgcagctgggagatgaacttggtcttccatgctctgaagttggcctcaatgctgccgtgcttgcttttaaccacgtcgcagtcgccctcccctcgactcatcacacgatgcacgccaagcatccagagccacttgtcaacatttttgccaacctgcgaggaaaagatagataggctaaaagcatggttctctaaatcagggttttccagactgctctgcaaaagcccaaagtccttctggggcccctggtcatgggctaccactaagaaagaggaaattgctggcaaaatgaccttcaagccttcaagctccagccttgacccagaagagggtcattttatgtattctacttttctgccttagatttattgttttaaacaaaaggacaaacaaaccccctttatcaaatgaagggttaatgactaaaaaaaaatttgaaacctaccattctatatcatgataagaacaaaacaggagttaacaaaataaatgagttccaaaaatgtaacaaagcctatggggcctaagcctattccgttataaaatgaaaatataatcaatttggcaagattcgtaatttcctaaactcagtaatttatttcactgtgatatgaagcaattaagctgaggaacaggggttatcagaggcatagttaagagttcaaaaacttaataagcttcctgagtggcaaggcattaaacaaaatatttacatatctacgccaggcgaagtgtctcacgtctgtaatcccagcactttgggaggctgaggcaggcagattgtttgaggccaggagttcaagagaattccttgaaccctggaggcagaagttgcaatgagccgagattgtgccattgcactccagcctgggcaagagagtgactctgtctcaaaaaaaaaaaaaaaaaatttacatatctgaattttcccattcatagtctaatttatttgaaaatatggggagaggccagatgcagtggctcacgcctataattccagcaccttgggagaccggrgtgagaagaatgctcaagcccaagttcaacaccagcctgggcaccaaagtaaaaccccatctctacaaaaaatacaaaaactagctggatgtgtggtgggcgcctgtggtcccagctactcagtaggctaaggtgggaggatcacctgagcccagggaggtcgaggctgcagcaagccactgaactccaacc

SEQ ID NO: 551072 - DNA, 1315 bp, Homo sapiens
ttgagatccttcctccctctcctctgagccatgttggtgagattcacatttgcctttcttgcagtggccgccacaggacttctttctctcccctttctgaagtgcctgcagctgggagatgaacttggtcttccatgctctgaagttggcctcaatgctgccgtgcttgcttttaaccacgtcgcagtcgccctcccctcgactcatcacacgatgcacgccaagcatccagagccacttgtcaacatttttgccaacctgcgaggaaaagatagataggctaaaagcatggttctctaaatcagggttttccagactgctctgcaaaagcccaaagtccttctggggcccctggtcatgggctaccactaagaaagaggaaattgctggcaaaatgaccttcaagccttcaagctccagccttgacccagaagagggtcattttatgtattctacttttctgccttagatttattgttttaaacaaaaggacaaacaaaccccctttatcaaatgaagggttaatgactaaaaaaaaatttgaaacctaccattctatatcatgataagaacaaaacaggagttaacaaaataaatgagttccaaaaatgtaacaaagcctatggggcctaagcctattccgttataaaatgaaaatataatcaatttggcaagattcgtaatttcctaaactcagtaatttatttcactgtgatatgaagcaattaagctgaggaacaggggttatcagaggcatagttaagagttcaaaaacttaataagcttcctgagtggcaaggcattaaacaaaatatttacatatctacgccaggcgaagtgtctcacgtctgtaatcccagcactttgggaggctgaggcaggcagattgtttgaggccaggagttcaagagaattccttgaaccctggaggcagaagttgcaatgagccgagattgtgccattgcactccagcctgggcaagagagtgactctgtctcaaaaaaaaaaaaaaaaaatttacatatctgaattttcccattcatagtctaatttatttgaaaatatggggagaggccagatgcagtggctcacgcctataattccagcaccttgggagaccggagtgagaagaatgctcaagcccragttcaacaccagcctgggcaccaaagtaaaaccccatctctacaaaaaatacaaaaactagctggatgtgtggtgggcgcctgtggtcccagctactcagtaggctaaggtgggaggatcacctgagcccagggaggtcgaggctgcagcaagccactgaactccaacc

SEQ ID NO: 551073 - DNA, 1030 bp, Homo sapiens
attcatgactaacactgcctttattcttttgtatgaataaactgatacggccaaaaaattcagagacattcacacacaaacccagcctaggaccctggaaggcaaaggctctgcaaacctgcagatgtgtaggaagctattacatatagggtttggggttcgagtgtgcagctttcctacaagcagcaacaatgaatgggacctttagttacaggtttacatctccttctctaagcatccaaatgcactaattattgccataataaataacaatgacatgattatagtgtgaggcagttttttctacttttagaaccaacctatagacaaagctcaggacacttaattatagcttcagaatacattgtaaatgttgtaaaaccttactttcttaaaaaagtaatataactcttcagaatacattgttagaaaactttaattcctaaaaaatataactcttcagactgcaatgtcaatgttacaaaactattttaaaaagtcatatacccagtactttgggaggccaggcagattacttgagcccaggagttcgagatcagcctgggcaacatagggagaccycatctctacaaaaaaaaaattaaaaattagcaaggtgtggtggcacatgctggtagtcccagctgcttgggaggttgaggtgggagaatcgcttcagcccaggaggcggaggctgcagtgagaggacacagcaccactgcactccagcctgggccacagagcaagaccctgtctcaaaaaataaaataataaaaaagtaatataactattcagaatatattgtaaatgttacagaagtttctttgtaaaagtaactaacatgaaatggaaagggggaaaaaaagcaaagggagggtaagggcatgcaattttttgtccttcatgggagaaagtaaataaataccaactaaagttgtggaagtttaattaggttactgagagttacaagcctatccaggagggaaactgatgggaccctctgcgggagcggggaggacagcaggaaaga

SEQ ID NO: 551074 - DNA, 1030 bp, Homo sapiens
attcatgactaacactgcctttattcttttgtatgaataaactgatacggccaaaaaattcagagacattcacacacaaacccagcctaggaccctggaaggcaaaggctctgcaaacctgcagatgtgtaggaagctattacatatagggtttggggttcgagtgtgcagctttcctacaagcagcaacaatgaatgggacctttagttacaggtttacatctccttctctaagcatccaaatgcactaattattgccataataaataacaatgacatgattatagtgtgaggcagttttttctacttttagaaccaacctatagacaaagctcaggacacttaattatagcttcagaatacattgtaaatgttgtaaaaccttactttcttaaaaaagtaatataactcttcagaatacattgttagaaaactttaattcctaaaaaatataactcttcagactgcaatgtcaatgttacaaaactattttaaaaagtcatatacccagtactttgggaggccaggcagattacttgagcccaggagttcgagatcagcctgggcaacatagggagaccccatctctacaaaaaaaaaattaaaaattagcaaggtgtggtggcacatgctggtagtcccagctgcttgggaggttgaggtgggagaatcgcttcagcccaggaggcggaggctgcagtgagaggacacagcaccactgcactccagcctgggccacagagcaagaccctgtctcaaaaaataaaatrataaaaaagtaatataactattcagaatatattgtaaatgttacagaagtttctttgtaaaagtaactaacatgaaatggaaagggggaaaaaaagcaaagggagggtaagggcatgcaattttttgtccttcatgggagaaagtaaataaataccaactaaagttgtggaagtttaattaggttactgagagttacaagcctatccaggagggaaactgatgggaccctctgcgggagcggggaggacagcaggaaaga

SEQ ID NO: 551075 - DNA, 667 bp, Homo sapiens
gtaataagttaccatctttgttcctttattgtcataggatattgtcctaggatagaacaattattctattgttctatcctaggaactattaatattattaatagaataaactattaatagaataattgtctattctattaatagaataaactattaatagaatatttgttcctcatagattaatttttgagactttttgtggcctcgtgacatttttggtttgttcatttatatttttaattaaaaaaattaaaaaaaattttattgataactttaaaatattatgactatgaagttttagctctaaaaatatgtaaccaaagacaatggcccatatacactaaagtcaatgtaagatatctaactagagatcttgtaaatttttgttcatatttataccataatgtacatgaaaggaaacaaaggcartaattgatgacttcgtgttaagaaacttaagcctaaattaaggcaacatttcattacagcttagtcttcagaattctgtctggtttgcctgattacggtgatatactgaaattctgagattcatttattaattcattaatttatccagaacatttatttagtgcctgacacatcgaaagtgttcaataaatgctcattacaatgttttatctatacacacacatccacacatgcatac

SEQ ID NO: 551076 - DNA, 667 bp, Homo sapiens
gtaataagttaccatctttgttcctttattgtcataggatattgtcctaggatagaacaattattctattgttctatcctaggaactattaatattattaatagaataaactattaatagaataattgtctattctattaatagaataaactattaatagaatatttgttcctcatagattaatttttgagactttttgtggcctcgtgacatttttggtttgttcatttatatttttaattaaaaaaattaaaaaaaattttattgataactttaaaatattatgactatgaagttttagctctaaaaatatgtaaccaaagacaatggcccatatacactaaagtcaatgtaagatatctaactagagatcttgtaaatttttgttcatatttataccataatgtacatgaaaggaaacaaaggcaataattgatgacttcgtgttaagaaacttaagcctaaattaaggcaacatttsattacagcttagtcttcagaattctgtctggtttgcctgattacggtgatatactgaaattctgagattcatttattaattcattaatttatccagaacatttatttagtgcctgacacatcgaaagtgttcaataaatgctcattacaatgttttatctatacacacacatccacacatgcatac

SEQ ID NO: 551077 - DNA, 667 bp, Homo sapiens
gtaataagttaccatctttgttcctttattgtcataggatattgtcctaggatagaacaattattctattgttctatcctaggaactattaatattattaatagaataaactattaatagaataattgtctattctattaatagaataaactattaatagaatatttgttcctcatagattaatttttgagactttttgtggcctcgtgacatttttggtttgttcatttatatttttaattaaaaaaattaaaaaaaattttattgataactttaaaatattatgactatgaagttttagctctaaaaatatgtaaccaaagacaatggcccatatacactaaagtcaatgtaagatatctaactagagatcttgtaaatttttgttcatatttataccataatgtacatgaaaggaaacaaaggcaataattgatgacttcgtgttaagaaacttaagcctaaattaaggcaacatttcattacagcttagtcttcagaattctgtctggtttgcctgattacggtgatatactgaaattctgagattcattwattaattcattaatttatccagaacatttatttagtgcctgacacatcgaaagtgttcaataaatgctcattacaatgttttatctatacacacacatccacacatgcatac

SEQ ID NO: 551078 - DNA, 701 bp, Homo sapiens
ctcctggaaccatcagtgccctcatgaaagagccccccaagagctccgyggcggaagaagctgatcccgcctcccaacaccactgtcttaggggtgagaattttaacataggaatttggggggatcacagacattcattgctatgggtgggaccacttggtgcgttgcccttggggtggcggtgtggtcagtggtccattcctgcccagcgccgagcagcggtctgtgcgtggggtctttgcacccgtgcacctgctgaagggtctctggagctttggctttttggcttttacgagtaaagctgccgtggtgcttggtgtgcggtgaggagtggacagaaggctctgtcctggcaggtgccctgcagtggcctgagaccgggagatgagggccggcaaggggctgtggacgagtccagagtgaggcggcatctcggaggggctcacacattgtctcaggaggagtgggctggcatttctttccagtgggcagctgttgaagattttggagccaaaagagcgttccagctcagatgtctttcaggtggagtgtggctgcaggtggggcaggctgggtcagggtggagccatgtgggctgaggcccgagttggggctgtggctttggggccacatggctgccggtcgggtgggagcgagtctctgctgaccagggccctggatgttgagccccagccgcgggg

SEQ ID NO: 551079 - DNA, 1456 bp, Homo sapiens
cgtttgttaggtttgagcacaaaaataatgcttgcttggtaagtagcatgatcactttttgttccttaagacatttaaatcaatttcctatacaaccatccattttaatgtatttttacattattcttttcttattcaactactctatagttaagwttagtaatttgtaccacaatgagataccatctcacaccagtcagaatggtgattattaaaaagtcaagaaacaacagatgctggcaagtctgtggagaaataggaatgttcttacactgttggtaggaatgtaaattagttcaaccattgtgaaagacagtgtggtgattcctcaaagacctagaaccagaaatgccatttgacccagcaatcccattactgggtcaaaggaatataaatcattttattataaagatacatgcacatgtatgttcattgcagcactattcacaatagcgaatgcatggaatcaacccaaatgcccatcaatgatagactgaataaagaaaatgtggtacatatacaccatggaatactacgcagtcacaaaaaggaatgagatcgtgtctttgcagggacatggatggagctgaaagccattatcctcagcaaactgcaaactaatgcaggaacagaaaaccaaacaccacatgttcttacttataagtagaagctgaacaatgagaacacgtggacacagggaggggaacaacacacactggggcctgtggggggtgggatgtggggagggaaagcatcaggttaaatagttaattcatgcagggcttaatacccaggtgatgggttgatctgtgcagcaaaccaccatggcacatgtttacctgtgtaacaaacctgcacatcctgcacatgtatcccagaacttataattaaattaaattttaaaaacttagtaatttgaaatttcctagaaagtcatttatttcaacaaaattttctatgataatatatctatattttctaccacttttaactttttggaatacatgtatattctccttttttatttctaatgtttttacatgtgttttctcactctgtttcacttaagtaacttgtcagatgtctttgacaaattctaattcttagacttggcaatgtactgtctgttttctgatttactaagttatgttgtatctttatcaatatctttctagtttatttcattgttgtctttctaattattgtgagctaaaagcttaattcatgcatttttattctacattcaataatgtgatatttaaggctatgtgttttcttctgaatatagctttgagcatacatcataaggttgatatatggtattctcattgtaattattttctaaatagtctccaaatatagttttgatgtcctctttgatctaaaagataattcagagcggtcttaataattttagaaattgcccatcaaaattgtagttacccttctttgttga

SEQ ID NO: 551080 - DNA, 945 bp, Homo sapiens
gtgttttatgatgtggacaagctggagatgcagagcatcagacaacaccttgatggacggaatataaaggcctagtatctggcttgtgttttttgggtataacgtggtgactccacagcctctccagctcaggacagcagggctttgaaagcagagaatttgggtatgaatcctagattttccaatgactaactctataatatggaggagttctatctgattatcctcgaatcatcctttgtaaaatggaataatatgcttctcttccttcgatttgttgtaaggagccaatgaaactgtggccataaagcccttagctcttactaagaaatcagtaagatgtagtgtcaatgagaatgctttgtgcttataggtgccaagcrcatatgacttgtttttgaaaatctcctcagagaaagaaagagaatgaacgcaggtctaaaatatgttgataaaggggggaaaaggatactctactgctgacatcaggcacagcatgatagagatgctaggaagaccccatctggcccatgtcacctgggtttatcaggtttctcatcagatttcttcccttcctaacagtgaccctaaacatcaaaagattttggggtgagttctctgatagaaatagacagggaggccaggtgcagtggctcacacctataatcccaacactttgggaagccaaggtgggcggatcatgaagtcaggagatcgagaccatcctggctaacactgtgaaaccccatctctactaaaaatacaaacaattagccgggcgtggtggtgggtgcccgtaatcccagctactcaggaggctgaggcaggagaatggcgtgaacccgggaggcggagcttgcagtgagctgagatggcgccactgcactccaacctgggcgacagtgtgagactctgtatcaaaaaaaaaaaaaaagaaaagaaata

SEQ ID NO: 551081 - DNA, 1221 bp, Homo sapiens
gtagatctgtgattatgtgcatttttaaagttgataactactgccagcttgtcatacattccctaaaacggtatgtgaatagagtttgttttccacaatctcaccaacattgggtatcatcagaattttgattttgcgagtcgggtaggttaacaactgctatttcattgttttaaatggtatttatttgatcttgtttctcggtattgcaaaatcaaacttgaattggccctgtttttttgtcctcattaattttacaaagttatatctaaataagttgtaaagaaataaactttgtcattttcttctaccaggtgggatcagcaatatgtaatccaactcacctccatgttcaagtaagcatcatcttttccyttttctttgtatatcctgctttgtgaacttacttgctagaaattaaactatagcaaacgtaaacatcactctctcctgattgtaagaatattagtagttatgttttctgttacagattcacagattccctcctcactcctgcctcctttttggctttacttacttatttaaaacataactttattttttttataagaatgactttgcttaggtaaggttattggttcccttaaaggttcttcattagagaaaaatcaaaagggacagttataataatctattatctctttaattctctgctcccaagtttcatttcttaaaatatgtttaatggaattttaaccactgtaaagccctgaattgaatttctgaaaacaaggcagttagacactgtctatagcctttagaatctttgatccacagggatgtccctctgactgcagaagaggtggaatttgtggtggaaaaagcattgagcatgttctccaagatgaatcttcaagaaataccacctttggtctatcagcttctggttctctcctccaaggtacaaatggaaaattgtttctccttagttctggtggtatgaccagttatgaccattcaacttattcatacccttggtttatatagcagagcaaacatagccgaacatagatgctttcatttcacgtgagcaaacatagccgaacatagatgctttcatttcacatatagtggtttggtctggtaaaaggatcatacttctcatccaaggaaaacatgcattatctcttgtattgccacattttctttgcggaggtaaaagggataaagatctcagaaagggtagactataggccccat

SEQ ID NO: 551082 - DNA, 1221 bp, Homo sapiens
gtagatctgtgattatgtgcatttttaaagttgataactactgccagcttgtcatacattccctaaaacggtatgtgaatagagtttgttttccacaatctcaccaacattgggtatcatcagaattttgattttgcgagtcgggtaggttaacaactgctatttcattgttttaaatggtatttatttgatcttgtttctcggtattgcaaaatcaaacttgaattggccctgtttttttgtcctcattaattttacaaagttatatctaaataagttgtaaagaaataaactttgtcattttcttctaccaggtgggatcagcaatatgtaatccaactcacctccatgttcaagtaagcatcatcttttcctttttctttgtrtatcctgctttgtgaacttacttgctagaaattaaactatagcaaacgtaaacatcactctctcctgattgtaagaatattagtagttatgttttctgttacagattcacagattccctcctcactcctgcctcctttttggctttacttacttatttaaaacataactttattttttttataagaatgactttgcttaggtaaggttattggttcccttaaaggttcttcattagagaaaaatcaaaagggacagttataataatctattatctctttaattctctgctcccaagtttcatttcttaaaatatgtttaatggaattttaaccactgtaaagccctgaattgaatttctgaaaacaaggcagttagacactgtctatagcctttagaatctttgatccacagggatgtccctctgactgcagaagaggtggaatttgtggtggaaaaagcattgagcatgttctccaagatgaatcttcaagaaataccacctttggtctatcagcttctggttctctcctccaaggtacaaatggaaaattgtttctccttagttctggtggtatgaccagttatgaccattcaacttattcatacccttggtttatatagcagagcaaacatagccgaacatagatgctttcatttcacgtgagcaaacatagccgaacatagatgctttcatttcacatatagtggtttggtctggtaaaaggatcatacttctcatccaaggaaaacatgcattatctcttgtattgccacattttctttgcggaggtaaaagggataaagatctcagaaagggtagactataggccccat

SEQ ID NO: 551083 - DNA, 543 bp, Homo sapiens
tttctcagattactcacaaaattgataaaatctaaaatcatattgatcaacagtgcagttcaactgcattttctatggagatatttgctatgatattctaaatcttccactggtcttgtaataataatggcattagagtaataacagtaattcttcattcagtctagttctatcagtgcagggttctacttacagtagctacttaatgaattctctctgaawaaagcatttcattgcagacaaaagcttcttgatttttaattgaaatttaattgcttcatccccagagttaaaagatgatagtaaaagctggttgtaaaataaaatcataattggtttcaagatagacagcctctcatcagccaaatgtttcttgcaatgttgtaatatagaaactcatcatcaagcaacttaattttcatcacagtgtagtgtacatcaggtagtcatatcctaaatgtttgagtaatacgcatctaactgccatgaatttttatgagtatcacacatttagaaaataagttttgaatagactggagattt

SEQ ID NO: 551084 - DNA, 1675 bp, Homo sapiens
ggtctgagagacagtttgttataatttctgttctattacatttgctgaggagagctttacttccaactatgtggtcaattttggaataggtgtgatgtggtgctgaaaaaaatgtatattctgttgatttggggtggagagttctgtagatgtctattaggtccgcttggtgcatttgccttggcccattttctaccttaacatttgcttgagttcttgcttctttgcagcaagcccttgaatgcttgtctcactttttccttaatcaaacttgcttttgaagacatgattttagtttcctgactgaatgcctttggtcctgttctttttaggtaaagtgaaaatagctaattagcatctcttttcttcgtaatcttagagttttccatatgggttatggagaggattcagaattattattatttttgaggtaattatccaagttgattagggaagtctttttttatttttaataacctctccctgtttgttaccaatgagtgttcagatgccatctggagctgttgacagagatgaattgagtgtgattccatgatatgattaggtcatatgattggccaccagaactgataatcacatcattaacagcacatggacagaggaaattacctgcagtgagaggagtgaatggtgaatatagagtatgacctttttccactctgacctttagcatgcaatgtctcaagcacaaagtgagaaagtacagatgcaaaaagaagacctcaacgttgtgtcacacactataaatggatccatagctccagggttggcttctcactgtggctaaacaaatacacataatacctgaccattggggaaaatacaggaacaactaccatctgctgtgagtttactcaatcaaaggtgttatgcaatatatatgtatattttaaaattctcacaaccactgtatcaggcattactattctgcccattgtatagatgacaaactgagtctaaaagatgttaagtaccttgaagttcacacaactgatgartggtagaaccaagcttcgaatccaagcccactcagtgtccatcagatttgctaattccaagttgcaactggtagatggaaccatgagaagggcagagagaaaacttgaaatttgtggggttttggtccacttatttttccttcatcagaaacagagctggctttctcagggactatcagctgagtaaacaaataataataaaactaccaaaccgagtatttatagtttacctccacatgtaagatgtcatcatttgatcctcccacttacccttttaggaaaaaagagttttattaagtaattcaggaagggctacctttggcctaattctgtcttacccattgagcacaaagcagaatggaaagaagctacaaatgtggatggggcagagtcagatgtcaatggtatagtgataataataattactacagcagaaacaataagaaggataatattcctttgatatttcactttgagccaagctcagagctcagcactttacttattttattattttaagtcaacttggctgaagtataattcacttcaaatgttttgcatacatctgtagtgtaccattcattgagtcgtgacagatatacacacttgtgaaaccactaccttgatcaaaacacaacatttccatcatccccaaa

SEQ ID NO: 551085 - DNA, 2496 bp, Homo sapiens
aatctggtctgttgttgactgcaacatcattgtgcagcacatgactgtatattatacttcaacacaaaagtttacttaagaaaataaatagcggccaggcttggtggcttacgtctgtaatcacagcactttgagaggccaagtgggcggatcacctgaggtcaggagtttgagaccagcctggccaacatggtgtaactctgtctctactaaaaatagaaaaaaattagtcgggcatcatggcggttgcctgtaatcccagctattcaggagcctgaggcgggagaattgcttgaacctgggaagcggaggctgcagtgagccgagatgacaccattgcactccagcctgcgtgacagagcgagactcggtctaataaataaataattaaataagtaaatagctaaacctgctgacgctactgcatgagagaattccagggagagcttggaaactgagcatctctttcggtggtatcttctgctgatccttagttactaggttttccaaagtcctaaaacctgatgtcagcaaccagagctgtggggacagaggaaaagagggaggtggcttagtaggatgagtgtccccaggaggggctgagagtgtcactgggcacacagaagctctgcaaagggatggctctagccctgcctgagcggaccaaagagaccactgtctatgttgagctgaggttggctccccacaagccttccgagaaccttgatctgctcagataaaccccttccttagccctctagaataaaaaggagagagcatcttattgtaggctgtaggcaggggtgggtggaggagctgaattgggcccactttaggctgggcattggatcccagtttcaccagtgtctttctacattgtttgagctctcccagattgtcagcttcctgctggccaagctcagcaaccctcagggcatggcttggcacttgagaagtttccagtgatgttcacctgagtgggggtgggaaggcaggagttaatggccccacctgcaccatgtctcagggaggagagctcctcacccaaatgtctggatgaaaggcaaagaggtattcactggaccattcaatgccagagggccctaagagtgccttgtacacagtaggtacttccacacccttgttgaaagtctagatggaatgaagtgtccggtcctgggtctgccttaaagccaggtaagaacctactctgtagggtggagaggcctcaaggttaggcccagagaaggcaggacctgccctaggccacacagaagtccctggtggtggctgagttcttggagaggacagtggcagcttgaaaaactagtccatgaagtcagagagaagcacataccttcctattgccctgccttctccccacgtacagatggcaaactgagtcttagaaggcataggtgcctagtccctgcctcacagctaatctgctgaatcttggataagtgctgtgctatcacgcccactcctctaatctccctctccttccccagtcctgagtttcttcacaaaagcatcactgcctactcacacccacccaccctttgcrtgcctctagaataggggtcagcaaactgtttctgtaaagggtcagatggtagatctttttggctttgaagtccataggcccatagattctctgctgcagctcctcaactctgccttataatgtgaaagctgccagaggaaacatgtaaatgaacaggtgtggctgtattcctttatttatggacgctgaaatttgaatttcacataatttttacatatctggctgagcgcggtggctcacacctgtaatctcaacattttgggaggccgaggcaggcggatcacttgaggtcaggagtttgagaccagcctggccaacatggtgaaatcctgtctctactaaaaatacaaaaattagccaggcattttggtccatgcctgtaatcccagctactcgggaggctgaggcagaagaatcgcttgaacccgggaggcggaggctgcagtgagccgagattgtgccactgcattccaacctgggcaatagagtgagactccgtctcaaaaaaaaaaaagtaagaactattcttagctcatgggctatacaaaaatgggtagtgggccagaattggccttcaggccacagttggccaattctctgttgtagaatgtgccatcctggggctcagattccccataatcactgaggctgtaagtcctgtcctaccatacgggtggtatgaatggcgaactgtttggtttgctcaggaatgggggtttcctaggctttagattttttggtgctaaaaccagtacagtcccaggcaaaccaggacagaacagttggtcaccctaggtagtaatcattaacccagagagggccaggcttcaggagccagctggccagggttcaggtgtggcccccagggccccctccaggcattgccttgtccttgtggtttgtggtagggccttgtcccattggggctg

SEQ ID NO: 551086 - DNA, 838 bp, Homo sapiens
gagatatctttgagcaccctaacatggagatgtaagggttaactctgaatcagggtgactggcaaggaccactatcagaatcagccaggtatttattgagcatctaggcacaatgctacttggtgacctgcttcttaggaactacaacgtgagcctttattttgcctcgtctgcaactccatccttagcctttgcgttgtcagcctgccttcctttgccacacttgagtcttcctaaccttaccccttaatagcaatcacttcatcatcatgcgctttcccactatcccttctccctgtctcttcccacccatgaaaacaaatttagaaaatgaagggaaataaacaaacaaacaaaaagtcaccattatgatgggattgaggcataatatctgagtaagaagggaataaattagttttccttgacagtatatactgcctgtttctgtccatcctcttatttgcttctttttctttgctcttccactccagtccttaagcgaktttagttttattcgttcctcttgtcccttttcatgataacaatgtgtcatagtctgctttaaagtttttcatacttaccgatgttagttttattgctagtcattcatccctgatgagcaccaacaaattgtatgtgagagatggatttggtagggtttggatatgaggctggagaattgtgtcactgtgaagagagagctcccctggagatctcagtgtaaagttggaggacacctagaacagcaccacatttacattgttcttcagtatcagtaaaagagttatttatactttaaattcaagttgttaaaaatggaggcattccacatgaggct

SEQ ID NO: 551087 - DNA, 838 bp, Homo sapiens
gagatatctttgagcaccctaacatggagatgtaagggttaactctgaatcagggtgactggcaaggaccactatcagaatcagccaggtatttattgagcatctaggcacaatgctacttggtgacctgcttcttaggaactacaacgtgagcctttattttgcctcgtctgcaactccatccttagcctttgcgttgtcagcctgccttcctttgccacacttgagtcttcctaaccttaccccttaatagcaatcacttcatcatcatgcgctttcccactatcccttctccctgtctcttcccacccatgaaaacaaatttagaaaatgaagggaaataaacaaacaaacaaaaagtcaccattatgatgggattgaggcataatatctgagtaagaagggaataaattagttttccttgacagtatatactgcctgtttctgtccatcctcttatttgcttctttttctttgctcttccactccagtccttaagcgagtttagttttattcgttcctcttgtcccttttcatgataacaatgtgtcatagtctgctttaaagtttttcatacttaccgatgttagttttattgctagtcattcatccctgatgagcaccaacaaattgtatgtgagagatggatttggtagggtttggatatgaggctggagaattgtgtcactgtgaagagagagctcccctggagatctcagtgtaaagttggaggacacctagaacagcaccacatttacattgttcttcagtatcagtaaaagagttatttatactttaaattcaagttgttaaaaatggaggcrttccacatgaggct

SEQ ID NO: 551088 - DNA, 555 bp, Homo sapiens
ggaataaattcgggacacaatgtcatctacccacaaaggctcatagttgttattgcattgcactgctcagcctctgagctctcttccttccttctgtgtaaaaatttcctcttgccgcattcctttgttccrccgctgttcgacaatcctctgacctcagggcactttcctgaacactgatgacttccaaagcactaagtccactcatcctcttctgatggtggttgctccccactctactgggctccagcactggactattggacatcacctagccaagccccctaaacccccatacagacttaacatggttccatgccgactgtcacacaggaagctcttcagccacgtgctttgttccttttagcgtctaagaaaattattgggaaaagtcacgaaactagtttattttagttcgccataaagagttgccaattctcataactgaattagttattgtaccctgaggaaccttgattcatttcttattgataaactttcctttcctgtagacccactatctccaaagtgctgacaggatactgataaatattc

SEQ ID NO: 551089 - DNA, 555 bp, Homo sapiens
ggaataaattcgggacacaatgtcatctacccacaaaggctcatagttgttattgcattgcactgctcagcctctgagctctcttccttccttctgtgtaaaaatttcctcttgccgcattcctttgttccaccgctgttcgacaatcctctgacctcagggcactttcctgaacactgatgacttccaaagcactaagtccaytcatcctcttctgatggtggttgctccccactctactgggctccagcactggactattggacatcacctagccaagccccctaaacccccatacagacttaacatggttccatgccgactgtcacacaggaagctcttcagccacgtgctttgttccttttagcgtctaagaaaattattgggaaaagtcacgaaactagtttattttagttcgccataaagagttgccaattctcataactgaattagttattgtaccctgaggaaccttgattcatttcttattgataaactttcctttcctgtagacccactatctccaaagtgctgacaggatactgataaatattc

SEQ ID NO: 551090 - DNA, 754 bp, Homo sapiens
tattttatgtaattctgactaccctgtaaagtaggtggtagtattatgcccatcctagagatgaagaaactaagtcttggaagggttaaacagcttttccaaagccacatgtttaattatcggcaaaactgaaactgaaacctaggtttgcctgayatcaaatctattttcttaaactctgtactctacttctttgctatttattctcactgggtctttaacccacatggagaaacatggaaaaatttttctatcttgcctcaagattctgcccagaagccctaacattgccagcgccagaaattggttgagggcagtattgctcagaataagcttgtagcactagaaagccacaaaactatattatccactaatattaatagaaccttcaagaattataatgaagcctcctttttatggtttccagcagtgtgaataacacagaagcaaaggtaatttattttcacctttctttcccttgctaagtaagaagtaactgtgtcttcaggttgcatttttaaagacaatctcaagtttttcttgttctttgtcatggacctgagggaaggttcccacaggtcctagtctatgcctatttgatgcttcttggatatttgcccagtcgcacaattaggtattgaacttcgttttgtcataacacataaccactgcaggagaaaaataatcccctgaatggaatgacctgtgcttatagtatagattttgctggaacaaggtcaacaaactgcagtag

SEQ ID NO: 551091 - DNA, 998 bp, Homo sapiens
agagagagagagagagagagagagagagagagactgtgtgtgtgtgtgtgtgtgtgtgtgtgtgtgtgtgtgtgttttaattacctcttctttttgccttggcagaaaaagagagagagagagagagagagagtgtgtgtgtgtgtgtgtgtgtgtgtgtgtgtgtgtgtgttttaattaactcttctttttgccttggcagaaatagtcaaactgactaacgtattcaatcattttaaaatagcaaaagatatccaactgaaaaaggtctataaacacatgatttctgcagctaataataaggaatgaataagaaatcttcaatgtgcaattttcaattatatttcactctattttaagtgccagtttcacagcagtcaaagtgtcctagggtcatgttgtagagaccaataagacgccatcatttatgactcggttatttccagaaaatggtatctgacccaatagctttgggaataaatgtgccatgtggtagttaaagtaccagttcagctcacgaggtgtgcatgtgtcacatatagcatgttcttatttgtttaaaactaacaatcactgtatcagacayacattctacatcccccaggatgacagaaaacatcctaaataatcaagtaaaccaattataaggaaatctgtaattttctgaattgggtagctaaggatattaacactgaggagatcaaatctttttagaaaagtctctgaaacattttctttcattttcccatgaatggaaagataaaagtaatgtatacttttgctaggacttcagtctgatgcaatttgaaataatggaaatacgaaatgtcaaaacaaaaataccttttaaaaacaggtacctatccacccttcgcatgtcacactagaataaccacatataatccacgaaatttgaatcttcgagaaggtgctgtaaacgtttgtttttaaagaaggtccttcatttctgtctttccagagccttcagaccactttca

SEQ ID NO: 551092 - DNA, 1244 bp, Homo sapiens
aggtgctcataagacattggttctccacatttcaccccatgtggggatggatgctccgtaataaactgtgctcatcacagtctgaatttggaaaatgcgattacccttcttcttggaatcccctccaggaaaaaaataataaaacactttctttaatttgcatatacttgatagaattaaaatctggatttgaatctgagtgagatttacctagtgatataagtgatgtatcagcagcctatatagctttgaaacagtttcttaatctttctggccttagtttaatcctytgtgaaatgggaatgaaaatgtctatttcacaatgtggttgcagggtacacatgaaaggcagctatgctgaaataacacaaatggtagaaaattgcttttgatatcacattaattgagcatatactaagtgttaaaacactattcttttcacaaaggctaacaggagctgggtcttgtatttaagaggtctacattctaccacaacccacgaggacaaacttcccacagtgacaggattgttcaaaaggttaatgagattcattcagtagttttttctttctttctttcttttttgagacagaatctagctctgtcaccgaggctggagtgcagtggcacgatctcggctcactgcaacctccgcttcccgggttcatgtgattctcctgcctcagcctcccgagtagctgggactacaggcatgcaccaccacgcccaagtaatttttgtatttttagtagagacggggtttcaccatgttgaccaggctggtattgaactcctgagctcaggtgatccccacacctcagcctcccaaagtgccaggattagaggtgtaagccactgcacctggtcagtttttcttgattatcatgttccaaggcaaggagtgggggaagaaagcaagggaaaacttcttgtgtttggtgtgggaaggtttaggatagtatccagaaataaaataaaataaaataatctcaccacgcctgtaaattcctggacagcaaggctgatcagttatttgcacatccagcagctgcagcatgtcagtggcgactgccagggggagggatccagactgagacagagtccccgacacctgggtcactccatttgaggagggtgacacattcggtgacagagtggaaaagagtggagctcaatcctcagtctcgtagcgtttccttgcccccatacgtgtatctcaccagctcctgcctgactgacctcga

SEQ ID NO: 551093 - DNA, 3433 bp, Homo sapiens
ggaagaacaaatgagtcccagttaggtatagacatgaatttccatggccttgagttcaacttatttcttccatttagacaccgcaaatgtctgaagaaagaaatagagctgggtggggcatagtggctcacacctgtaatcccggcactgtgggaggctgaggcaggaggaacacttgagctcccgagtttgagaccagcctgggcaacatagtgagaccctgtctccacaaaaaaagttttaacaacttagccgggtgtggtggagcatgcctgtaatgccagctactcgggaagctgcagcagaaggatcacttgagcccaggaggttgaggctgcagtgagctgtgatcaaaccactgcactccagcctgggcaacagaacgagaacctatctcaaaaaaaaaaaaaaaaaaaagaaagaaagaaaaaagaaaaagaaatagatccagggttttaccaaaacctttgctgcagaaactttaaaatgacattttaaaatgggattacaaagaccattgcaattgctgagaacacaggcaaccacctaaatgctcagcttggagtgtgcacattctccaagagtgtgcacattcctccaagaataaaagaacagagacaccaatgtcactatttcacacgcagcaatagccacatcttcactcagccgggccctccctgcccaccaccctatccaaggatgggaattgctgacccagatccaagtcacgccaggaaaggcaagaatcaggatccagaccagtgggacaccaggagagtttcctctatccagaaggaatttgaacctcgccaccagcgtgatttccctacaaacatacccaatgccacactccactactagagggtctcccgtgatgctgtagcccctacagaacacaatccagctcacctgcaccaacttattctcccacctcatttcccagagcatactccagcactcggtcacatgcgctagatggacaatcccacacacgcccttcacacactcttcctgcctggctctggctcctgctgcctgctagccttggtgtactcctccctcatcttcacctggccaactccttactcatcctttaagatccaggtggagccattcacttctgaaaagcctcctcgcctcacaccccaccttctccatcccccagatctttgcccatatgcgtaactccccttcccacacctgcctgttgttctcaaacttcagcaggcatcagaaccaccgagcaggtttcttagaatacagtttctaatttgatgcatctggtgtgaggcccaagaatttacatgtctgacaagctcccaggtgatatggtgggtgctggtctggggatcataaaagctaccccacccaaggcaaggatcatcactttttatcattgtaatttccattcttttgtacagtgactatgcattcagtcaatatttttggaactcaagtagactgaatgccacaaacagcttagtagaccagacatctcagactgccttccagatgactataggaagccccaggtgtgttttgtttggtctcactatgctttcaatttttaaacaattgtcagcccacatttaaaaaccaagagatttcaaatagaaatacatattactggcttccttcaaattactggggcgattggaacacaaggcccccgtcccacatgacagccatggatcaacactgagatggtccctcggtggctctgcctcctggatattcagaatgcaactctatgctgactattgttggactatacactctgcatggtctagaaggcaggtgaaaacagaacctcttaaagggcttaaagactgaaactaaaattcaacagatgctagcactacaaaaagtgctgtcgcccggctcgtcaagcccttctgtccccagtgcacaactgcccagatgcgtgtgacagtccaacagcacgctgcaggcctgttyggacacacccaggcttctccactggcacaggagccctcaaacactgctgcttgccttgcatgtttaaaagtatacagcaagctttcacaatacagtagatgttccgtttatcaggtgcaattagagcttaaatgtggtgagatcttataagaatgattatgtaggtttatggaaagttatctatgccatactgctcacaaaacacagattctagttcagaatgcataaggattctattgacgttcagttgcgtgtctaggctacatgtgtatataggcacagagggatgagtagaagtgtggtcaccagatatattaacagttatttctcctgtgtggtggcatttgagaaaatctgtaacttttgaaatacttttctgcataaactcaatagtttatgataatcaggaaaaaatgtttttattagagggtataaaacaattggctattgctctctttcaaaatatacatattattttggatatgtttgtatatatatgtacatgtgtatgtatatgtgtgtatgtaaaaaactttttatacatacacaggtataaatgtttatactatttttatacatacacggacacatatatacattttatacacaagtatatatgtaaaaaacatgtatatatatatataaaatatgttttagattctgatttaagggtagtcctggatcacagaattcaaggcacctgccatctctagtccaagagggctccttgtaagactcaagaaatgcatctcttacccctctctccagggatcccacacattttaggtcagtggtttccagccctggacacacattggaatcacctagggaatgttacaaaatattgatgcccagaccacaccccagaccaattacacagggcctctaggggtaggactcaagcatcagtgttttttaagcccctgatcccagtgagcagccgaagttgagaagcactaataaatggtgcaactccgtacatctttaccaaaggcaggaggacatggctttgattccttcaaaaataattacccctattcacttcttcttttcaggatgctgttgctttgtcaaaatcctgaatcgagcgaggtatatctctgctttaagaaaacttcaaccattaagatgcaaacctaactatggagacctattagtgggcaactctttgcattgtaaacggttctttataaaaggattcacctcacattgcctctatccttcagcatatgtggattgagcaccacctgggcgctgggcagtgaactagactcaaggagggttgcaacaatggattccacccaacctggacatacaagcaagtaagggaggcaaactgtgcctgtcaatctgggtttatccaagtgtgatcagctagggaagtgacttgatgatgatgatgatgatgatgatgcaggttccttggtcctgtggcagatccactgggtcagaatccctgcaagtgaggacagga

SEQ ID NO: 551094 - DNA, 1386 bp, Homo sapiens
aaggaaagcaggtggggagaatggagaatggggaggaggaggtgttctttctacagtggattattgaagcaaaatattaacaaggctggaaaataaasagccatctacctagacagtaagtggttaaagcctgtttgaaaattacttacaaagagcaacaagcattaccaggtctccctgccctaaatctgaatcctaagtgttcagattttagagaaacttttaaaaatatacaatgctgggagatttataaactctcaacacatcacagaaaatgttattaaagaatgttaagcataatagggcaaaattgtttgttttgcattgaattgagatctgacctcgaaaggagatgctcaaggttcccaagttggctaccccacctggggaggacagtgccatttactagtctcctaagtagatgcacatcattttacaaggcctcaaacatttggggccagctgcctttcctgtccactcagcccatcccacccacctagtgaaatgaatcacaaaagctttttaaactgctgctcgatttgcttgtcacagactctggccaagtgtcctccagggaaacaacacaggctaattgattgcacaaagaactgagcacatcctgggaaagctggaagtgccataggcttgtagggaaactgaggtacagaacatcagtgggccaaccaaataattgttcttgcaatcacttcatcttctgctgaaacagagcacatcgccccacacactccagactgttttcttgagcacccttccagcaccttcaggtccaacactttgcattgatctttgatttccttttcactttccgcatctccctcctgcatgaccagtcaatgatacccatctagtcctccttcacattttccttgccttgtccctatctaatttcccctgtgaaaatgtcttctgcagacccttattatttttcatgtagacctaatagcagccaatacagtgtagttgaattgatttgtgggtttaacgacgtgtaccaaggtgtatgtctaccccaaaactgtacatgtgaccttatttggaaaaagcgtctttagcaatgtaactaagctaaggatcttgagatcagatgatcttgggttaaagtgggctctaaatcttgggttaaagtgttcttctatgaggaggctgtggaaaagacccatgtgaagatggcggagattggagtgatgttgtcacaaatcaaggaacacctggagccactaaacgctggaagaggcaggaaagaaatctctcctagaggcttgggagggagcacggccctagctaaactttgatttcagacttctggactccagaacggtgagagtaaatctctgttgtattcagccagtacgtttacgtttgtgg

SEQ ID NO: 551095 - DNA, 1386 bp, Homo sapiens
aaggaaagcaggtggggagaatggagaatggggaggaggaggtgttctttctacagtggattattgaagcaaaatattaacaaggctggaaaataaagagccatctacctagacagtaagtggttaaagcctgtttgaaaattacttacaaagagcaacaagcattaccaggtctccctgccctaaatctgaatcctaagtgttcagattttagagaaacttttaaaaatatacaatgctgggagatttataaactctcaacacatcacagaaaatgttattaaagaatgttaagcataatagggcaaaattgtttgttttgcattgaattgagatctgacctcgaaaggagatgctcaaggttcccaagttggctaccccacctggggaggacagtgccatttactagtctcctaagtagatgcacatcattttacaaggcctcaaacatttggggccagctgcctttcctgtccactcagcccatcccacccacctagtgaaawgaatcacaaaagctttttaaactgctgctcgatttgcttgtcacagactctggccaagtgtcctccagggaaacaacacaggctaattgattgcacaaagaactgagcacatcctgggaaagctggaagtgccataggcttgtagggaaactgaggtacagaacatcagtgggccaaccaaataattgttcttgcaatcacttcatcttctgctgaaacagagcacatcgccccacacactccagactgttttcttgagcacccttccagcaccttcaggtccaacactttgcattgatctttgatttccttttcactttccgcatctccctcctgcatgaccagtcaatgatacccatctagtcctccttcacattttccttgccttgtccctatctaatttcccctgtgaaaatgtcttctgcagacccttattatttttcatgtagacctaatagcagccaatacagtgtagttgaattgatttgtgggtttaacgacgtgtaccaaggtgtatgtctaccccaaaactgtacatgtgaccttatttggaaaaagcgtctttagcaatgtaactaagctaaggatcttgagatcagatgatcttgggttaaagtgggctctaaatcttgggttaaagtgttcttctatgaggaggctgtggaaaagacccatgtgaagatggcggagattggagtgatgttgtcacaaatcaaggaacacctggagccactaaacgctggaagaggcaggaaagaaatctctcctagaggcttgggagggagcacggccctagctaaactttgatttcagacttctggactccagaacggtgagagtaaatctctgttgtattcagccagtacgtttacgtttgtgg

SEQ ID NO: 551096 - DNA, 455 bp, Homo sapiens
tcccagctacttaggagggtgaggcaggagaattgcttgaacctgggaggcagaggttgcagtcagccgagatcacaccactgcactccagcctgggcgacagagtgagactctatctcaaaaaagaagtgagaaaggcgtgtgtgaggacctcgggggccgccacacaccaggatgctgtgagtcgtgttatgagcctgaaaaaatctgaactgagtccctcacgcctcccagcwggctcctcggcctggccattctcatgggggccgtgttaccctcatggaggctgcgtcatcctcgtgggggatgggtcatcctcatgggggctgcgtcatcctcatgggggctgggtcatcctaatgggggatgggtcatcctaatgggggctgggtcatcctaatgggggctgggtcatcctcgtgggggctgggtcatcctcgtgggggctgggtcat

SEQ ID NO: 551097 - DNA, 621 bp, Homo sapiens
ttagacatatgtctgctgaatgaaacttaattacagatatttttgaacatttattaaatttaaattatatttgtacttgtaagaaatatttaaacaatgctttgtttttctaaaataaaagaaaaccaatagcacaaaccttcattttctaagtgtgtcaagttgttttgttttttttatttgcttgtgtgtttgttttttgagactgagtctccctctgtcgccaggctggagtgcagggtgcgagctcggctcactgcaacctccaacttgctggttcaagtgattctcctgcctcagcctcccaagtagctggaattacaggcatgtgcccctgcgctcggctaattttttttttttttttttttgtatttttagtatagaccaagtttcaccacgttggccaggatggtctcctcctgacctcgtgatccacccrcctcggcctcccaaagtgctgggattacaggtgtgagccactgtgcctggcctattttaactgttttatgtcttctggtttcgtgtgacaatgaaataagttaatatttcctgcctgcaccaaccacatttaggctctaccttaattgttgatgaggtcttggagcctcccttctgctccca

SEQ ID NO: 551098 - DNA, 1454 bp, Homo sapiens
gtagccacctggctgggggctgctgggcctcgttccacgtggggaggcagagcctggggtgcaggggccctcatgctcactcacgcccccactcacgacccagcccctccaaatggagggcggcgcagagctggggcagagtattgaggaggtggagggtttccatggaggagaagcctggccatgttgctccccatgttcccatgtcccagcccctccatgtgagcaaggtctcagctggggtgtgtgtccttgggcctggggcatgagatggagcccaagctcctccttggacctgggcttccaatgggtccagggccctcactccagctccacagaccccctccaccaagccataggggaggcgtggcttggaagcacacattggcacagagaccccagaagcccgtgtgcacacgtttccttaggtccacccctaagggcaacgagtccgggccccaacagccccataaaggccctcactctgctcacagctcatgcccaacacatggagtgcggccgggcgcgggactccctaggcctggggcacatgcaggtgcacacccaactcacacacattctccaygagcccacgctccggccacacaggcacacatgcccgcaccccatgcacatacaaatatgcacgtgctcacacacgggaacccttgacatccacgtgcatgtgcagacaagcttgggaacaaggggaccacgtccccctccagggatcccttcagggtgctgcagcctcactttagtgaggcaaacattgactgtttgccttgccatagccctgacaacggcggtgccggccctggcacgaggcccaggtgtgtactctgggaacatcatccatgcagagctgggcccctggaggatcactctgactgagctctccctggctaggggcctgggggacagagtggggatgcagagtaagcatctcctggtgtctcccctaaaacccagtgctggggagaagccccgccagcccctggcctctgacccagcagagctgaggacgtggaggcctctgggccccttctccgtctcctccctttcccctaccccaggatatgagtcatgcgggccccctccccatgacctcaccgcatcactattccacagccgggctccgttctgggaactgaaaggggggcagctctcctggggtggggtgggggcctctggcctgggaaaggcgcccctcggtcagcggcccaggccccttggcatacaccacggagctgtcaggactctgggatggccgaccccgcccgtggccctggctcagccccgtgcagctgcgagggatttggtgttcctgcgcaaatgcagttaggccatttcctatgtctgttccggctccgaagtccaaggttcagcccaagcggccgggcggtggggggggggctccatccacctcccaccccagcacacccccccaccct

SEQ ID NO: 551099 - DNA, 2377 bp, Homo sapiens
tttgaaaatccatagcataggggcaaaaaagaaataaggtgttaattttttacagtacagagtctaaagttatatataaagataaatacaaaggccagagattgttctagaaaaatgctactagaaatataaccttttctttctacatttctatctgtatctctttcctctgttctggaaatcttcctaaatactcctacctatatttgttaaatttgtaaagacaataattagtagctagcttattaactgctaagggtttaagtcacttcttatcatgtttgcatggatgctgggtttcatggagatactggaattgatttagcagatctagggctgtgcaaagaccgtcaaattttaacagacttctgcaggtgatcctgatgctcatccaacttgagaagccctagtttatttttttagcagctaatgcaataatttgaaatcatgtaaataaaaaagtactcccacaagccacaagactcacactgttctccagaacactgttttccaggatggaggtctctaaaatttttgctcatgattctattgttaaaacacctttgaatataaactgaaaaaaaatgtgatttgacctatttataaataatatagttgtaatactctatacacacaatttagtattatagaacatacaggaaggggccaggcatggtggccaatgcctgtaaccccagaaatttgggatgccgaggtgggtggagcacttgaggtcaggagttcgagaccagcctagccaatatgaggaaactctgtttctactaaaaatacaaaaattaactcgctgtggtgatgtgcacctgtagtcccaactactcaggaggctgaggcaggagaatcacttggatccatgaggcataggctgcaatgagccgagatcacgccactgcactccagcctcggtgacagagtgagactccatcaaaaacaaacaaacaaacaaaaaacatagaggaagggtaaatttaacagtgagataaaatgaattaactcaacagtgtatgggtcattctgaccacattgaaaagtgggtaccttccactttggggttccctccacatgtatttattgagagggaacatattgagagagagttcgcttttcctgccactctccacagtcttttaattatgccaccttatgtttcaaaagcactttacagtttacagaacatttttatacccaggatcttatttgatgctgaaacaccctatgacataggcttaattaatatgaataacctttcatagatgaagatactaagatccatccaggacattttcaaaggcacttgtgtaaaaatggggaaactaagactgaaatctcttttgcttcaaaattgactactttataattcaaggcttagtggtaagccatatgattgtgtctaccttctcttctactctaaggcaaagaacaataaatggttgcatttttactatgcttatttagggataaatacagttgcctgctggaattatatgtgtcacaagatgtggtaagaataaaataaaatgttatatgccagtaaaaaatatatacctctatgtattataatatctgtactgtagtgtagtggttctcaacctgggatgatttctcttgagaaaggtttggccacatgtggagcctgtttttggcccaaactggttagtatagggaacagcggctactgacacctaattgttaagggtctgggatgctagtaaacatcctaccatcttaaaacacacaggacaactcccaccacaaaaattacccgacaccgaatgtcaacagtgctaagactgagaaaccatgctgtcatgcgtctacttgttttagttatgaatcactctctaagtgactgatgaaacctgtgctgtcaccccagcaccagcacatacacaccaaatactgcacgctcttttacagtgtttattgacttgctgaaacatactcacagatcacagggtgagaaccctagatctacagagtgtagcaaacaataggtcccaaagacttccattgaattgactttgtttttatagcccctcagagaagtcaatcactgtaagacatgttctggcactcctgttattaaactagaaagtcagaagttcatatgcagccaatratctgaatgcatcaatgctttgagggatattaaagtcattcataacctagtaaagtaatacttgtacattttaattgagaagcggttcatttaatctcactcctcaagatatttttaattataaaaaaaggccactaatctcaaagtggaatttgtgggttattttatttcctctagcccttttgagagagattagaggatttgtttcataaagcatatcacgtagtgattaagagggcc

SEQ ID NO: 551100 - DNA, 852 bp, Homo sapiens
ggagcaaaatatgggggtcatggttggtggggggcttctcaacctggaagctccctgaaccccacaacttagaggttttgtgcggaggtttcattacatggtgtgattgatttaatcattggccattagtgactgacctcaacttccacctcctctcccctcctcagaggtcctgacatggggctgaaagttctaaccctcgaatcacaaggttggtgtccctgctggtggctaacccccatccagacgctacctagggcaccccataagtcacttcatcagataaacttaggtgaggttgaaagggacttgttatgaataacaaaagatagtcccctatcactcaggaaattccaagcaaatttaggagctctgtgccagaaacagaggtgggaggaacaaagaccaaatatttatttttttgttatgccacatatcccagttatgtcttatttgcatatttattagtttttaaaattttgcagtagtacttaatttaacttaattaattaatttagaattagggtctcattctgttgmccaagctggagtgcagtggccgatcgtagatcactgtaatctgaaacttcaggcctcaagtgatcctcccacctcggcctcccaagctctgggattacagatgtgagttaccatccctggcctgctatagtgtgttttaaagaaaaacttctatatcaggttgttttatgcttaagtaaggacatttcatatataagcaaaacactattttgtacttaatgaacaataatatcatctaataccctctccatacttagatttcccaaatcatctcaaaaatgtctttataattgattgacacattgcatttgg

SEQ ID NO: 551101 - DNA, 483 bp, Homo sapiens
ggtagtgacacttactttaaatttccaaaataatatctggcctcccataatttatttcaatgttttacacttcttgctgcaaggaaattgcttttgagtccaaaaaaaaaaaaaaatatwtttcttgccacggtttgtcttcttcattggaagctgttagttgctttcttagatggttcctaggttacctggtcacattaataataataataagtttattacgggtatactgtatgccaggaactgtgctaggctatatatatacttatttcatttaattattatttttttaagacagggtctttctcttttgccccaggctggagtgcagtggcaccatcaaagctcactgcggccttgacctcccagactcaagcagccctcccacctcagccccacaagtagctgggactacaggcacatgccaccaggccaggctaatttttatgctttttgttgaggcagggttttgccatgttgccc

SEQ ID NO: 551102 - DNA, 641 bp, Homo sapiens
cctgtctgttatactggcagaatgatgacaggctcagacctgcgtgctttgagagaaaatctagcatgttctagtacgctaagtttgtggcatgacatgtaggcgtgtccccctcagcctctacctcgggatagttaacaaaactccaaaagagttggctgtgttcccaaccaatggctctgtcactgcctcacacacagggcctccccatcygtgtccacagtaatcatcgctgtggatggctctgccaagagctcccctgtgtggactccagtgttgcggctgctctgagatggcctcttccttcccttactcctgcaaagcagcaacctcccagcatcaacgtgcgatgctggccctcagccggcccccttggcttcttggtgaacctcgtgttccgtttctgacgcttttcctggtctggaccctactcactggcccagagggagacactcctagccattccctgtaagctgccactaagtcccggaggtcccttctggtttcagcaccaggcagctgcccgagctgcgagctgggagttctgggcctgatcccggctcagaaagaggaacttcatccattcgctcctgggctggcccagcagcagcacgccaggctctcagaccagtgtggggccc

SEQ ID NO: 551103 - DNA, 641 bp, Homo sapiens
cctgtctgttatactggcagaatgatgacaggctcagacctgcgtgctttgagagaaaatctagcatgttctagtacgctaagtttgtggcatgacatgtaggcgtgtccccctcagcctctacctcgggatagttaacaaaactccaaaagagttggctgtgttcccaaccaatggctctgtcactgcctcacacacagggcctccccatctgtgtccacagtaatcatcgctgtggatggctctgccaagagctcccctgtgtggactccagtgttgcggctgctctgagatggcctcttccttcccttactcctgcaaagcagcaacctcccagcatcaacgtgcgatgctggccctcagccggcccccttggcttcttggtgaacctcgtgttccgtttctgacgcttttcctggtctggaccctactcactggcccagagggagacactcctagccattccctgtaagctgccactaagtcccggwggtcccttctggtttcagcaccaggcagctgcccgagctgcgagctgggagttctgggcctgatcccggctcagaaagaggaacttcatccattcgctcctgggctggcccagcagcagcacgccaggctctcagaccagtgtggggccc

SEQ ID NO: 551104 - DNA, 522 bp, Homo sapiens
cacgctagttgatatctagtgattcaaagaacagaattccacactagttgttatctaggaatgcggagtgagtgatagagggggttttggtggcgttatattctaattttgaagtaagtttaaatttacagagatgctcccaaacagtataaagaattcccaaatactcttcacccagattccctgaattaacattccgacatgtttgtctgtctgtctctccacatacacacatcccttttttccggaataatttgagaatagactgcagagagtgcctctagattctcctgtgtgggtttcctaaaaacaaggacgctgtccyggatagcctgcaccgacctgcccaaatcaggacgtgggcactgtcacaccatgccaccaaatgcagaggccccggagcccgcccaggaccacaggcgccgtctgtgtcaatggctctcgagtctccttcaatctggggctgttccttcgtctctgtctttcacgaccttgacatttttttaagagaacaggccagtt

SEQ ID NO: 551105 - DNA, 300 bp, Homo sapiens
cactctcttgctatgtttctctgaaaatagatcagccttctctgttgggatctatgaagctccagagataaaactgatatacattaaagtggctcgtggttaaaggaagtatgtttgttaatattaaaccgaggtttctctggtaactagattttaaatgatttgattccataggtttataatggagaaatccagatctccaaaatgtaagttttactatatgggaagcctttttttkatttcctttgctgtgtttggtaaatagcctggaagaaaatggctccgtcctatcacagaatt

SEQ ID NO: 551106 - DNA, 835 bp, Homo sapiens
tcccaaataattgatgatctcatgatcctacggtccaaattctgtgtttggcagatgggtgttgcatacatagacacactctcctctgaaatttcaagtctccggtaacagtgcaaagctgttcatgtgtttgttttgaggaagtgtaagattagaacggtcagaaatagtcctacttcccttttcctagaaacttcattacctcttgcgctagaacacccctcttgagcctgtggaaggtcaggttgccaggggatacgaataaaccagctgccttctttgtgtctctgctaaacagtagctggctcccctgtcactaggaccccctcctggtgcaggcttataaacatcagctgtagtaacgatacccccaggtgggaaggggtggtcatgtagtcaggcaggcacagaggagtgagaggccaaggctgagccagcagtggacttgggtacgattttcatcttttgccttggaacgcatgtctgtgattcccactaaatctaactttccttggtttaaatcctctcagttctctcatggcaatttctctggggagtcacggaggtcaagacacagctctgttcagctggtttaccctgtcctgccctgcccaagaccacagcctgcaacagtgccctttgctcaccttgttacagaacctgccacgtggtgcatccccttttataaaccatccacagcaaacttctggggatcctggggtcatttgaaggcctgggaggtccctaattattggggtcattgaggtgtggtcctattcaactcagaygcacatggaacctgtactatttgatgggataaataacccataagcac

SEQ ID NO: 551107 - DNA, 1749 bp, Homo sapiens
ttcaggtttgaatggaatatgtggactctagggatgtcagagtccctgctcactcccttgggaatggtacatgcttacctgtactcttgagtctttctagaccctcaggcattgtgagtctactagaattttgtgtcatgcagcattgcaaatgctataagacaatggggaagtacggaactacagggaacattcaaagtgtgcatatctcctctgctcacacataggcaccattgtcccattagactttacttacagaacacaagttgaaggattaaattatcaagaatttcaagacagtaacatgagagcattaaactagacacagggcccttctgaggactgagcacaggttgccagcccacaaaactggacatgagaaatattaagtgatttgcctaataaccagagataaatgcctttcaacttcagctcatttctaagcattaacttctatttacttttttttttagctaataaactgacctttctaacaattcttcagtgttactattagatcaatgaataatggaatgcaaatgtttgggagggaaggatgctaacagtgatcgaatgctcatggtgctttgccgtgcttacctaaatgatcttattcattacaattctaatgaggcaaggtgtgtttaatgcatttttaaagctggatacttaaaaccttaagaaagcaagtaactcatccaatgtcaagtaacttatgtgttgagaaagcaagatcaatgagttataaacacacggaacttgagttccgttcccaacctccctttcaaaatctattcagcggcgtcgctttcccatgactctagatggagagttgggcgggcccttgagtttctacctgcttggaggtattgaacagtttctcccatyactttagatgacaactcagattcaacttggaagctgaagtgtgcaggtatctgtaacattcacatgtctggattgacttaatgttaaattttcttcccttccctagctgggctgttgaaattggccacaccattgccaacagtgacacagcacttcctctttcctgcttgagtcttcctccagttattagtttgaatgggagtggttagtacttagaaagtggggtgtggagcatgaaatatgggagtggggatgagaaatttcttattggggtgagttttgtgccaactcagacttctcttaatctcaaggattctgttttaacctgggttctcacaatgcagaacctgcataatttattgggaactgtaaccctgaaagtgagggacaggggtagtgaaacaaggcaggttcaaaataaggatgtttcaagatggtcaatgtcaggatatctggatgttcactcctatgggatcttctggaaagctgagtggcatgagctttaggatcaggccttcagcagaggaaggagaagttttgcttgctggtttctatgcatatttatccagagttcatcccatgagacattagccctcttagagttccaggatgaaaaagagtgatcacaaaattttctgccatgtcacagaaaagcccagggatgggccacaggaatgctggatgggcttgatgtatggtggtgccaagatgcacctgcaggaagccatttggggtccatgcacaggcccatcactgaagctgtggccaaaatcagagaacaaaggggtttagtggatctgatatgatgcatgaacaatgtctaacatgggtgctttcctgggttcactggaggagattcaa

SEQ ID NO: 551108 - DNA, 1749 bp, Homo sapiens
ttcaggtttgaatggaatatgtggactctagggatgtcagagtccctgctcactcccttgggaatggtacatgcttacctgtactcttgagtctttctagaccctcaggcattgtgagtctactagaattttgtgtcatgcagcattgcaaatgctataagacaatggggaagtacggaactacagggaacattcaaagtgtgcatatctcctctgctcacacataggcaccattgtcccattagactttacttacagaacacaagttgaaggattaaattatcaagaatttcaagacagtaacatgagagcattaaactagacacagggcccttctgaggactgagcacaggttgccagcccacaaaactggacatgagaaatattaagtgatttgcctaataaccagagataaatgcctttcaacttcagctcatttctaagcattaacttctatttacttttttttttagctaataaactgacctttctaacaattcttcagtgttactattagatcaatgaataatggaatgcaaatgtttgggagggaaggatgctaacagtgatcgaatgctcatggtgctttgccgtgcttacctaaatgatcttattcattacaattctaatgaggcaaggtgtgtttaatgcatttttaaagctggatacttaaaaccttaagaaagcaagtaactcatccaatgtcaagtaacttatgtgttgagaaagcaagatcaatgagttataaacacacggaacttgagttccgttcccaacctccctttcaaaatctattcagcggcgtcgctttcccatgactctagatggagagttgggcgggcccttgagtttctacctgcttggaggtattgaacagtttctcccattactttagatgacaactcagattcaacttggaagctgaagtgtgcaggtatctgtaacattcacatgtctggattgacttaatgttaaattttcttcccttccctagctgggctgttgaaattggccacaccattgccaacagtgacacagcacttcctctttcctgcttgagtcttcctccagttattagtttgaatgggagtggttagtacttagaaagtggggtgtggagcatgaaatatgggagtggggatgagaaatttcttattggggtgagttttgtgccaactcagacttctcttaatctcaaggattctgttttaacctgggttctcacaatgcagaacctgcataatttattgggaactgtaaccctgaaagtgagggacaggggtagtgaaacaaggcaggttcaaaataaggatgtttcaagatggtcaatgtcaggatatctggatgttcactcctatgggatcttctggaaagctgagtggcatgagctttaggatcaggccttcagcagaggaaggagaagttttgcttgctggtttctatgcatatttatccagagttcatcccatgagacattagccctcttagagttccaggatgaaaaagagtgatcacaaaattttctgccatgtcacagaaaagcccagggatgggccacaggaatgctggatgggcttgatgtatggtggtgccaagatgcacctgcaggaagccatttggggtccatgcacaggcccatcactgaagctgtggccaaaatcagagaacaaaggggtttagyggatctgatatgatgcatgaacaatgtctaacatgggtgctttcctgggttcactggaggagattcaa

SEQ ID NO: 551109 - DNA, 1227 bp, Homo sapiens
taattaaatcaattgcccactaaaacaaacaaaaatcaatcctcttaagaagaatataaaagagtccagagtttccacaatacatttttaatgtccaggttacatttcaaaaattatatgacaaatttgtaaaartgaaaatgtgacccattctcaagaaataaaataatggagagtttgaattaagatgttaaaccatcattataattatgctataggaaataaataaaaatatactcacaatgaatgaagcaatcattatttcagtaaaaaaaaaactacaataataaaaggtccacatggaggttttagaactaaaaaatataatatttaaaataattatataaatacacatataagaattcagacacatacatgggagtctgaaataagaaagaaacaagagcagcagctgccacaaggaaaatgttttctttcatccagatttaaagtcctgattggccgggcacagtggcttatgcctgtaatcccagcactttgggaggccgaggcaggcagatcacaaggtcaggagttcgataccagcctggccaagatggtgaaacccctctctactaaaaatacaaaaattagcaaggtgtggtggcacaggcctgtagtcccagctacttgggaggctaaggcataagaatcacttgaacccaggaagtggaggttgcagtgagccgagatcgcaccactgcattccagtctgggcgaaagagcaagactccatctcaaaaaaaaaaaaaaaaaaaaaaaaaaaaaaaaaaaaagtcccgattatccagaacctaggaaaaagcaccttggccatggtccctcaaagactgccagatacttaatgagaaggtaaacagaagaggcagagaagaggtactgaatctattagaaacatttgttgccacagttgccttattttgccaagatagaactttttgaaggtgatcttctaccatcactatcactttgtttaaaaagagaaacttataagtaacaaaaatataatttcagaatatatgacagtctcccaaaaaggacagatgacaactttgcattgacatctaaaaagggagcaaggaggaagaagataaatttgaaaactactaacacaattcaaaatgttatttaatggtactgtaccatacacaattgttttcttgatacaaatctttccatttagaatctatatttcacagtgcaatgtattttgatacttcatttttg

SEQ ID NO: 551110 - DNA, 1227 bp, Homo sapiens
taattaaatcaattgcccactaaaacaaacaaaaatcaatcctcttaagaagaatataaaagagtccagagtttccacaatacatttttaatgtccaggttacatttcaaaaattatatgacaaatttgtaaaaatgaaaatgtgacccattctcaagaaataaaataatggagagtttgaattaagatgttaaaccatcattataattatgctataggaaataaataaaaatatactcacaatgaatgaagcaatcattatttcagtaaaaaaaaaactacaataataaaaggtccacatggaggttttagaactaaaaaatataatatttaaaataattatataaatacacatataagaattcagacacatacatgggagtctgaaataagaaagaaacaagagcagcagctgccacaaggaaaatgttttctttcatccagatttaaagtcctgattggccgggcacagtggcttatgcctgtaatcccagcactttgggaggccgaggcaggcagatcacaaggtcaggagttcgataccagcctggccaagatggtgaaacccctctctactaaaaatacaaaaattagcaaggtgtggtggcacrggcctgtagtcccagctacttgggaggctaaggcataagaatcacttgaacccaggaagtggaggttgcagtgagccgagatcgcaccactgcattccagtctgggcgaaagagcaagactccatctcaaaaaaaaaaaaaaaaaaaaaaaaaaaaaaaaaaaaagtcccgattatccagaacctaggaaaaagcaccttggccatggtccctcaaagactgccagatacttaatgagaaggtaaacagaagaggcagagaagaggtactgaatctattagaaacatttgttgccacagttgccttattttgccaagatagaactttttgaaggtgatcttctaccatcactatcactttgtttaaaaagagaaacttataagtaacaaaaatataatttcagaatatatgacagtctcccaaaaaggacagatgacaactttgcattgacatctaaaaagggagcaaggaggaagaagataaatttgaaaactactaacacaattcaaaatgttatttaatggtactgtaccatacacaattgttttcttgatacaaatctttccatttagaatctatatttcacagtgcaatgtattttgatacttcatttttg

SEQ ID NO: 551111 - DNA, 1227 bp, Homo sapiens
taattaaatcaattgcccactaaaacaaacaaaaatcaatcctcttaagaagaatataaaagagtccagagtttccacaatacatttttaatgtccaggttacatttcaaaaattatatgacaaatttgtaaaaatgaaaatgtgacccattctcaagaaataaaataatggagagtttgaattaagatgttaaaccatcattataattatgctataggaaataaataaaaatatactcacaatgaatgaagcaatcattatttcagtaaaaaaaaaactacaataataaaaggtccacatggaggttttagaactaaaaaatataatatttaaaataattatataaatacacatataagaattcagacacatacatgggagtctgaaataagaaagaaacaagagcagcagctgccacaaggaaaatgttttctttcatccagatttaaagtcctgattggccgggcacagtggcttatgcctgtaatcccagcactttgggaggccgaggcaggcagatcacaaggtcaggagttcgataccagcctggccaagatggtgaaacccctctctactaaaaatacaaaaattagcaaggtgtggtggcacaggcctgtagtcccagctacttgggaggctaaggcataagaatcacttgaacccaggaagtggaggttgcagtgagccgagatcgcaccactgcattccagtctgggcgaaagagcaagactccatctcaaaaaaaaaaaaaaaaaaaaaaaaaaaaaaaaaaaaagtcccgattatccagaacctaggaaaaagcaccttggccatggtccctcaaagactgccagatacttaatgagaaggtaaacagaagaggcagagaagaggtrctgaatctattagaaacatttgttgccacagttgccttattttgccaagatagaactttttgaaggtgatcttctaccatcactatcactttgtttaaaaagagaaacttataagtaacaaaaatataatttcagaatatatgacagtctcccaaaaaggacagatgacaactttgcattgacatctaaaaagggagcaaggaggaagaagataaatttgaaaactactaacacaattcaaaatgttatttaatggtactgtaccatacacaattgttttcttgatacaaatctttccatttagaatctatatttcacagtgcaatgtattttgatacttcatttttg

SEQ ID NO: 551112 - DNA, 1207 bp, Homo sapiens
gctcttgacttactggagtgagaatcaacagcaattttcccctttcactgaacttctggataggctgtcccagagaatatgaagctagctttctctcgaacattaggcaaaagtaaagtcaatcaaaatttatagccagggctcagaaactcatttctacaggattctgtaaccaagcttccagaaggatttgagagtcttagaatcttggttttcccaggaatgagccagtcaaaaagaggtcaccagctgagctagatgattctgattccacaaatccatctcctttgtctatcttctttaggaattgttccttgtttacaaaggattatggaagaaaggagttaatttctatggcctcttttttcttgccttcttagagaaaacatctttcacttccaaattgacttgaraatttatgataagaatgaagataaaacaactagcttactgagagcttattggcaaacacttcacatgttatattataaaatttcatagcaatcacatgacataggtatgtttctactacatagcttttcagaggatgacactaaggctcagagaagttaaattatttgtctaaggtcacacagctagcaagtagtggaattgaattattcacagcttgacaccacaaactctgtgctgggctttgttggtgtctgcactagaaagggctgacatgatgcctgtgattctggtcttcatctgttaaccccttcagcctatgtacagaaggcatgggctgtaccaaggactttctccttggtaagatttgccttctgtcgtatgcaaaagaaaagatttcctcttcacatcagtggtcttcagaaaataacctaccaaatccaatcacttgcctcaaggctggacaactgtgatatgcaaaacactctggaattctcatggactaaatcagcactagacttgacttgagaccacattcttctcgattccttctgctgctctagcctgcttccctcacttactaacatttttttttcttctaaagagcattcagtatattaagagtatgtgaatctccatctcagagtctacttctgggaaacctgagctgagaccattggtaccaggagtagtcctaggaagctgactttaaggatgaaattctgaagttggatcacttcgaaccttctgctaaaggaggttatcatcactggtggtaggtgcagagtgatagtcc

SEQ ID NO: 551113 - DNA, 1008 bp, Homo sapiens
tgaaaacacctcaatccatgggtttggtgaagcaaatagggtctcagtagcaaagggcacctgtctacagtgttgaagaatggtgaaaatagggacacttaattcacctactgagaggcaccccaatggcagtgctaacagtgaataagtctcctgttgggtgttacttcccaaatatcccctaggagcactgcgtttgaaattctgaaaccttagcattatatatatttgtctgttatgtgtccccccaagaatataggtataatagaagccaacttgagagtatcttcacagcatattttcaggatgtagaattgcacctggcatatagaaaaaacttcaataaagattggttgaatgaagtaacacctttcaaccccctctccgatcaaaggactaaaaactagaaggaattatctctgagaaaatgacaaagaggacacaggtaggctgccaccgtaatgctgaaccatagcaaaagagaagaaggagtgtctgattccctgatgggaagggtccagcccagaggatcttttagagccagcattgttgaaagtgtggggatagaaatggaaacagttcagacagaagatcctgggtaagacaatggagtcttcacattttgcccaaggaaactggggcaggtcttagactaatgtcagtagaattaagcctctgaaaccagatttgatcattgtgcaagcaaaactaaccacccaattcctgtatcttgatcaaatttaagtcaagatcattttgtatcatttaaatcaagatcaatttgtatcttgatcttaataggtaccaggagaagggtacctatctttatgtactacttcacgtcatttaaaatgtgataaaatggtacaaaatgcaaaaaatacatgagggtgcacacttaaaagaattttccttatttccacccccaagcagccagccaccatgttctgyccttttaagtaagaattacggcctgacaaagagatgggtaaactatggcgcttgggc

SEQ ID NO: 551114 - DNA, 1259 bp, Homo sapiens
caaaaattagccaggcatggtgggggggcgcctgtaatcccagctactcaggaggctgaggcagcagaattgcttgaacctgggaggcagaggttgcagtgagccaaggtcgtgccactgtactccagcctgggcaacagagcgagacttcatttcaaaaaaaaaaaaaaagaaagaactgataacaaaattttgcaaggtaatcagttacaaaataaatacataaaaagtgatggttcacgcctgtaatcccagcactttgggaggccaaggtgggtggatcacttgaggtcagaagtttgagaccagcctggctaacatggtgaaacctcgtctctactaaaaatacaaaaaaattagccaggtgtggtggtgcacacctgtaatctcagctactcaggaggctgaggcaggagaatcgctggaacatgggagaatcactggaacccgggaggcagaggttgcagcgagcagagatggcaccactacactgcagcctgggagacagagcgagactcagtctcaaaaaaaaaaaaaaacatgaaggcaagataatcctagtcacaacttctgtatagctatagtaaccaagtttgtatagtattttctatattcttgaataagtagatgtaatatgggaagaaatccattaatcctcagataaatctgtaaatataaagcaattccaattaaatccttatggaattcgcctggaaaagaaacacctgactcaggcgtgaacattatgcaaaatggggtgagagtcaccataacagatatagacatgacttataaagtttcaataattaaagtattttacagagagaggccagtgtaacagattagaaaacctagaatcaggtccaagtgtatgtacgaatttagtataagtacataaatgttttatatattttgactggttttctaattattcatggcagaagggtaaatcgrgcctctttatctcccttaggccagaaacagacatccctggctgctttcagagagtagactgcagagggtctaggacataaaggggagacccactctggggtctgtggggatccaggtgagagttgaccatagtttggaacaggagagtaacagatctctacaaaatgtgctttgattccaaatgagtttggaagacaaaaaagacagcttgctgatgaattacatagatatgggggtgagagagaaaccatgggttccaggatgacacagctactggaagaatagaggcgtccagtcctgagatg

SEQ ID NO: 551115 - DNA, 507 bp, Homo sapiens
atcaaagcagatattttgtatagatcactgctaaatcctcagcacctggcaccatgctggcactcagtagctgctcaatatatactttttaaataaatgaatgattgctatgaccatggcaaacatctgaatctggatacaacaacaaaaaataacaacaaaatctgtgctggcatgaaattggtgcttggtgaatgctggggaaaaatcmcctgccattggaagccacttggcagtgtttatggatggagctgtgtcttccttcacctgggaactggcatttctgaaggtgtgattgtactcatccttaacatacgcttggggggaatgatctaggcatagggtttttcttaagctaagaaatgagtctatttcacaaaagaactaaaaacagaactctgattcatgaatttgccaatggcttgtccttctcaggggaacctccctgggcacagtgaaacccttcttggggcacgacctcatgcttgatgtgaaggtcatcacaga

SEQ ID NO: 551116 - DNA, 551 bp, Homo sapiens
tccgccatcttcctcttccgtcagatcttctcccttaaactcaaacaactccacctgtgggacaagatgtgacacaattccttcccatgctaactcatgggcagtgaaacacaatctttctcatccgagagagtccctactaactgccaggccggatctgaccacaagggcagtcacaaggagttgggtagagtggcacwttttttcagttcttgggagctgccctaatctcaactttggtagaggtgggcagactacatagatttcagttaagctgaggagagcaatctatttgctacctgctctactaacacggacatatcaggacgcgtcccagataatcctaattcacactacctgataagcccaacctggtaggtattagaaatgattacccaacatctctcagcagtttctcagtattcaagggcccacggattggctcaaccattttcagattgaacaatgtcaagttctatctcctcagtgaagccttttctcagcccttgacccacaggggagctactgctccctcttctggtctctagagc

SEQ ID NO: 551117 - DNA, 517 bp, Homo sapiens
acagactgtgataaaccattcctccctgagcttggtcctgagaaaatggtttctgcttgtgacagcttgtgtccacctcgaacctatcctaccagcccactgaccacgcctaccttttcccaggtcaaaggagaatttgtccttgcgatccagactggagtcaaactttgtgccatctaatagccagccagtgtagtggacaaagactcggtccccaatcatgggcatctctgwacctgtgccctctctcttgatgacctgggaggaagggggagaaagtgagtaccccagggtttggggcagaaaggggcaccagcactgcctgcaagcctccagagggaacataaagggacttctctgtgttcatcctcctctgcctacttgtccctccagattcagttactagcagcttggcttatgagtcaactaaccttcttgtctttcttgaggtgcagcaagacttggtttgaaaaaggagacaaaaggctgagagatctgagttcaagtttccgctgta

SEQ ID NO: 551118 - DNA, 1052 bp, Homo sapiens
ggaccatcatgtaatttcatctgtaagtaagcatacaattagctgctgtctgctccaagtattgcgatgctccaaaaagcatttggtgaagcacagaataagccataaagtgttgtacaaatgaccttacctatttgaggggtttttactcatttatttttggttgaggcataagttggaaagttttcttttgcctctaaataaaggagaaaatggagaaatggaacaaagtatataggagtccagagggctagtgtctaaaccagggtaagtcatcaagtagctgtgtggacttagccaagtaacaccccttctctggacctcagcttctttatctacaaaataaaagagttaycctagattgcatatgagttccttttcaaatctacccttctagaatggacttcatgtggtcatagacctcatggggttgggcttcccaaagctgtaatggtgaattgatctgcagcctctcgatgtctttggtcagtgctacatctaccagcatttctagatgaaaagtgtacaatgattgattacttagatgctcctcagcactgagcagtttggcatggaggcctggtgaaatggtttcaacttgtgcccctgcccaaatctcatgtcaaattgtaatccccaatgttggaggaggggccaggtaggaggtgattggatcatgggggcaccctttccccttgctgttctcatgaaagtgagtgagctctctagagatctggttatttaaaagtgcgtagcacctcccagttctctcctttctgctccagccacgtaggatgtgcctgtttccccttcactttccgccatgattgtaagtttcctgaggctcccggcagccatgcttcctgaacagcctgaggaaccatgagccgcttaaacttcttttctttataaattatgcagtctcaggtagttctttagagaaatgtaataacagactaatatacctagcaatttagtgattgactaaatgtgttcatttttcacccagactttttgtcttgtttccgatgcagtctctttctccagacctg

SEQ ID NO: 551119 - DNA, 1052 bp, Homo sapiens
ggaccatcatgtaatttcatctgtaagtaagcatacaattagctgctgtctgctccaagtattgcgatgctccaaaaagcatttggtgaagcacagaataagccataaagtgttgtacaaatgaccttacctatttgaggggtttttactcatttatttttggttgaggcataagttggaaagttttcttttgcctctaaataaaggagaaaatggagaaatggaacaaagtatataggagtccagagggctagtgtctaaaccagggtaagtcatcaagtagctgtgtggacttagccaagtaacaccccttctctggacctcagcttctttatctacaaaataaaagagttaccctagattgcatatgagttccttttcaaatctacccttctagaatggacttcatgtggtcatagacctcatggggttgggcttcccaaagctgtaatggtgaattgatctgcagcctctcgatgtctttggtcagtgctacatctaccagcatttctagatgaaaagtgtacaatgattgattacttagatgctcctcagcrctgagcagtttggcatggaggcctggtgaaatggtttcaacttgtgcccctgcccaaatctcatgtcaaattgtaatccccaatgttggaggaggggccaggtaggaggtgattggatcatgggggcaccctttccccttgctgttctcatgaaagtgagtgagctctctagagatctggttatttaaaagtgcgtagcacctcccagttctctcctttctgctccagccacgtaggatgtgcctgtttccccttcactttccgccatgattgtaagtttcctgaggctcccggcagccatgcttcctgaacagcctgaggaaccatgagccgcttaaacttcttttctttataaattatgcagtctcaggtagttctttagagaaatgtaataacagactaatatacctagcaatttagtgattgactaaatgtgttcatttttcacccagactttttgtcttgtttccgatgcagtctctttctccagacctg

SEQ ID NO: 551120 - DNA, 551 bp, Homo sapiens
aaatgtaacttagcttggctttgaaaatgctgtgaacccttggtgacagggtcccagatagaggagctctagtatgtcataagaatgttggacagggagaaaatgcccctcatctgtccataaggaggaggcattagcttctgtttcctgatcggggctggtgcttcaacsttgagctttctctagaatacagcttctcaaagtgtagtccccagataagcagcatcaacatcactgtgaaattgttagagatgcaaattattcattctcaatccagacctcctgattcaaaacttagtggggtctgggtgcggctggtgtagcaacctgcattttaacaagcagcccggaagatcctgaagcactccattgattgagaaccactgatcctttaacaccattagggctagaactaggttggcatgaccgtggattcctctgctgtgagaaagcaaaataggagatgctgcaggctttgcaagtggtgtgttcactagcagaactctgatggagcaaaggcaaacaaagtatcttacttgccatctctatgc

SEQ ID NO: 551121 - DNA, 1177 bp, Homo sapiens
tgcgtgcacgtgtgagagagaaatgcygtggtgctgtgtttgctgggtgctttcctctcgcccaagttaaaccctgacagatgcttaagtggtgatacatggaaaacgaatttcggagcaaaccaacttcccaggcagggaccctggatcctctaacacccagcaatgaaatggtacagcattttcaggctctctcttcagaactgggaaattttttacaatgaccatttatcattggtgggggtagggaaggatatttgaattagtttttttttttactgaaaaaattaattcacgttcaaaatgaaaaaaaaaaagcaggaatacatactcctggtaaaatgggaatattacaaggggctagagaatgaaaagtcaagctctctcgcaccgctgtccccggctccccttcccagtcacccattaccagtaacttttgtgccatcccaaacacaggtcacacatccatgctccacgttggcctatattgtacactattctgcactttgcttttttcacttcagagtacatctcggagattgttctctatcagcatagattttattcatattgtattttttaactataacattgattggggaaaaaaagatgcctctattctggacaagccaaagtactgggaaccaggtctctccctgtaaaatataataatgataccctggtctgatgctgagtctcctgtttattgcctcatttattcctcagaaaacccggagaaggagttaccaccccactcatagaggaggacaccaatgcagagagaggttgggtcactcaccaaagccacacaggatgtggcagagctggaatgtgaacaaaggcaggctgaatgcagagctcttgccatcaacctctgccttccagaaaaaataaaaaggatggaactgcctgggagctgggagtgacgggagagttagaggggcctctgccacccccagacccactggagagcccagagccctgtgtctgagctaccccacctgcatttgtcactctccatgagccccagtgaccactgctgtcaggagaacccaagcagacgctggctcccatctcccagcccaggcccctgagggtgaagcatggtttgagccttttcatgtttctctgagcactgcccatgcacaattgccccccttacacctgcttattatca

SEQ ID NO: 551122 - DNA, 1177 bp, Homo sapiens
tgcgtgcacgtgtgagagagaaatgctgtggtgctgtgtttgctgggtgctttcctctcgcccaagttaaaccctgacagatgcttaagtggtgatacatggaaaacgaatttcggagcaaaccaacttcccaggcagggaccctggatcctctaacacccagcaatgaaatggtacagcattttcaggctctctcttcagaactgggaaattttttacaatgaccatttatcattggtgggggtagggaaggatatttgaattagtttttttttttactgaaaaaattaattcacgttcaaaatgaaaaaaaaaaagcaggaatacatactcctggtaaaatgggaatattacaaggggctagagaatgaaaagtcaagctctctcgcaccgctgtccccggctccccttcccagtcacccattaccagtaacttttgtgccatcccaaacacaggtcacacatccatgctccacgttggcctatattgtacactattctgcactttgcttttttcacttcagagtacatctcggagattgttctctatcagcatagattttattcatattgtattttttaactataacattgattggggaaaaaaagatgcctctattctggacaagccaaagtactgggaaccaggtctctccctgtaaaatataataatgataccctggtctgatgctgagtctcctgtttattgcctcatttattcctcagaaaacccggagaaggagttaccaccccactcatagaggaggacaccaatgcagagagaggttgggtcactcaccaaagccacacaggatgtggcagagctggaatgtgaacaaaggcaggctgaatgcagagctcttgccatcaacctctgccttccagaaaaaataaaaaggatggaactgcctgggagctgggagtgacgggagagttagaggggcctctgccacccccagacccactggagagcccagagccctgtgtctgagctaccccacctgcatttgtcactctccatgagccccagtgaccactgctgtcaggagaacccaagcagacgctggctcccatctcccagcccaggcccctgagggtgaagcatggtttgagccttttcatgtttctctgagcacwgcccatgcacaattgccccccttacacctgcttattatca

SEQ ID NO: 551123 - DNA, 1292 bp, Homo sapiens
gaatgagattagtgtccttatgaaagaaggccaatggagtgtgtttgcatctttcaccataagaggatacagcaagaaggcactatttatgaacccgaaagttgggccctcaccagatactgaatgtgccagtgccttgatcttgaacttaccagtccctgaaattgtaagaaataaatttctgttgyttataagtcaacagaagtttatggtatttttgttgtagcagtccaaatggaataacacacctctcactagttggaatagtgaagatcactggtgggaacaataagatcagaggaaaagaaggctgtcattccagagtgaaaaacaagatcatgtctctctctaccactctaaattcaaaaacaagagcatgtctcatacaaccacaaagaatgatactgtatttgggttctattcattacatattccttggttaaagtcagcctcctgaataagcatttggtgatctttcaagtaatctgaatctattcccagtattaccactgagttgtcgatccagttttcccacctgcaagatggggccaatatcttgattgcctttctttcttaaccaagatgtgatgagagcaagtaagataacatgctatcagctatttggaagaatgaaggaatgcagaattggaaggtgttctaacagtatatgtaagatacaggatcatcattctagcacaggttgggagaatgaatagaaatgaattggaacccaaagctgttatcaatagagggtgacatgacacaataagaaaaggctgcaggctgtattttgtttcttttctatctatgataactatgttccttatcaaagtaatcccaactactattgctcattaaagctgtcatgttttcacaatctcatctgccttataattgaaattcttactttaacagcgttaccttaatgttattgctagctatggaatgtcttgtgaagagtgcaacattaaagttaatttggccctacatctttggtaatgtatactgtctggaatataataaactacagatactcacacttcaactgaaatgcgtcaaggttactttctcaattattgtagtttgttataggtgacccctaacatggttagttatcatttctcacatttgatgaatctcatattgcttgtggtcttttttgttagagcagcagaaatcagaattcctaatgatgtgaagttttgttttctttccttcttttattcttaattaaaacctgttatgcacttcagctgagcttcccagtgagaaaaattagatcagtattataa

SEQ ID NO: 551124 - DNA, 615 bp, Homo sapiens
ccattccaatggttataaatgagttggtaaggtcagtccacattcaaaaagaggggaataagactacctgtttatggggaaggagcaaagtcacattacagaagaatatatgggataggagatattgtggtcatcactggaaaacacaaactgtcacagatgttgaagttggttatattaatttgctttacttttatattatctagtgtttggttgcatatagttcttgaacttaacattactgtacttggcttagaaattactggttcataagaagtgtctctcccaccattccaatcatctttaccaatggagrtaccactgttttctagaaaatgctgctgtcactgagactcaaatgcctgtctgatattgcagttcagcaacccttacatgccagctcttactgtagttgcttctgactctgggatttgcaagatgctcatggggccagttgcctatcaatggtagactggaagaagaaaatgtggtacatatataccatgaaatactacacagccatgaaaaagaataaaataatgtcttttgcagatttcttatttttacttctcttaaaggagagccattatatcactcagatttgaaactactgtc

SEQ ID NO: 551125 - DNA, 579 bp, Homo sapiens
gaaaccctgtgtctgctaaaaatacaaaaattagctgggtgtggtggcaggtgcctgtagtcccagctactcaggaggctgaggcaggagaatggcatgaacccgggaggcggagcttgcagtgagccaacactgcgccactgcactccagcctgggtgacaaagggagactccctctcaaaaaaaaaaaaagaaaaaaaaagaagaaaaaaaaaaacatgacrttgtcatttctacagccatatggcacttggcagttttgaaagcatttctgcaggatgaactgcatgaacctcttcccctttcccttgagaaggaggcaaggtggtctaattatccctgtctgatatgcagagagactcaaacagctgggaacaggcagagccaagactagaaacccttcaactcaccagctcaacgccctttctgcagcgtgtaaagagcaaagcaggctggaccgggtggctcatgcctataatcccagcactttgggaggcagaggtgggcggatcacctgaggtcaggagtttgagaccagcctggccaacatggtgaaaccccatctctactaaaaataca

SEQ ID NO: 551126 - DNA, 721 bp, Homo sapiens
gacccccagaccttcggggtgcccagtccgagcctgggccgctaggggccgcgggcctggcgggcggggcgggggccggggtcgggggtccggcgagctttaatgcgcgcacaaagcctcatttgcaggtcaatgccgcggcacactcgcctctcccctcgcccggcgccctttgtccggccgcgcccgctcctcgcgccagatggccgcggaaatgctaatttcgggcgcccctgcccccccacccccgcgtttaattgcgcctttgcagatgggccgcgagtgtgcgcttcatgcagatgagcgcggcctcgccgccttcctcggacctccgggagccgcggccgggcgtgctggggccgagggcagggagggggccgctgtccctccactcgacgcgccgccgggcacgggcgggcacccagcggcccgggcccgggaagcgcgcttctctcttttcatttctccaaaatgggatcttaagtgattctgaatgaaaacaaattggcccgctttcttctccaaacagacgcgcggcgcggtgggggcggcgggcgcgggcccggggcggcccgggcggtggggttggctccgggaccccctgcccggcccggccctcgcgccttctccccgcggcccgccttcctcagccctgggccggcggcacttggaggcggccgggcaagacggcagacgtgggggcccctttaaccrgagccaa

SEQ ID NO: 551127 - DNA, 586 bp, Homo sapiens
gaattttattatatatgaaggaatagtttgtatcttaccatagcacagaacagtgacctcttgctcaggataagatgtggtgatttgaaaatactcaatagtagccttgcagtgatatctctctctctctctctctgcaaatctaaattttattctctggtatttccyccaagtttttattttgaaaattttcagactacagaaggactaagcatagtacaatatacacctgtatatccttcacttagatcaccagttatcaatatattggcacctttgctttttcttgttctctcacacaggcacacacaatgcatatatgcacacacacatagatctgttttttgttgagtcatttaagattgttagggaattatgataaatcagccatagtactttagcaggtatcttctgagtaaggacatgtgttcctttataaccataatgcagttgtcagactcaataaagttaacatttataacaatactaccatctaatacatagtttactttcagatttccccaggtgttctaataatgagttcttcatagttgtgtttttaaaaaataacagctttattgggata

SEQ ID NO: 551128 - DNA, 1375 bp, Homo sapiens
atataaataattatcttcagacaatactataaamggggaattaccttaattaagtttttggaaatgatggcttatgtatgtttctataactccctagcactctaaatttcctcctggggtgattcaactacaaagaagaatggctgaaatataggtaggtagtagatgtggtggtgcaaagcatagtgtggaacctggagtgagtctgtgctaagcacatcttaggctttgggcttctgaggagaccatttagtagttttgcctctggataccttctatccttactgttcacaaagctgggaggaaggacagccccgccacctagaaagtagcctgattcctggctaagcttctggcaaagacagtggcccagccaggtgagccaagtgccatagcccaataactagggaaactgcttctgcttgctttctgtttagccttgagcatggctctcaatgtcagctgattggataattcctagcttagttttcaccacctgtcaattctctgctgcccagaaagagtccatcaatcgagcttccacaaatgctaaaggaaccggtggcagctgatggaatcgggcaaagatcatgtaaaaaattaaacccagtaccagcctggccaacatggtgaaacccctctctaccaaaaaaatacaaaaattagccgagtgcaggcgtggtggcacacacctgtagtcccagctactccggaggccgaggcgggaaaatcgtttgaaccgggaggcggaggttgcagtgagccgagatcttgccactgcactccagctgcatgagacagtgagaccctgtcttggaaaaaacaaaaaaaaacagtagtttgaggaacagaaaaccaagctaaacagccaaaatgaatggctcctgtaaggcaaatttaatgtgagaaatagaagggaacaaattaaccgggcatggttgtgcgcgcctgcagtccaagctactccagaggctgaagcgggaaaatcgcttgaaccgggaggcggaggttgcagtgagtgagccgagattgcgccactgcactctaggctggactacagagtgagactctgtctcaagaaaaaaaaaaaaagcaaacttaaaaatacgatgtgtaaaaatatggttttacagttttttgacattcaattgaattgaaaaatagaatcgatactcttaaaactcaaaccgaagaagatcaaacaggaagttgcctcatgatacgaaacaaaaatgcaaaggaagccactagtgagaagataaaagaaagggaaggaagatacaggaactgcagtgtgaggtaggagttccagaaggaacagatggagaaagcaataatcaaataagactacgacttctttgggtttaaaaaaaaa

SEQ ID NO: 551129 - DNA, 1375 bp, Homo sapiens
atataaataattatcttcagacaatactataaacggggaattaccttaattaagtttttggaaatgatggcttatgtatgtttctataactccctagcactctaaatttcctcctggggtgattcaactacaaagaagaatggctgaaatataggtaggtagtagatgtggtggtgcaaagcatagtgtggaacctggagtgagtctgtgctaagcacatcttaggctttgggcttctgaggagaccatttagtagttttgcctctggataccttctatccttactgttcacaaagctgggaggaaggacagccccgccacctagaaagtagcctgattcctggctaagcttctggcaaagacagtggcccagccaggtgagccaagtgccatagcccaataactagggaaactgcttctgcttgctttctgtttagccttgagcatggctctcaatgtcagctgattggataattcctagcttagttttcaccacctgtcaattctctgctgcccagaaagagtccatcaatcgagcttccacaaatgctaaaggaaccggtggcagctgatggaatcgggcaaagatcatgtaaaaaattaaacccagtaccagcctggccaacatggtgaaacccctctctaccaaaaaaatacaaaaattagccgagtgcaggcgtggtggcacacacctgtagtcccagctactccggaggccgaggcgggaaaatcgtttgaaccgggaggcggaggttgcagtgagccgagatcttgccactgcactccagctgcatgagacagtgagaccctgtcttggaaaaaacaaaaaaaaacagtagtttgaggaacagaaaaccaagctaaacagccaaaatgaatggctcctgtaaggcaaatttaatgtgagaaatagaagggaacaaattaaccgggcatggttgtgcgcgcctgcagtccaagctactccagaggctgaagcgggaaaatcgcttgaaccgggaggcggaggttgcagtgagtgagccgagattgcgccactgcactctaggctggactacagagtgagactctgtctcaagaaaaaaaaaaaaagcaaacttaaaaatacgatgtgtaaaaatatggttttacagttttttgacattcaattgaattgaaaaatagaatcgatactcttaaaactcaaaccgaagaagatcaaacaggaagttgcctcatgatacgaaacaaaaatgcaaaggaagccactagtgagaagataaaagaaagggaaggaagatacaggaactgcagygtgaggtaggagttccagaaggaacagatggagaaagcaataatcaaataagactacgacttctttgggtttaaaaaaaaa

SEQ ID NO: 551130 - DNA, 1502 bp, Homo sapiens
tgtcttctgcaaaggtgtggtcattatgggattattagagactaagaggaaatgcaaatgtttgctctggaaggaaaagattcacaatgacctcccaggagactatctaaatcaacacatctcattgttgatattttcccaactgtagatctttgcatcagttttcagaaactcccatcctatccagagggaccagtttcaactcttgctattctactgcaagtgtaccacaaaggtatgtaatttccaggtgcttttcatcctgagaaatcattctgtgcaacaatggatttcatgaaattataaataggcacttgttgaatgaatggatgagagaatgaataaaagattttcaaaccccatcttgcaataacaatataaaagagttaaaggagttaataaaattggaaacagactaaatatctgtcaatggggaaatggccaaatgagtgattggccagttcattttacagaattccatatagtgataaaaagcatagtcagacatacacatattggcttagaaagctctatatgccatattttttaagattaaaaaaagcaagatgcaggaaggtatatagagtatgttactatacataaagcaaacaaatgaaaaccataaaacatgtatgtaactgcataggaaaatgtctggaaggatacacataggtttaactggaagagggtcaggattggtgggggtaataattgaggggagtgaaagcattttgtgtactattaaaaattttttaacaaagtcagtatatctaatttcttccaccattaagtattacttaaaaagttaatgatattttcatgatgatatgaaaatatgtttaatgaccaatcaatacttatattcttggtcaagagactgaagcctttggaaagcaggaactgtgttcatttttgagccatgtgtacctagcatagaacctagaacatgacagatattcaataaatatatgtataaatgggtaggataaacatttgtacagtgaagtcactatgataacagattaaatctttcatgcaactttagatttctcaccagaatttttttcttccttgaacctctttatattcaggtgtctgtgtcagtgtaatcaagtgattggcattcctgattcccctggtaatcccatgattaagatatccaaatggagccatctccagttcacgttataagtttcaataatcaattgcactgcatggtgaccacagttaatattaacttattgtgatttcaaaaatgctaagagaatattatttcagatgttctcaccacaagtgatgtagtgggtgttttaattggctcgattgaatatttctacaacatatacatagaacaaaacttcacactgtactccatagatacacacaattattatttgtcaattaaaaattttagttttttttttttwaaaaagagacacaaaataattaaagaaaaaaaagaaagtgtgaacatgatgctggttgtatctggtaagtgggcg

SEQ ID NO: 551131 - DNA, 521 bp, Homo sapiens
gcacccaggactttagatgaattgagggctatatgtatctgcgaaatgcggacaaaaacagtgtctgaatggatgatgggggtattggtgaacatagccaagagatcataattaactggttgctaaggaagattttgctctcaagtgcctttgccaaatacaaaatctcctcaagttatgagctcaatttaattattttgttaaatcctttttaatgttttttggactccaggagtgatagagtggtgatagtccagaattctggattctgtcctacagaacattgacaaaatgctttcagtcatcatctttcatgacaaaggrctgttactgagacttcagatgttattcagtggtccaattacctctcgctctggtgctatgcaggttgccattacaataaacagtaagaatgacattagcagagcctctcagagatagaaagctccaatttttaggtcaccatcatatcaaaaattaaaaaaaaagtgttataatttttttaatatttaaatgttttt

SEQ ID NO: 551132 - DNA, 545 bp, Homo sapiens
atgatgtgaatgcataactgacttcttcctccctcccttcttttcacatgtaaaatgtagattcactaaggactaatcacagcctcacaagtatgtaaccactcgcatcattgcctacctgtccttcctttttttttctttcctctcctgcttgccctttctcctttaaatattgaaggtcccaaaatcctccttggaaaaagcacaggtcacaggtcctattgtggcttatgtttcttttcccccagcatattttcaaccttggcaaaatgaacacygaattgattgagatctgcctcagtcactttttggtttacaaagctaaattaattacatttgtaaattaaaaacaaggggccaggtgcagtggctcatgcctgtaatcctagcactttgggaggccgaggtgggtgaatcacctgaggtcaggagaccagccttgccaacatggcaaaaccctgtctttactaaaaatacaaaaattggccaggcatggtggcaggcacctgtcatcccagctactcgggaggctgaggcaggaggca

SEQ ID NO: 551133 - DNA, 549 bp, Homo sapiens
cagcccctgctactgtgtcctgtccccatttgctgaagtcagactgcacaatctaagctgatcccaattggctatttcaaatggagcaggagtgtgagtaagtagggcgggaagggctgtttcagcgagaagagagaggccatcctttactgtgcaaaacatgtcagggcatggcaaaggcaggaagagccctctgcaagttacagattggaactggygggagttggtgtttacagagcgggtaactaggaacaagagagtacaaggaagttgggttttagaaatagaaaacaaagaacaaggaagttgaagaagctgaacctttgaagaggaacttactgtatctaacagaacaaatgaggcttctgcaagacaattgaaatgatacactcataacaatccttcatgaaagtaacatattagccacctgagtttctgctttaggttatgaactccaaaatggactggcccccagtaatttacagtaggtagtcctaagccataaataaatagaatctgtgaatattagctttgttcatctgtaagaac

SEQ ID NO: 551134 - DNA, 549 bp, Homo sapiens
cagcccctgctactgtgtcctgtccccatttgctgaagtcagactgcacaatctaagctgatcccaattggctatttcaaatggagcaggagtgtgagtaagtagggcgggaagggctgtttcagcgagaagagagaggccatcctttactgtgcaaaacatgtcagggcatggcaaaggcaggaagagccctctgcaagttacagattggaactggtgggagttggtgtttacagagcgggtaactaggaacaagagagtacaaggaagttgggttttagaaatagaaaacaaagaacaaggaagttgaagaagctgaacctttgaagaggaacttactktatctaacagaacaaatgaggcttctgcaagacaattgaaatgatacactcataacaatccttcatgaaagtaacatattagccacctgagtttctgctttaggttatgaactccaaaatggactggcccccagtaatttacagtaggtagtcctaagccataaataaatagaatctgtgaatattagctttgttcatctgtaagaac

SEQ ID NO: 551135 - DNA, 633 bp, Homo sapiens
tggactaagaatataagtaaacagttcacagaaaaatagccaataaacacatgaaaacatgttcaacttcctttgtaatttcaacatgcaaagcaaaacagaatgacatcactttacacatctcaattttctaaaaccatacaggtttttaacacctcaggctggtgagctgaggagaaacaggccccttcatgcagtgtgggtggaggggccccttctcccagtggcagtttagcaactggtctctccaacgtttaaatgcaccaaatggtctcaataaatccccttcaagggatttctctaaggatacaattgaaagaacataaaagttctaaaagcaagatgctcatgatagaattttgaaacagcaacagcagcaacaaaaatggaacgaactaaattttcttcattagagaactggcagataaattacctgcaacatctatacagtggggtactagcagctgttacagcgatggcagagacctttaagtagtgataatrccaagattcatgagctctattaatagctgaaaaaaagcaaggtgcagctcagtgtggacactgggattccatgtgtgttttaaaatatctgtgggtacatttttctctgatttctaagaatattaacac

SEQ ID NO: 551136 - DNA, 690 bp, Homo sapiens
ctccatgttggtcaggctggtctcgaactcctgacctcaggtgatccgcccaccttggccccccaaagtgctgggattacaggcctgagccagcatgcccaaccaacattcttttctaaagcatgttggtcagaagcagtccaccacggaggggatgaacaacagtatacagtcatggtctttcatcagggctatgttaattctgttctctgtcaygatgtaatctaaaaaatgtggaccatttgcacattctgcagagtatcacattggtccaccatcttgtaactttacatccttcagacgtctttttttttttttttttctttttttaaagacagagtctccctctgttgcccaggctgaagtgcatggtgcaatctcagctcactgcaacctctctgtctcccggattcaagcgattctcctgcctcagcctcccgagtagctgggattacaggcacacaccactatacctggctaatttttttgtatttttagtacagacgaggtttcaccatgttggccaggatggtcttgatctcctgacctcgtgatccgcccacctaggccttccaaagtgctgggattacaggtgtgagccaccggacatcttttaagtagaatgaagactacttagaggtaggaaccaaccctaccttggtgatttttgttcctccaaatatctttgca

SEQ ID NO: 551137 - DNA, 1461 bp, Homo sapiens
tatcctgaagaagaaaaggcccttaaatattatcgtctaaacaaacgtatagatcactgtttgaagtaaataataaagtgaatactttcaaatgtgattaaatagcccaagtcactgaaaatttgaaattatagttaacttttttgtctgtgatcttatgtatgtatagaaaaatttaaatatataattatatactgattacaaattccataataaatgtccttttattttactcattatttgaattattccatttactctgttttcatagtcataattttatgatattttgttgttaatggattatatttgaaaactatcaaattagatagaacacattgtatggttgaagaaattgatttggtacttgaaagaaagacttcttactgcctagaggtagttggaaaaatttttccttttgttgtatttatgaaagcccatggcctatggcctttaattttcttaatcaacccaaccacatcaggatagaggtagaatttctgtgaaagaagagacagtaagagttcctaaagttttatctggcatacagataggcctatattcaaaacatcttagtcatgtggctacagattcaaagtggaatcactaagtaatttgcactacatttctaatatgggtttaggtaagtatccaaacaagacaaatgctgcgtaaggaaagaagctggcaagctgaaggttaaacaaaaataaaagtactttacatgtaaaaaatgcattggaattttgagattgcattaaatctgtagatcactgttgtaagcactgacaaacacccatgatatggattgaatctataatattattaaaagacccatatatttttaaggtttaaaatcctaaaatgtaaattgtctcatataactggaaaatccaggggtaagatagccttcaggcaaagttagtttggggagatcgtcagatctgccttctgtctgggagcttcatatttataaagtttctaaagcttgttagtaaagacagcttcagggacttccagctttatctctacagcttattatgccaaaggaaaagagcatattaaaataattttaatttcaacaaatccctatggtattggttacagaccaacattatcaaccttgaggagatgttaaaaatataacagacctattgggaaacaatgtgtgtatctgtagsgcaaacccatcacttggacactacagtgagctttctgtatcctatttattctcctctttctgggttcacaggaaattgcatttccaagtctttcttgcactgaagtgagagtatatgataatacttttgcatatttttcataaaagactgtttaataacaaaatgtaatagttctcctttttcattcatgtggattggtgaaagtagatgactgtaatatagtgtaccagctttttgtaaaaaacatgcagcccaaattaaaaggttgtgcctagacaaa

SEQ ID NO: 551138 - DNA, 1461 bp, Homo sapiens
tatcctgaagaagaaaaggcccttaaatattatcgtctaaacaaacgtatagatcactgtttgaagtaaataataaagtgaatactttcaaatgtgattaaatagcccaagtcactgaaaatttgaaattatagttaacttttttgtctgtgatcttatgtatgtatagaaaaatttaaatatataattatatactgattacaaattccataataaatgtccttttattttactcattatttgaattattccatttactctgttttcatagtcataattttatgatattttgttgttaatggattatatttgaaaactatcaaattagatagaacacattgtatggttgaagaaattgatttggtacttgaaagaaagacttcttactgcctagaggtagttggaaaaatttttccttttgttgtatttatgaaagcccatggcctatggcctttaattttcttaatcaacccaaccacatcaggatagaggtagaatttctgtgaaagaagagacagtaagagttcctaaagttttatctggcatacagataggcctatattcaaaacatcttagtcatgtggctacagattcaaagtggaatcactaagtaatttgcactacatttctaatatgggtttaggtaagtatccaaacaagacaaatgctgcgtaaggaaagaagctggcaagctgaaggttaaacaaaaataaaagtactttacatgtaaaaaatgcattggaattttgagattgcattaaatctgtagatcactgttgtaagcactgacaaacacccatgatatggattgaatctataatattattaaaagacccatatatttttaaggtttaaaatcctaaaatgtaaattgtctcatataactggaaaatccaggggtaagatagccttcaggcaaagttagtttggggagatcgtcagatctgccttctgtctgggagcttcatatttataaagtttctaaagcttgttagtaaagacagcttcagggacttccagctttatctctacagcttattatgccaaaggaaaagagcatattaaaataattttaatttcaacaaatccctatggtattggttacagaccaacattatcaaccttgaggagatgttaaaaatataacagacctattgggaaacaatgtgtgtatctgtagcgcaaacccatcacttggacactrcagtgagctttctgtatcctatttattctcctctttctgggttcacaggaaattgcatttccaagtctttcttgcactgaagtgagagtatatgataatacttttgcatatttttcataaaagactgtttaataacaaaatgtaatagttctcctttttcattcatgtggattggtgaaagtagatgactgtaatatagtgtaccagctttttgtaaaaaacatgcagcccaaattaaaaggttgtgcctagacaaa

SEQ ID NO: 551139 - DNA, 597 bp, Homo sapiens
tggcctcttttcactcccttttccttcatagttaaagagtttttggtgttctctccttatttcttatttatcaaacagccctttcaccttatttatctcaagaggagttggtttttagtccactgaaaactcttctttttctcccccttttttttcaaacaaacatctatacaagccagggtttctgatgggcagaagctgggcctacagaatagttcttctacttgtagacattctgggcttctgagttacacaggtgacctcccaggatgaggttcttactacytttggaaaattgcattttccaaaatggccactgcagtttctcccacccctcatgcacttgttacaatcaggggtttttagttttgttttgctttgttttcatttgtttgttttttgagatggagcctcactgttgcccaggctggagtgcagtggcatgatttcggctctctgcaatctctgccttcccgatccaagcaattctcctgtctcagcctcccgagtacctgggactgcagtcgtggaccaccacacctggctaatttttgtatttttagtagagatggggtttcactatgttggccaggctag

SEQ ID NO: 551140 - DNA, 1475 bp, Homo sapiens
gatccagagccagaaacaagttgtatgttgactccataaacaagctttcaacttcactctaatggaggtgtcatggtggagatgggagcaatgcaagatggactcggagatccaggatgggggcagcttcccattgtctgagcacagagccagccacagcaggcagatgactctgcttgcctgtggggtgggtcagttgcctctgaagttggacccagcatgcactgagtcacaatcctgggttcttgattctagacatcccttgaagagcccccaatatctcatgacaacttctggaaccgttcctagagatggattttctgagacaaagccacggaggaactgctgcttcttgtccctggtgagtggctgaagcctcccagcccatcctgccctctgcccctccttctctggtgctccactaaccacagaggtgggaatgcttaagatagctctgctggagaatgctggggtcaggaactccgggaaagaatgtcaaatatgagagggttctgctgacacgatttaagatgtgggtggctggaagctgcaggggatttttgattaaaagagtttccagagatacttcttcaaggtcagtgacaggagggtccaggcacatctcatgcctcctgccaagaattccagaggccaagaccctcttctgggagctgaggttggagagtttcccatggagccccctgatgggacaaattccatctttacccatattttcctcctctagaagtcaaagctgagggagaccccagcttggggtgatagaaaacaggcaggcgctgagacaagcagacatgggtttgaattccagctcctgccacttactaactgtgtgatcctgggcaactgacttaacctctctgagcatgtttcttcagctatgaaagtagatttgaagataaaatcaaggaactgtatacagtgcatggcatatatgctaggcacacatggtcatttcccttgtggtctcagctggccaggcatccagcaaagctaccctctgctgtagttcactgtcttaccaatcaactgttgagccatttcttcaaaagacagctamtggggcaggattatacacatggatctcactaccaactggaacagaccagtcagatttcattcattcattcattcattcatgtaacaacgagttattggaaactactatctgccagtcactgtcatgggcgctagggatgtggcaatgagccaaacagattcccactgagcttgcactctggtggagacaaaaataaataatcatatatatatatatgtgtgtgtgtgtgtgtgtgtgtacgtatatatatgtgtatatatgtcaattaatgataagtgctaaataaataaataaagcagtgcatggggccagaagtgctgggaagggacacacggaaggcaggaggtggtattttaaataaaaatatcagtgaaggtctcgaataagatgactttta

SEQ ID NO: 551141 - DNA, 627 bp, Homo sapiens
gcaattaatatttttcaactttataataattaatgctaccttaaacttgtataagttgagggtaatttccatttatgtaaaagcatatgtcctatctttccttccctctttgttaaacttttgatgaactttttttgtgtttcctcataggctgtaagatatttagaggtagagatattctctaatttaacccttcttattttcccatttagttgtgttttgtggctgtttccttcaacacatactataatgtacaaatttttctcttacttggacagctgttgaaaagtactgaaaaatattcagatttctattttcttgcatgctggcacatttattacaataatataattgctattaccatcttttttgcatggataaaggtatttatatttcattatattacataatacaagcagtgtaatagcataatgaaaaattaaactaaaaagccatggggaaaaaagattttttcaaytattaagtaattttaaaagtagtttgggccagcacagtggctcacacctgtactcctagcactttggaaggccaaggcaggtagattcttggccccaggagtttgagaccagcctgggaaatcctatctctacaaaaaatatcaaaaaa

SEQ ID NO: 551142 - DNA, 534 bp, Homo sapiens
cccagagttgtttaaaagagagttttctggttttattgtatttgatcagacagtgtgaaggaattatttacatacagtaaactggatamatataaattgtacagtttgatgacacttgcatatacccatgaaactgtcaccacaatcaagacacatttagtatttctatcaccccaaaagattgcgtgtgtctctttccatctatcctactctccactcccagttccaaacaaacatgaatctgatctttattttttattaatttgcatctaaagtaaatggaatcattcagtatgtattttgttatgtctggcttatttcactcaggataatcatcttgaaatttatctgtattgttgcatgtatgaatgcaacatttcatttatccattcacctggtgatggacatttgggttgtttccagtttggggctattataaataaagttgctatgcagctgtcatgtacaggactttgtgtgaacatatatttttatttttggggggtaaatacttaagatggaagaactgagtta

SEQ ID NO: 551143 - DNA, 537 bp, Homo sapiens
caaaacagatggggcatgaccagtgtgcaggctcagctcccactgccctgctgacaaatgaggccagctcttcacctctcacgaatttccttgatttttgtttccaattgtttgytatttactttttctgtaagggccagatagtaaatgctttagtctctgcaggcagtactgtcactgccacaactacttaactccaccgtcataccaccaaataaaccatagatgctatgtaaatgaataagcgtggctatgctctaataaaacctatgtacaaacacaggcagtgggccagatttgacccatgggccatagtttccaaagtcctgctttagacttttctgtgaattaggcgtgcattttttacatcctcaaataccttagcctcataaaactaaagtcttcatttgtgagtttatgtatgtgtgtataaatgtgtgtgtgtatgtgtgtgtatatatatattcccctaatacattcaaaatatttaactaaaagaaaatgttttaagttatttcatattccacctgaatccct

SEQ ID NO: 551144 - DNA, 537 bp, Homo sapiens
caaaacagatggggcatgaccagtgtgcaggctcagctcccactgccctgctgacaaatgaggccagctcttcacctctcacgaatttccttgatttttgtttccaattgtttgctatttactttttctgtaagggccagatagtaaatgctttagtctctgcaggcagtactgtcactgccacaactacttaactccaccgtcataccaccaaataaaccatagatgctatgtaaatgaataagcrtggctatgctctaataaaacctatgtacaaacacaggcagtgggccagatttgacccatgggccatagtttccaaagtcctgctttagacttttctgtgaattaggcgtgcattttttacatcctcaaataccttagcctcataaaactaaagtcttcatttgtgagtttatgtatgtgtgtataaatgtgtgtgtgtatgtgtgtgtatatatatattcccctaatacattcaaaatatttaactaaaagaaaatgttttaagttatttcatattccacctgaatccct

SEQ ID NO: 551145 - DNA, 537 bp, Homo sapiens
caaaacagatggggcatgaccagtgtgcaggctcagctcccactgccctgctgacaaatgaggccagctcttcacctctcacgaatttccttgatttttgtttccaattgtttgctatttactttttctgtaagggccagatagtaaatgctttagtctctgcaggcagtactgtcactgccacaactacttaactccaccgtcataccaccaaataaaccatagatgctatgtaaatgaataagcgtggctatgctctaataaaacctatgtacaaacacaggcagtgggccagatttgacccatgggccatagtttccaaagtcctgctttagacttttctgtgaattaggcgtgcattttttacatcctcaaataccttagcctcataaaactaaagtcttcatttgtgagtttatgtatgtrtgtataaatgtgtgtgtgtatgtgtgtgtatatatatattcccctaatacattcaaaatatttaactaaaagaaaatgttttaagttatttcatattccacctgaatccct

SEQ ID NO: 551146 - DNA, 537 bp, Homo sapiens
caaaacagatggggcatgaccagtgtgcaggctcagctcccactgccctgctgacaaatgaggccagctcttcacctctcacgaatttccttgatttttgtttccaattgtttgctatttactttttctgtaagggccagatagtaaatgctttagtctctgcaggcagtactgtcactgccacaactacttaactccaccgtcataccaccaaataaaccatagatgctatgtaaatgaataagcgtggctatgctctaataaaacctatgtacaaacacaggcagtgggccagatttgacccatgggccatagtttccaaagtcctgctttagacttttctgtgaattaggcgtgcattttttacatcctcaaataccttagcctcataaaactaaagtcttcatttgtgagtttatgtatgtgtgtataaatgtgtgtgtgtrtgtgtgtgtatatatatattcccctaatacattcaaaatatttaactaaaagaaaatgttttaagttatttcatattccacctgaatccct

SEQ ID NO: 551147 - DNA, 552 bp, Homo sapiens
cagaaaccactacagtacatgtataactatgtaacaaacctgtacgtcatgcacatgtatcccagaagttaaagtaaattttttttaaaaagtgtatatatatatatatatacacacacacacacactgttcaaaacagcacatatatatatatatatatatwtatttatttatttataatcaagcccataaagggcttaacatatgttaattgaagtggacattcattggcctgtcccacaagccaaatactctcccttctcaagtactttctccttccctaaacacgtaagtaaatttcgatcttctagtcagctgtattgatatcattcagctataaaaaaagtactgatacgtgcaacaacatggatgaaccttgaaaacatcatgctacgtgacataaggcagatacaaatggtcacgtattgtattgttccatttatacgacgtgtctagaacaagcacatggccataagagacagaaaatagattagtggttgtttgggtctggggagggttggggaaggatgggtaggtaacatttaaggttac

SEQ ID NO: 551148 - DNA, 552 bp, Homo sapiens
cagaaaccactacagtacatgtataactatgtaacaaacctgtacgtcatgcacatgtatcccagaagttaaagtaaattttttttaaaaagtgtatatatatatatatatacacacacacacacactgttcaaaacagcacatatatatatatatatatatttatttatttatttataatcaagcccataaagggcttaacataygttaattgaagtggacattcattggcctgtcccacaagccaaatactctcccttctcaagtactttctccttccctaaacacgtaagtaaatttcgatcttctagtcagctgtattgatatcattcagctataaaaaaagtactgatacgtgcaacaacatggatgaaccttgaaaacatcatgctacgtgacataaggcagatacaaatggtcacgtattgtattgttccatttatacgacgtgtctagaacaagcacatggccataagagacagaaaatagattagtggttgtttgggtctggggagggttggggaaggatgggtaggtaacatttaaggttac

SEQ ID NO: 551149 - DNA, 1216 bp, Homo sapiens
ggaggtcatattttaatagcatccatgtaagaaatgcagggcttttccaagagacatgtaagaaatttggagtcccctactaagtttttatgagtaaagaacgcataacactgggacaatattttttttttgccaaagtatttttcttaagttttaatatctttggcataattaacttgaatctctgcctgacaaacatctcaatcaaatgtgtataataattcagtgccaatggtgtagcagtggcttagaccataaaagtgcaaggaatggggaacattaaaaatggtgaatgtagttgttacctcaagaaaattgtagtcttgttgctctaaactacatgtataaaagtgagcaataggtcctttattcagcatcccctagcaatttttaggaatatcagggtgtttgcacaaacaagaaaaatatatttctgttgattttcaatctgaaactttcaggattgcatttacttccctgttttccactaaatctgatgcacaagcaaatcactgttaaacatgttcggattctgcattaactccttcaaatcagattcttcatttagtcctttaatttatctaagtttttcctggagacttgaaagaattcgtgcacgttgcaaacacgaattactttttatatttgggaattggcctgaaactaggaaatatgatccttaaagactaggctcagaggtcaatgacacaagcacccatggtgccattctcaagatgctacaatgatttggaaacaagtgacctattgtctagtttctaccaatctagtgaaacctagtcactcatggcaattaatctatacccagactgattggatcttggtttaaacttgactctcattgttattctcagccatgtttagactacaacattatgggatagctctctgacatttaaatataatgcaagccacaawtgtgttctgcaaatgtcaagttaaagctttgtagtagccatatcagaaacataaaaacataatattaattttaataatttattttattcaatataccccatatattaacagttcaaaatgtcatttatatttttaaaacactaaggaataaatttttcttactaagcctttctttttttttcttgagacagagtctcacactgtcatgcagcctgctgaagtgcagtggcacaatcttggcacgatcttggctcactacagcctccatttcccaggctca

SEQ ID NO: 551150 - DNA, 654 bp, Homo sapiens
ctcctgttttacaagaaatcaaaatagttctgcaagaagtacaaagaaaatttcrgcaactggttttaatttgaaacagtaaaggctagaggaatcgtgttgtcacgggaaagacaaaagatatgtcactttaagttttactcctcacaacactctaaggccatgaagtagtacctatgatgaaagcatttggctacaaccccagagagatgcaggatgtagcattcccacactgagcaagctaaaatccagacaaaaggattatatacagccaaactttcttggattaaaagcaggctggagagaaaacaaaataaggaaaatcagcctgaattcagtagtttcaaaagataataagaattaactttacaggaaataattcaccataaatgcagatatcagtatacttcctcagcctagttaataattaaagtcataacatttaactgtaaatcttgcctttcaattgcattttgaagggctaattatgagacctttatagacaaagaggagaaccaaggagaattcacgtttagtgtttttgagcagatggaatacctggttagagctgccccaatacaaagtcagtcttataaaaactcatgaagaaactctgcaacataaacatgaaactaaacataatatgcaaagtac

SEQ ID NO: 551151 - DNA, 654 bp, Homo sapiens
ctcctgttttacaagaaatcaaaatagttctgcaagaagtacaaagaaaatttcagcaactggttttaatttgaaacagtaaaggctagaggaatcgtgttgtcacgggaaagacaaaagatatgtcactttaagttttactcctcacaacactctaaggccatgaagtagtacctatgatgaaagcatttggctacaaccccagagagatgcaggatgtagcattcccacactgagcaagctaaaatccagacaaaaggattatatacagccaaactttcttggattaaaagcaggctggagagaaaacaaaataaggaaaatcagcctgaattyagtagtttcaaaagataataagaattaactttacaggaaataattcaccataaatgcagatatcagtatacttcctcagcctagttaataattaaagtcataacatttaactgtaaatcttgcctttcaattgcattttgaagggctaattatgagacctttatagacaaagaggagaaccaaggagaattcacgtttagtgtttttgagcagatggaatacctggttagagctgccccaatacaaagtcagtcttataaaaactcatgaagaaactctgcaacataaacatgaaactaaacataatatgcaaagtac

SEQ ID NO: 551152 - DNA, 1526 bp, Homo sapiens
gtgttggaactgtttcatctgggaacaggaaagaaagttctgcctccgacactgaaatcctcctgccccatccttgacagaggcaaccccttgtcttgtgcagacacacgtgttcctgggaagcagcctcccactcgcgaatgaaagctgtatgttttgtcctcctgtgtgaggcttgcaaaacatattccgcaactatattcgctttacgttctaaaccttaggcaaactatgctgaagaggccacagaaaatttaggggccctgggctccagatacaatctgcagtgccaatcacgagggagaatagagcctcactagactttgcaagagcacaaaatgcactcgtactgttgttagctacatacgttattggctcctcacctaacacagaatcttggagaaaagcttaaaacaactaaagatgtaaacatcaacaagagtgtccatatcctgggtcatcaagtgacaagagagtccatggatggattctccaacaatcttatattccactaatccaccccctttcccctcacttctgtaagtttctgttttcccttagtcatctctgccaaaagcgtatcctgaatgccttcccacatgcctctgtcacctttcccacagtccctccatacaccttacatgcccatttcttctcacgttgatgtttcagaagtcctgagaggctgattgtcccagaaaaggatcatgcattcacctttaaaagaacatgtggattcaacacggaagcgaactttaagatttccatcatcctgtgcttagctactgtgtatgatgatacccaaaatgaaggattttggaggtcccagcaaactgggccctggaaacccagtaacccctttccttgaactatctctgcttccataggacgaagtcagcctccaactaagctgtcttttgcttttacctctcccactctgtcctgtaggaagaatcccaacacatcccacacccattcactctacaactttagaggcccagctccaacgcagactggttatttccatkaagagaataaagcacgtggattgatcaattcattatgacacccgaataaagtggaaaaacatacacacacacacacacacacacacacacacaaagacacacacacacacacacacagacacagagtcacacatccttgagaatgtttatttttcattccatacaatccacatttaccccctcttcctgaatttttgtgactcgatctctttttcctttagttcctgtgcataagaccatgctgagtactgccgtcctgcatatggctgtaactttttaggagttctgctgtattaggtaaaatctgatgctccatcatattcaactcaacaactgggagtcccctagagaaacacaaactcatgttaaaacgcattttctctgagccatactttgaaatgtttcaattgtggggcccgctgagaaaaggatatcccttccccatttgtgatcccttaaacttcctcctaccacgtgttacaaactgttctgcgcaat

SEQ ID NO: 551153 - DNA, 1526 bp, Homo sapiens
gtgttggaactgtttcatctgggaacaggaaagaaagttctgcctccgacactgaaatcctcctgccccatccttgacagaggcaaccccttgtcttgtgcagacacacgtgttcctgggaagcagcctcccactcgcgaatgaaagctgtatgttttgtcctcctgtgtgaggcttgcaaaacatattccgcaactatattcgctttacgttctaaaccttaggcaaactatgctgaagaggccacagaaaatttaggggccctgggctccagatacaatctgcagtgccaatcacgagggagaatagagcctcactagactttgcaagagcacaaaatgcactcgtactgttgttagctacatacgttattggctcctcacctaacacagaatcttggagaaaagcttaaaacaactaaagatgtaaacatcaacaagagtgtccatatcctgggtcatcaagtgacaagagagtccatggatggattctccaacaatcttatattccactaatccaccccctttcccctcacttctgtaagtttctgttttcccttagtcatctctgccaaaagcgtatcctgaatgccttcccacatgcctctgtcacctttcccacagtccctccatacaccttacatgcccatttcttctcacgttgatgtttcagaagtcctgagaggctgattgtcccagaaaaggatcatgcattcacctttaaaagaacatgtggattcaacacggaagcgaactttaagatttccatcatcctgtgcttagctactgtgtatgatgatacccaaaatgaaggattttggaggtcccagcaaactgggccctggaaacccagtaacccctttccttgaactatctctgcttccataggacgaagtcagcctccaactaagctgtcttttgcttttacctctcccactctgtcctgtaggaagaatcccaacacatcccacacccattcactctacaactttagaggcccagctccaacgcagactggttatttccatgaagagaataaagcacgtggattgatcaattcattatgacacccgaataaagtggawaaacatacacacacacacacacacacacacacacacaaagacacacacacacacacacacagacacagagtcacacatccttgagaatgtttatttttcattccatacaatccacatttaccccctcttcctgaatttttgtgactcgatctctttttcctttagttcctgtgcataagaccatgctgagtactgccgtcctgcatatggctgtaactttttaggagttctgctgtattaggtaaaatctgatgctccatcatattcaactcaacaactgggagtcccctagagaaacacaaactcatgttaaaacgcattttctctgagccatactttgaaatgtttcaattgtggggcccgctgagaaaaggatatcccttccccatttgtgatcccttaaacttcctcctaccacgtgttacaaactgttctgcgcaat

SEQ ID NO: 551154 - DNA, 1526 bp, Homo sapiens
gtgttggaactgtttcatctgggaacaggaaagaaagttctgcctccgacactgaaatcctcctgccccatccttgacagaggcaaccccttgtcttgtgcagacacacgtgttcctgggaagcagcctcccactcgcgaatgaaagctgtatgttttgtcctcctgtgtgaggcttgcaaaacatattccgcaactatattcgctttacgttctaaaccttaggcaaactatgctgaagaggccacagaaaatttaggggccctgggctccagatacaatctgcagtgccaatcacgagggagaatagagcctcactagactttgcaagagcacaaaatgcactcgtactgttgttagctacatacgttattggctcctcacctaacacagaatcttggagaaaagcttaaaacaactaaagatgtaaacatcaacaagagtgtccatatcctgggtcatcaagtgacaagagagtccatggatggattctccaacaatcttatattccactaatccaccccctttcccctcacttctgtaagtttctgttttcccttagtcatctctgccaaaagcgtatcctgaatgccttcccacatgcctctgtcacctttcccacagtccctccatacaccttacatgcccatttcttctcacgttgatgtttcagaagtcctgagaggctgattgtcccagaaaaggatcatgcattcacctttaaaagaacatgtggattcaacacggaagcgaactttaagatttccatcatcctgtgcttagctactgtgtatgatgatacccaaaatgaaggattttggaggtcccagcaaactgggccctggaaacccagtaacccctttccttgaactatctctgcttccataggacgaagtcagcctccaactaagctgtcttttgcttttacctctcccactctgtcctgtaggaagaatcccaacacatcccacacccattcactctacaactttagaggcccagctccaacgcagactggttatttccatgaagagaataaagcacgtggattgatcaattcattatgacacccgaataaagtggaaaaacatacacacacacacacacacacacmcacacacaaagacacacacacacacacacacagacacagagtcacacatccttgagaatgtttatttttcattccatacaatccacatttaccccctcttcctgaatttttgtgactcgatctctttttcctttagttcctgtgcataagaccatgctgagtactgccgtcctgcatatggctgtaactttttaggagttctgctgtattaggtaaaatctgatgctccatcatattcaactcaacaactgggagtcccctagagaaacacaaactcatgttaaaacgcattttctctgagccatactttgaaatgtttcaattgtggggcccgctgagaaaaggatatcccttccccatttgtgatcccttaaacttcctcctaccacgtgttacaaactgttctgcgcaat

SEQ ID NO: 551155 - DNA, 1526 bp, Homo sapiens
gtgttggaactgtttcatctgggaacaggaaagaaagttctgcctccgacactgaaatcctcctgccccatccttgacagaggcaaccccttgtcttgtgcagacacacgtgttcctgggaagcagcctcccactcgcgaatgaaagctgtatgttttgtcctcctgtgtgaggcttgcaaaacatattccgcaactatattcgctttacgttctaaaccttaggcaaactatgctgaagaggccacagaaaatttaggggccctgggctccagatacaatctgcagtgccaatcacgagggagaatagagcctcactagactttgcaagagcacaaaatgcactcgtactgttgttagctacatacgttattggctcctcacctaacacagaatcttggagaaaagcttaaaacaactaaagatgtaaacatcaacaagagtgtccatatcctgggtcatcaagtgacaagagagtccatggatggattctccaacaatcttatattccactaatccaccccctttcccctcacttctgtaagtttctgttttcccttagtcatctctgccaaaagcgtatcctgaatgccttcccacatgcctctgtcacctttcccacagtccctccatacaccttacatgcccatttcttctcacgttgatgtttcagaagtcctgagaggctgattgtcccagaaaaggatcatgcattcacctttaaaagaacatgtggattcaacacggaagcgaactttaagatttccatcatcctgtgcttagctactgtgtatgatgatacccaaaatgaaggattttggaggtcccagcaaactgggccctggaaacccagtaacccctttccttgaactatctctgcttccataggacgaagtcagcctccaactaagctgtcttttgcttttacctctcccactctgtcctgtaggaagaatcccaacacatcccacacccattcactctacaactttagaggcccagctccaacgcagactggttatttccatgaagagaataaagcacgtggattgatcaattcattatgacacccgaataaagtggaaaaacatacacacacacacacacacacacamacacacaaagacacacacacacacacacacagacacagagtcacacatccttgagaatgtttatttttcattccatacaatccacatttaccccctcttcctgaatttttgtgactcgatctctttttcctttagttcctgtgcataagaccatgctgagtactgccgtcctgcatatggctgtaactttttaggagttctgctgtattaggtaaaatctgatgctccatcatattcaactcaacaactgggagtcccctagagaaacacaaactcatgttaaaacgcattttctctgagccatactttgaaatgtttcaattgtggggcccgctgagaaaaggatatcccttccccatttgtgatcccttaaacttcctcctaccacgtgttacaaactgttctgcgcaat

SEQ ID NO: 551156 - DNA, 1526 bp, Homo sapiens
gtgttggaactgtttcatctgggaacaggaaagaaagttctgcctccgacactgaaatcctcctgccccatccttgacagaggcaaccccttgtcttgtgcagacacacgtgttcctgggaagcagcctcccactcgcgaatgaaagctgtatgttttgtcctcctgtgtgaggcttgcaaaacatattccgcaactatattcgctttacgttctaaaccttaggcaaactatgctgaagaggccacagaaaatttaggggccctgggctccagatacaatctgcagtgccaatcacgagggagaatagagcctcactagactttgcaagagcacaaaatgcactcgtactgttgttagctacatacgttattggctcctcacctaacacagaatcttggagaaaagcttaaaacaactaaagatgtaaacatcaacaagagtgtccatatcctgggtcatcaagtgacaagagagtccatggatggattctccaacaatcttatattccactaatccaccccctttcccctcacttctgtaagtttctgttttcccttagtcatctctgccaaaagcgtatcctgaatgccttcccacatgcctctgtcacctttcccacagtccctccatacaccttacatgcccatttcttctcacgttgatgtttcagaagtcctgagaggctgattgtcccagaaaaggatcatgcattcacctttaaaagaacatgtggattcaacacggaagcgaactttaagatttccatcatcctgtgcttagctactgtgtatgatgatacccaaaatgaaggattttggaggtcccagcaaactgggccctggaaacccagtaacccctttccttgaactatctctgcttccataggacgaagtcagcctccaactaagctgtcttttgcttttacctctcccactctgtcctgtaggaagaatcccaacacatcccacacccattcactctacaactttagaggcccagctccaacgcagactggttatttccatgaagagaataaagcacgtggattgatcaattcattatgacacccgaataaagtggaaaaacatacacacacacacacacacacacacacacwcaaagacacacacacacacacacacagacacagagtcacacatccttgagaatgtttatttttcattccatacaatccacatttaccccctcttcctgaatttttgtgactcgatctctttttcctttagttcctgtgcataagaccatgctgagtactgccgtcctgcatatggctgtaactttttaggagttctgctgtattaggtaaaatctgatgctccatcatattcaactcaacaactgggagtcccctagagaaacacaaactcatgttaaaacgcattttctctgagccatactttgaaatgtttcaattgtggggcccgctgagaaaaggatatcccttccccatttgtgatcccttaaacttcctcctaccacgtgttacaaactgttctgcgcaat

SEQ ID NO: 551157 - DNA, 2281 bp, Homo sapiens
actaggaaggcagatccacgaagtcaccatcctaactaacacggtgaagccccatctctaataaaaatacaaaaaattagctgggcatggtggcacgtgcctgtagtcccagctactcgggaggctgaggcaggagaattgcttgaacctgggaggcagaggttgcagtgagccaagactgcaccactgcactccagcctgggtgacagggcgagaatctgtctcaaaaaaaacgaaagttgactcttgttgggtttgggatgtgggtaggatgtacttcctttgtgagacctatggctactggaaaacatcccattaataggccaaccagtcacaaactggccaaaaaagttgggccagctcccctgagccaggaggcctaccagacagggtggcaggaaatctcatctcaagaattttactgccctccacccactcaagaaaaaaatttagggtccgacatggtggctgacgcctgtaagcaacaattttggaggccaagatgggtggatcacttcagtccaggagttcaagaccagcatgggcaacgtggtgaaaccctgtctctacaaaaacaaaaattagtcaggcgtagtggtgcgcacctgtagtcccagccacttggaaggctgaggcaagaggaccacttgagcccaggaagtggaggttgcagtgacccaacatcgtgccattgcactctggcctgggtgacagagtgagactctgtctcaaaaaaaaaaaaaaaagaaaagaaaagaaaaaaaaaagatacacaggcctttatagacagttggacagctgtattaagaagaaaatgtgtggtagcttagaaagagaacatatattttttttttgagatggagtctcactctattgcccaggctagagtcagtggcacgatcttggctcaatgcaacctctgcctcccgggtttcagcgattctcctgcctcagcctcccaagtagctgggattaaggcgtgtgccaccagagaccactaatttttgtatttttagttagagatggggtttcaccatgttgcccaggatggtctcgaactcgtgacctcaagtgatccagccaccttggcctcccaaagtgctgggattacaggcgtgagccaccgcatctgcctagaaagagaacagctttttaaaagcatggctaaaacagagcctttgcctggaaagtaagtgctygtcctcatttccacaaacccaacggctggctttcagcaagtaacttgccctcactgagcctcagtttctctacctatgaatggaggaaatggaactagatggtctccaacgttccctccaaaatcaagagtgcatgagctcaataaattccttccatcaaagagcatgtgctaagcagctagaatgagcagacagagacctcaaggagtggcaccccaataggaatgagaagcaggtaagtaggtgctgctatgtgccactggaggctgtgaaaattgaggtccacacagaacacaaggaaggaaacaggaaaagttccaaagaaaatgtggcctttgaattgaatcgtgagacaagactagacagatcgtgatcacccagcagcagagaggatccagctcgcaccactcccactccccttcacctggctaagtcaaaatgcttctttggctttcctgctctctgggaagccttctttgatgtccacacctatatgtgctcccacagtaccccaggtttcttctatcagagcagtgatcctacaacaaggcaactgcctgccgtttattacaagcttcctgaaggcagggactggttttctctgtattctctgtatggataatcaagtcccagagggagttctctctcaagggcacctacagacatatatgtgaatcaggcaaggagttctgtgcacaagccaactacactacaggctccacactacagattccttcaatgtctgacaaatattcatctagcacttgctatctactaccactgtattagcactacaggttacacaatgtgaggggtgggggtacaaaacaggtagtctctgacttcatggagccgaatttaatggtaagtattaaaaagaaggccagggaagggtccactgaggaagtgatgcagtgagctgaggagcggcctggaagcccaaagagaaaacaaatggtacacgtgggaaagtcttgtgtggctgcagtaaggaaacgagtctgaaggagagaacgcaacatgcaaagcctgggagaccacactaaacatcttgatcttatctcaagggcaacaagcagcca

SEQ ID NO: 551158 - DNA, 1489 bp, Homo sapiens
cccaaagctcaccagctccattacatgagtgtccttcaagatggagcccagtggagaagagagctggcagacaaatgcccccctcttttgttccccaggtggaacaaaagtggaacaaagtccccagtgggcaactttgaagtgaatgctttgtggctcctccaaaggtcctagcagaaaggagtcctccttgttcatagccatgccccctggcttgataacatgcccttgttctggtgtaccctcctttcctgtttcactatccccaagaccccatttctgctacttgggattactccccaaaatatattacctgcacacaaatcrttgcttctggtgtccgttattatggcacccatttagaaaggagaacactggtatttggagaagttttataaacactcatagagctggattttgaactggagtcttctcagcagcatgtctgtcttctgtgccacactacggtgaggctctttgccaccctcacaagggcatgaaggatgcttctgcctggattgtcctggtcaaagaaggacacttccatctggtcaaatttccttcccttgaccatgttttacaatggcaactgggatataaataaaggcttctaaaacatctaggggacttgaatggaggggatcagggaaatggaaataattgggaaatgccaacattggtggaggggcagctttagaaaacagaaaccatggctggatgtatgtgacaaattcagcagtgcttaacagggggcttccaatacagatttggaagcttattgtagctgacatttcttgtctgtgtacacactcccagcttctgggtgatttgctactaatggtttgcacctgtgcccttcctcagagacccctccttgggctcctggcaagagttggaaagagctagaagtttacaactgtctcccacatcctcctcctagggtggccgccgctcccttgcctccagggaacacaaattctgaattataatttatgctacagagatttttacagcattccaatgaagctagggcttcccctgaaatcacacccttgcttggctttctgtcctcttctgtcttgcttgacgtactctcttaacagtatctcctgggagcacttccttaagtcattagtacatggatactcctgtcagggtttgcttctgcagaacctgacctaaaacagcaatcactttgctaagtgccaaggatgcagtgacttcagaatgctcattgtctggcagggaagagggacaagcaaacaaataattgtagcaaggcctaatgcacactgggatgaaggtacacatggaatgcaagaacactaagagctttgagcctgtctccatgtagccccaaatattggatcaggaagcaggagaatgggctttggagttagaaaggcccgagtttcaattctggtgttgcctcttacaagctgggcgctcttagataagcttggcttctctggtcctccatttcttcatc

SEQ ID NO: 551159 - DNA, 1489 bp, Homo sapiens
cccaaagctcaccagctccattacatgagtgtccttcaagatggagcccagtggagaagagagctggcagacaaatgcccccctcttttgttccccaggtggaacaaaagtggaacaaagtccccagtgggcaactttgaagtgaatgctttgtggctcctccaaaggtcctagcagaaaggagtcctccttgttcatagccatgccccctggcttgataacatgcccttgttctggtgtaccctcctttcctgtttcactatccccaagaccccatttctgctacttgggattactccccaaaatatattacctgcacacaaatcgttgcttctggtgtccgttattatggcacccatttagaaaggagaacactggtatttggagaagttttataaacactcatagagctggattttgaactggagtcttctcagcagcatgtctgtcttctgtgccacactacggtgaggctctttgccaccctcacaagggcatgaaggatgcttctgcctggattgtcctggtcaaagaaggacacttccatctggtcaaatttccttcccttgaccatgttttacaatggcaactgggatataaataaaggcttctaaaacatctaggggacttgaatggaggggatcagggaaatggaaataattgggaaatgccaacattggtggaggggcagctttagaaaacagaaaccatggctggatgtatgtgacaaattcagcagtgcttaacagggggcttccaatacagatttggaagcttattgtagctgacatttcttgtctgtgtacacactcccagcttctgggtgatttgctactaatggtttgcacctgtgcccttcctcagagacccctccttgggctcctggcaagagttggaaagagctagaagtttacaactgtctcccacatcctcctcctagggtggccgccgctcccttgcctccagggaacacaaattctgaattataatttatgctacagagatttttacagcattccaatgaagctagggcttcccctgaaatcacacccttgcttggctttctgtcctcttctgtcttgcttgacgtactctcttaacagtatctcctgggagcacttccttaagtcattagtacatggatactcctgtcagggtttgcttctgcagaacctgacctaaaacagcaatcactttgctaagtgccaaggatgcagtgacttcagaatgctcattgtctggcagggaagagggacaagcaaacaaataattgtagcaaggcctaatgcacactgggatgaaggtacacatggaatgcaagaacactaagagctttgagcctgtctycatgtagccccaaatattggatcaggaagcaggagaatgggctttggagttagaaaggcccgagtttcaattctggtgttgcctcttacaagctgggcgctcttagataagcttggcttctctggtcctccatttcttcatc

SEQ ID NO: 551160 - DNA, 536 bp, Homo sapiens
ggaaacaaaaaattcatgtgactcactttattgtgatattcatttattgtagtggtctggaactaaacccacaatatgtctgaggcatgcctgtattgcccagagagaaagttagactaaaatgaaacatactaggtgaattatagtgtaggtggcagaaaaatgtgacgagttctatgtagcatatctaccgtagtaaccttcaccacggggagccagtcagaggtaatccattgcaggggtgtctgtcgtatccaggcttcagggaacctactttgagggtataagaaatatgtctattcttctctgtttctgaggccttaaagtaaggtctgatgatcgtggagttaggtgtagcatcatgtaagaattagaagcagtcagagaggcmgggcacagtggctcatgcctgtaatcccagctactcgggaggctgaggcaggagaatcacttgaactcgggagttggaggttgcagtgagccgagatcgtgccactgcactccagcctgggtgacagagtgagactcttgtctca

SEQ ID NO: 551161 - DNA, 622 bp, Homo sapiens
caaacagtgttgaggcacactgccctgagccttcttaggctcgctcagcccccagggtcccgacagcaaggcacagaaccctctacatggcagtgtggcagagtccattgtggagggctgacccttctgagcccaaagaccagaagatgctgacatccgggattttgcaagatgaaagcccagccagatcaccctacagtgaggattagagaggataagctcttcccaaaagcatagacttctaagctgggtttagtgtgcttctcaagaatgagaagacaaggatcagcaaactcagggagataagacaagagccagaaaactagaaacaaaaattgttcaggaacattcagaaaattaaaaagttatttttgagagaaaagagaggaaaggtgagtaaagaagcatccatgagggatgtggaagttgtcaaggtcttcctcaaagaatcttcttatccacctggaagagatgagggaaggggcagaagtgaaaagtgctcttgctaggagtggtagctcatgcctaatcccaggtctttaggaggccaaggcaggaggaytgcttgggcccaggagttcaagaccagtctaggcaacatagtgagaccctctatctacaa

SEQ ID NO: 551162 - DNA, 1300 bp, Homo sapiens
cctgaaacttgcccaagagtctcctcaacgttcacttgattttgctcatatgagaacagctgtaagtgatgctgtcytcctctcccatcctccctcccactgcattcccagctgagggaattcccttatcccaaattctccctgtttcattggaggccagaggttacaggtttggttatacatacctattataaatagagaagagagccccaaggagatgaggctgaagataaagaaacattttatataaatgaaaaatcaataacagaatattgtatcatgttaaggtaatttttccagatataaacttttcatgttagaatacttcaaaaatacgaagaaaactatagctagagctatagaaaactacacctagagctaatcactgttaagatgatgtgtttttttcagtagcctttatttatgtgtatacatgtattcattgtaacttccttgtttaatgaagtgtcttttcttaaccaatccttcaattatcaaatgaatgctgtgactcttcaaagcctctgatggtagatgaccacatctgtcactccagtttggaactgaggaaggaggggctgtggctctcctagaaatcccttgctgggcagagtcatttgccataaggaacctctattgtccctgcctggttcttctcctacagccagaatcaatccgccagaggcaaggttaggcaggtgatgctcttgccagaaaagtctcggggtagtcggctctctgaaggcaggggctgtgtgctctctcccggctctcctgctgcactttgcctggcctcagactctgcacaaaggggattgtcagtaactgggaattgaccgagaactatgtcattaaaaattcataaatacctcccagcatttcaatgaatatccaaagaatatggtgcccttagctacattattgtataatctaatcaataagaagatgaaaacaaggaccagagaagctcctcaatgtcctaattgtttatcaagaaacaagagaaaagaatagaaagtgtttggtcctgaagcaaaaggaataggtcacctttactcgtgttcatttcacttcagctgcctgattcagtcccttttctctttctaattgcctgggtgttttgtttgtttggttggttttacttgttttcagttttttaaaaattgttgtttaatttcccaggaattcatctattttttttttctcaaaaagctaggttttggactgttgcattttacttcctcatatttttaactcattgttttctgttttaatatttattgtgttctatttcttatat

SEQ ID NO: 551163 - DNA, 1300 bp, Homo sapiens
cctgaaacttgcccaagagtctcctcaacgttcacttgattttgctcatatgagaacagctgtaagtgatgctgtcttcctctcccatcctccctcccactgcattcccagctgagggaattcccttatcccaaattctccctgtttcattggaggccagaggttacaggtttggttatacatacctattataaatagagaagagagccccaaggagatgaggctgaagataaagaaacattttatataaatgaaaaatcaataacagaatattgtatcatgttaaggtaatttttccagatataaacttttcatgttagaatacttcaaaaatacgaagaaaactatagctagagctatagaaaactacacctagagctaatcactgttaagatgatgtgtttttttcagtagcctttatttatgtgtatacatgtattcattgtaacttccttgtttaatgaagtgtcttttcttaaccaatcyttcaattatcaaatgaatgctgtgactcttcaaagcctctgatggtagatgaccacatctgtcactccagtttggaactgaggaaggaggggctgtggctctcctagaaatcccttgctgggcagagtcatttgccataaggaacctctattgtccctgcctggttcttctcctacagccagaatcaatccgccagaggcaaggttaggcaggtgatgctcttgccagaaaagtctcggggtagtcggctctctgaaggcaggggctgtgtgctctctcccggctctcctgctgcactttgcctggcctcagactctgcacaaaggggattgtcagtaactgggaattgaccgagaactatgtcattaaaaattcataaatacctcccagcatttcaatgaatatccaaagaatatggtgcccttagctacattattgtataatctaatcaataagaagatgaaaacaaggaccagagaagctcctcaatgtcctaattgtttatcaagaaacaagagaaaagaatagaaagtgtttggtcctgaagcaaaaggaataggtcacctttactcgtgttcatttcacttcagctgcctgattcagtcccttttctctttctaattgcctgggtgttttgtttgtttggttggttttacttgttttcagttttttaaaaattgttgtttaatttcccaggaattcatctattttttttttctcaaaaagctaggttttggactgttgcattttacttcctcatatttttaactcattgttttctgttttaatatttattgtgttctatttcttatat

SEQ ID NO: 551164 - DNA, 592 bp, Homo sapiens
agttccttgtcatgtctaaattttcactacaggagaaatactatgagtcgtagcagctacagtttttacatacttggttaattagcaattcttaccaaaccgagtgtatcatttctctttagaatcctacatggcctcgattagacatatttacgggaaaagtcaatggataagacattagaggccaacctcaaagtcagaatagagcaaccgtagaccttagagaagtgctttattagccaagaattggttggttattgatcctggtctgtgtctctggtcacaatagcacttaccctaatttttctagtgtaaatataagtaaatttgaatgggtgttgctgaaaacaatctgtaaatctacattttgtggttttggttgtaattgtagttactggaaggttcaatatytggggcatgtggaggagacaaggctgtggcctggtactctgctctctgcaaatacctcctgaagcactttctcaagggctattaaagtgactctggctctctttgctcagaagcacagaaaccacatgggtactcagccgaaaggaaactgggggctgggatgagtattgtcagaagatag

SEQ ID NO: 551165 - DNA, 1335 bp, Homo sapiens
taccttttctctaaaggaaaagttttaagcaggaaacaattagcaagaaattttggaagcaggtataggagcagagcaaaaaggcccagtcccagaaaaggacagaaggagttggtgctcaaatcccaagcagaaggaatcaagtctccaagcatggtgcagccccctccgggggatggatctgacagtctcttcttgttaaagacctttaacaagcacaagcttcaggccccaggggacaggccctggctatatgaccaagggtaccttctttaacctcatatggaaagtggaacaatcctacctaccttgaagagtctcaatttttggatataataaaacaaaagtttagtacagagcctagaacagaaattactcaagtggagttcattattaccgttgttaattataataattttaatatcacccttctcctctatcaaagcttcttatttctttctttcctacctttttttttctatactccaataactagaaagttacatactcagatccccatagggttttcttctgttagtgctttgggtcatcctgatttaatcagtccttttaaaggatcaccagccattcttctggctgacattttaatcaggttttcccaagaatcccaaaggagggggaaaatggaattgcaatgaaaaataaatccactttctctacatgccagtaaattataactctgcagccgcctcagaaaaagaacaaaagacacatggtggaacatttttctggctgaaaaaattgacaaagccgtggaaccaaattctttgcagcattgatgggggtggagggcagggatggggaacaagtgcaattctgcagaactgtgttctcacaattaccctaactcgataccraaagtgttcacaggacacctttggggtaggaggaaaatgtctgctcctctccacacaaccttataaagacagaaaagaggaacacctttacatatccaaaatagaagataatattcaaataatacattcagggctttgtgttccaatgacacaaaatattctgctgctcatagtgtttctccttgaggaactctttctagccctgtggtcaggtctccccttcaaatcatcttgaagatcactctaaaatgtctgttctagcgatgtgagtcggtctgactgctgcaatggaggaagcggcaacacagaagctaggcagcctgggcttgcatcttagcccatcacttctctgctctgcccttcggcaagttactcaacctctccgaatccacagtcaccttgtctgcaagtcagagataccaacgttaccttctagttcaggctgtgtgggggttaa

SEQ ID NO: 551166 - DNA, 743 bp, Homo sapiens
tggaagtctcctttagatggaaattttccttacaaaagattaacttctactctattttcagagtttccgttgtgtttgaataatcagctgaaaataattcttttgccaaagaggcatattttggggwtgggagaccatactctggcctccaatatattcagtctcagaatcatttcgaacagtgaagctaacaacaaagtagaaagatccagttttcctttgtcatcagtcagcttgtttctgttcaattaagtttggtctaaagctgtctccatacgtattcgaaatttggcctaaaagtttctccatacatattgaatggtaacccaacatgatgtgtaaataggctataacttactcatatagctaataactgaatcttagccaactacaggcagccaactgtgcaatgcaggtttaaataataccagctgtaatcaatccagctgtttttgtacctcacttcagctttctggaagtcacttttcttttactgttcatcaaattttattcaactgtgttacagccctggcgttgctctgaatctattctggatcttctggctctccagtttgctaatcattctttgctcaattaactctataaaattaaagttatctaaagttttccttttaacaagtagtgttagaagtgggattccaagtagaccttccagcaacccccaggagcatggcgtgatcaagggagagacccgccaaacctcttgtgtccactcttctctc

SEQ ID NO: 551167 - DNA, 551 bp, Homo sapiens
tctttgtgaagaactggaagttggtgtcatctcagcaaaatgttctctgtatgatggaactgagaagtgctggctgccttctaggtaggtaaaaaggtaggaaatgggctctgacataaacaggttttcagccatgtacctgctccatcatctccacttccacttctcattcatttatttagcaaacatgggctgacttccctggctgcaaacctcaggatactggcaagttcatcaggagartggattgttgatgggaatatagacactttttgtatcttttgagcatcaggttcttaggtaaaggccttgaacctgccctattttatgctgctcatgctgctattgccaataccatagcctgggtggtttatacaacagaattctttctcacagttctgtagcctgggcagcctgagatcagggtgccagcatggtcaggttctggtgagggccctcttccgggttggcagatgactctcctctggtgtgtctttacttgggagagaagagacaaaagaagcaagctttctcctgtctcttttcataaa

SEQ ID NO: 551168 - DNA, 654 bp, Homo sapiens
cagtcaccagagaatacragttccactggcaaccagctatattttctcacttccacctgtggacactggagcctcactacctattaaaaaagtataagtccactcatatcactgcacttaggctcctaagcctgaaatgctttcttttcatctttacctctgatatggtttggctctgtgtccccacccaaatctcatcttgtagctcccataattcccatgcattgtgggaacaacttagtgggagatgattgaatcatgagggtgggtctttctcatgctgttctcgtgttagtgaatgaatctcacaagatttgatggtttaaaaaatggagtttctctgtacaagttctctctttgcctgctgctctctatgtaagatgtgacttgctcctccttgccttccaccatgattgtgagaactcctcagccacatggaactgtgagatgaattaaaacctctttgcggctggacgcagtggctcacgcctttaatcccaacactgtgggaggccaagtagggcagatcacctgaggtcaggagttcgagaccagcctggctaacacggcaaaacctcgtctctactaaaaacaaaaattaactgggcatggtagcaggtgcctgtaatcccagctacttgggaggctgaggca

SEQ ID NO: 551169 - DNA, 654 bp, Homo sapiens
cagtcaccagagaatacgagttccactggcaaccagctatattttctcacttccacctgtggacactggagcctcactacctattaaaaaagtataagtccactcatatcactgcacttaggctcctaagcctgaaatgctttcttttcatctttacctctgatatggtttggctctgtgtccccacccaaatctcatcttgtagctcccataattcccatgcattgtgggaacaacttagtgggagatgattgaatcatgagggtgggtcttyctcatgctgttctcgtgttagtgaatgaatctcacaagatttgatggtttaaaaaatggagtttctctgtacaagttctctctttgcctgctgctctctatgtaagatgtgacttgctcctccttgccttccaccatgattgtgagaactcctcagccacatggaactgtgagatgaattaaaacctctttgcggctggacgcagtggctcacgcctttaatcccaacactgtgggaggccaagtagggcagatcacctgaggtcaggagttcgagaccagcctggctaacacggcaaaacctcgtctctactaaaaacaaaaattaactgggcatggtagcaggtgcctgtaatcccagctacttgggaggctgaggca

SEQ ID NO: 551170 - DNA, 654 bp, Homo sapiens
cagtcaccagagaatacgagttccactggcaaccagctatattttctcacttccacctgtggacactggagcctcactacctattaaaaaagtataagtccactcatatcactgcacttaggctcctaagcctgaaatgctttcttttcatctttacctctgatatggtttggctctgtgtccccacccaaatctcatcttgtagctcccataattcccatgcattgtgggaacaacttagtgggagatgattgaatcatgagggtgggtctttctcatgctgttctcgtgttagtgaatgaatctcacaagatttgatggtttaaaaaatggagtttctctgtacaagttctctctttgcctgctgctctctatgtaagatgtgacttgctcctccttgccttccaccatgattgtgagaactcctcagccacatggaactgtgagatgaattaaaacctctttgcggctggaygcagtggctcacgcctttaatcccaacactgtgggaggccaagtagggcagatcacctgaggtcaggagttcgagaccagcctggctaacacggcaaaacctcgtctctactaaaaacaaaaattaactgggcatggtagcaggtgcctgtaatcccagctacttgggaggctgaggca

SEQ ID NO: 551171 - DNA, 661 bp, Homo sapiens
ttccttctgcatccaacccataagcacaagtcccttccaaattgaggtgtttgtgtgtgtgtgtgtgtgtgtcttttttgttagtgtgtcttttttgtttctgtttagagtttaataaaatcctaagacagttgttgcatttcaagaggaacatacggtcctgttattaatgcagagtcactagtgattatatcctcagaccttcaaaagggaccctcagccttcattccactcatctggaaagataaagtgttctatcaaaaaagtaataagtgcacaatataggaaaaaaaaaacgaagaaaaaaggaaccaatcctagttctacaactcaaacaaaattatttatatcttattataattcttcccagtcttttttgttcctatatagcgactcttccatattaaatttcctttcttaaaaaatcggtaatcatagtagagctccttggaattttttaaaagggagacatgatggacatatggaattcttggcttcccagcatctatgtcaccttcctttggtaattgtggccatattctcctttgggtattacttttccagtgatrtacctgatgggaatgtcacctggaatgtcctgtgttcccctaaccctggggagggcatctgactcacatgaggccactcagatacttctatg

SEQ ID NO: 551172 - DNA, 672 bp, Homo sapiens
ctgagacctcactgaattatacaagttattcaaactatttaatattcaacttgtttaacttgcttacttttcttctcccatttttttcccaggaaaaccacaatagtcaccctccagtcctctytctgtctgccattctgtctctgtgcttccctgagtggcccttaacagcacgacatgcctattagttattcacgactgtgatgtgactaccataaaagcatcttccttcatgaccaacattttcatgtctgtatgtcttaccatacctgattaaacaaaatcccaggtatatcttaaaactgcttcataagatgaattggggcatattccttctgcctctgttttctgaaaatatttgtatgagatgggtgtaatttcttaaatgtttggtagaaaacaccagtgtacccatctgggactggagaattgcttatagaaagatttttaattacaaattcatttatatatataaataatatatatatttcaaattatatatgtaaatatatatttcaattatatatatttcaaattatatatgtaaatatatatatttcaattatacatatatttcaaatatatatttgttcagattttcaattttgatcacttccaacatttctgctaatggttatctgtgtcttttctttttgatcactccatctagag

SEQ ID NO: 551173 - DNA, 802 bp, Homo sapiens
aaaatgggtcctcttatttttagtgagtctttcctaaaagttgttaactaggtgggtatgagtaaccagtgtttcctaaagtatggcatgtataaaactagtggcacatgaaaatacatttttattttaataatgatgtattaattttaatatgtatgagtagaatcatagctagcaaatcaaaactattaaattatgaataagcatatttgaaacaaaaacagtaaatttaaagaaaaatgttaactaaataatagyactagtggaatcccaacataataaaaccatacaagtatattgggaactgtagaggggaaagtctaagaggcattagattatgccatctaagattctccccctgagtcactagggtgtaattcagaggtgcccaggtcatcaccaagtcacaaagtagagattagattcacagcagggtctcatagaaggataatcacagagatgcagaatccaaagcactgacataggaagtcgctgaataaatttagtaaggagaacgttacttttaagagcatggaagctggccatttattcgcaacagccaggagagagttcaaacagcagcttctctccaaaagcctttgctgcctcttgtctgcacttctcttatacatcagtccctttgaggtcaaaggatttttctccctgcctctgaccacgtatagtcctgttgatttcaataagcaggcttacgtcccgaaaagattgaaatcaggagagattcccatattacttgggagctgggggtctgggctgggaggcagagctgaagagtttttttccc

SEQ ID NO: 551174 - DNA, 1164 bp, Homo sapiens
tgtttttctttctttgtagttttctgaacgcctgaaagtagtagatgtgataggcaccaaagtatacaacgatggagaacaaatcattgctcaggtatgatattttgaaatgtaattcagtttagggttatattccaaaaggttcctgtagtggtagatcttgataaacttttcatatttctaaaattagtatgcagtgatgggttaaataaatattacttctaccaaatgacctgttaaaaatggtttcatttatagtcattactctattgaatatttttgtttatgtaattaactcctaatgaaggtgtattaaaccatcaaatggttttctgcatcattgtagtcatttataagaggaaaaaacaggtgaatgttccatgacattaatgaggacccagaaagtacactggaaaattctatagagttttgcatgatcagttcatgatgaaaattcctgaggctgctccttgataaaattcaccaagaaaggaacayactgcaacatatactgttttggcttccaagactacatgtgggtcaacatgttatttaatccctaatacttttctaagatcccagctggaaccaataatattagatacctgggttggagtagggctaccaaaagtagaatttgtgaagactgttgaagttcacaggtaaagcatgcagatgatagtaccttgtttcctagttatatttttgaagcactaagcaaatgattaaaatggatttttaatagattctgtaatttttgtatcacagccttatactgttttgtgctctttatctgaaatgcagtcttttcctttatatgggaaacaagattcaaggtctttgagactgagaaaaagaattgttttagaagacaaatacataagtaaatctttcgatcaacacccctctcccattgctgagtgtgtgtgtgtgtatgtgtgtgttagagcagtcagggattgggaagaaatggagtcaagcaaggttaaagttctactgtataaactagtaaataacaaagcaaagagcatgttttaaatgattttttaaggttttattttgaaataattatagattcacaggaagttgcaaaaatagttttgagaggtcccgtgtactcttcacccagtttctcctaatgcgttttgcatcactgttaataac

SEQ ID NO: 551175 - DNA, 1416 bp, Homo sapiens
ccttcgggagcctggaagattgttgtatatcctccctgggtctggcttagcgtgcgatagagagccgtgcttttgatatatcttaactgtgtgtaacctacaacccaggattctctaaactttagaaaaaatacctgtgcagttgaactacagtatcagggctgcagtggaccagacagggaagtaatgcttcagagaagaagagaaaacagggaaagaccaggaacccagaagaccatctctgggagaaaaatcactcttagtgatggaagcagtgagtgaactgaggcaggttcagcagtaacgcggctgggggcagcccctgtctgggtgtgccactgtgagtttcctgacctggccactgtttatgyggatctaggcctgtgttcccacgtagcttccctgtgaccaacagcgagagtgctgctgggttctgtgtggttaggggtgcagtctgtagtcaaggaacagaatgaaattaattagcccccttgggatagctgcagcctatatctttggactcgttagcaaagggctctaactaggtgagataaccagcttcacgagtaggttagctcttggctgtcaggatttctattctctgcccaatagagcagaggctgaaaaatatttcacaataatcatcacaatggagggactctgcaggagccggtaggagctaggttttttttgttgttgttgttgttagctgacccaactatcctgacatcattgctgggcctgaatgcaaagcagataaagtcccctctgtgcatgtgcatgtgtggggacgtgtcacatgcatgcgtgcatatacattttgctgtaatgtgttcttcacatctggggatatcttaggtgggttcatccagaagcagaccttgaaatggagctttgtatgcagaggttactggggagtgccatgggagagagggagggagggaggaaggcaggggagcgggactggtcagagggagccactgagcggcaatggagttgcagcaaacgtctcagtcatttggacctgggatagcccttcagagtgtcctgttgttttatgaagttggtcacttcgtaccctccactgacccaattgacctgtcattgggtgccagccatcgcttggaaagggtcataccttaggtgaaaccttacctttggccaggattgattccccgggtggaactcagcctcgagtctcagcagggggatgactagaagatcccatgcctccgctctgaagtgggatcttggtggcatcccacggcacccaccacagggggtgatgagagtcttagaatccctgcattctgaaaactgttcccatcctgggctcatccatggtggtttccaacaggacagccttcctgatggtcctggtcactgttatcaggaggctacatggagcttttccat

SEQ ID NO: 551176 - DNA, 1416 bp, Homo sapiens
ccttcgggagcctggaagattgttgtatatcctccctgggtctggcttagcgtgcgatagagagccgtgcttttgatatatcttaactgtgtgtaacctacaacccaggattctctaaactttagaaaaaatacctgtgcagttgaactacagtatcagggctgcagtggaccagacagggaagtaatgcttcagagaagaagagaaaacagggaaagaccaggaacccagaagaccatctctgggagaaaaatcactcttagtgatggaagcagtgagtgaactgaggcaggttcagcagtaacgcggctgggggcagcccctgtctgggtgtgccactgtgagtttcctgacctggccactgtttatgcggatctargcctgtgttcccacgtagcttccctgtgaccaacagcgagagtgctgctgggttctgtgtggttaggggtgcagtctgtagtcaaggaacagaatgaaattaattagcccccttgggatagctgcagcctatatctttggactcgttagcaaagggctctaactaggtgagataaccagcttcacgagtaggttagctcttggctgtcaggatttctattctctgcccaatagagcagaggctgaaaaatatttcacaataatcatcacaatggagggactctgcaggagccggtaggagctaggttttttttgttgttgttgttgttagctgacccaactatcctgacatcattgctgggcctgaatgcaaagcagataaagtcccctctgtgcatgtgcatgtgtggggacgtgtcacatgcatgcgtgcatatacattttgctgtaatgtgttcttcacatctggggatatcttaggtgggttcatccagaagcagaccttgaaatggagctttgtatgcagaggttactggggagtgccatgggagagagggagggagggaggaaggcaggggagcgggactggtcagagggagccactgagcggcaatggagttgcagcaaacgtctcagtcatttggacctgggatagcccttcagagtgtcctgttgttttatgaagttggtcacttcgtaccctccactgacccaattgacctgtcattgggtgccagccatcgcttggaaagggtcataccttaggtgaaaccttacctttggccaggattgattccccgggtggaactcagcctcgagtctcagcagggggatgactagaagatcccatgcctccgctctgaagtgggatcttggtggcatcccacggcacccaccacagggggtgatgagagtcttagaatccctgcattctgaaaactgttcccatcctgggctcatccatggtggtttccaacaggacagccttcctgatggtcctggtcactgttatcaggaggctacatggagcttttccat

SEQ ID NO: 551177 - DNA, 1416 bp, Homo sapiens
ccttcgggagcctggaagattgttgtatatcctccctgggtctggcttagcgtgcgatagagagccgtgcttttgatatatcttaactgtgtgtaacctacaacccaggattctctaaactttagaaaaaatacctgtgcagttgaactacagtatcagggctgcagtggaccagacagggaagtaatgcttcagagaagaagagaaaacagggaaagaccaggaacccagaagaccatctctgggagaaaaatcactcttagtgatggaagcagtgagtgaactgaggcaggttcagcagtaacgcggctgggggcagcccctgtctgggtgtgccactgtgagtttcctgacctggccactgtttatgcggatctaggcctgtgttcccacgtagcttccctgtgaccaacagcgagagtgctgctgggttctgtgtggttaggggtgcagtctgtagtcaaggaacagaatgaaattaattagcccccttgggatagctgcagcctatatctttggactcgttagcaaagggctctaactaggtgagataaccagcttcacgagtaggttagctcttggctgtcaggatttctattctctgcccaatagagcagaggctgaaaaatatttcacaataatcatcacaatggagggactctgcaggagccggtaggagctaggttttttttgttgttgttgttgttagctgacccaactatcctgacatcattgctgggcctgaatgcaaagcagataaagtcccctctgtgcatgtgcatgtgtggggacgtgtcacatgcatgcgtgcatatacattttgctgtaatgtgttcttcacatctggggatatcttaggtgggttcatccagaagcagaccttgaaatggagctttgtatgcagaggttactggggagtgccatgggagagagggagggagggaggaaggcaggggagcrggactggtcagagggagccactgagcggcaatggagttgcagcaaacgtctcagtcatttggacctgggatagcccttcagagtgtcctgttgttttatgaagttggtcacttcgtaccctccactgacccaattgacctgtcattgggtgccagccatcgcttggaaagggtcataccttaggtgaaaccttacctttggccaggattgattccccgggtggaactcagcctcgagtctcagcagggggatgactagaagatcccatgcctccgctctgaagtgggatcttggtggcatcccacggcacccaccacagggggtgatgagagtcttagaatccctgcattctgaaaactgttcccatcctgggctcatccatggtggtttccaacaggacagccttcctgatggtcctggtcactgttatcaggaggctacatggagcttttccat

SEQ ID NO: 551178 - DNA, 605 bp, Homo sapiens
gaggatagcatgccagcataaggaagttagcatcatctagagtgaccacagaagctgcatctgtccgtgtgactggacactgtatatgtccagatctctgcaaggaagagtcatgtcgtactttagagtatgactgagtcacastcagagggaagtgattcccacaagcagctcccagccagtaactgagcttggcagggatactgaggcaggtcccttcctgggagaaatgggactccagaagtcctggaccctctctacttctttttatacctgcttacaatttagccaattcttttctgagctcatctctttcttacagtagtgaccaagggatgttactaacgttcagtttccccatcttttcaccttaagcttcaagttccttcagcacatcatccgcccttcaagttattcctacaacagctttaccaaatatttcaccactgcataacatagattaccatctttccaaccctcagtaacggttctcttgctgactgccatctggccctagagccacatattttagggtttgtgttttggctgctccccactcctggtaccataacaccatctatcaaatctacctgtagatcatgaaa

SEQ ID NO: 551179 - DNA, 605 bp, Homo sapiens
gaggatagcatgccagcataaggaagttagcatcatctagagtgaccacagaagctgcatctgtccgtgtgactggacactgtatatgtccagatctctgcaaggaagagtcatgtcgtactttagagtatgactgagtcacagtcagagggaagtgattcccacaagcagctcccagccagtaactgagcttggcakggatactgaggcaggtcccttcctgggagaaatgggactccagaagtcctggaccctctctacttctttttatacctgcttacaatttagccaattcttttctgagctcatctctttcttacagtagtgaccaagggatgttactaacgttcagtttccccatcttttcaccttaagcttcaagttccttcagcacatcatccgcccttcaagttattcctacaacagctttaccaaatatttcaccactgcataacatagattaccatctttccaaccctcagtaacggttctcttgctgactgccatctggccctagagccacatattttagggtttgtgttttggctgctccccactcctggtaccataacaccatctatcaaatctacctgtagatcatgaaa

SEQ ID NO: 551180 - DNA, 605 bp, Homo sapiens
gaggatagcatgccagcataaggaagttagcatcatctagagtgaccacagaagctgcatctgtccgtgtgactggacactgtatatgtccagatctctgcaaggaagagtcatgtcgtactttagagtatgactgagtcacagtcagagggaagtgattcccacaagcagctcccagccagtaactgagcttggcagggatactgaggcaggycccttcctgggagaaatgggactccagaagtcctggaccctctctacttctttttatacctgcttacaatttagccaattcttttctgagctcatctctttcttacagtagtgaccaagggatgttactaacgttcagtttccccatcttttcaccttaagcttcaagttccttcagcacatcatccgcccttcaagttattcctacaacagctttaccaaatatttcaccactgcataacatagattaccatctttccaaccctcagtaacggttctcttgctgactgccatctggccctagagccacatattttagggtttgtgttttggctgctccccactcctggtaccataacaccatctatcaaatctacctgtagatcatgaaa

SEQ ID NO: 551181 - DNA, 1345 bp, Homo sapiens
agatatttagtaatcagctctatgctccctgacatccatgatttcggtcagtttttgtgaaatgtgtcaagctataaatttacaatacattgtgtggaggttgaatttttcccaagaaataatatgaaaacttttatacatttctgttttacttataaaatattaaacaatratatctcagaatatatcatgtaaagttactaatattaaaattcacaaaaacttgaattatattgtgttatatgtacaagtagcaaagtgcccactctaggtgagggttaaaagagaataaacctgacaggtgaacttaaaagtattgaatagtagtgtgcgctcatttacatggcaacctctggggaactccttggggaaaattatttttaaccaaatctgtaattgacatgaggacatatacatatgtttttgacagatttggaggcccaaatggaaatcaagttgtaggaaactaattaggtgtttgatagaattcatcataaagaaaaatatctggcacagaagtccaacttagcattagaacatacattttagatggaattggtgattttgagaactagaatcagccaaacccagtaactcagtgggtatacagatgtctggagaaaaagagtatgatacatttgaatggaaaagactgttctggtaagctctgcaacatgaaaaaaaaatgtgcaaaatttaggagaagagactacaaaaattcagtgatttagtatccttcaaatatggggaatattgggaaataaacctttataaattttaaagaattgtggcaattcaaatttggacaatatttgaaaatataaatatggttttatttgtaaaaaaagttttcatttgtaaattaaaggggtacaataaaggataattattttcaatatgaattttttcaatattgaaattatttacagaaattgaaaagcaagataactctacaatgtacctataatatatttataaaatatgtatgatgttatatatggggttttacttcttcatgaggtgttacattttgaagtatcttttgtatttcttttcttcgttttctctttccattctccttccactcctgtaccccacatccttttctgacgttcaaaacatcctcattcatctcaagaaatgtaagttatcaaagcattactggtagccttcagggtttacctgaggaaaactagatagaatatacagagtctttgtagagaataataaaatatcactagacatgacctctcttgcttggtagaggaagcaatctaaagaaaaagtaagtggataaacattattgagaaaccagtgggacacaaatattcgttaattttataca

SEQ ID NO: 551182 - DNA, 487 bp, Homo sapiens
atgtcagctgtctacaataaagcacctgggtccttgtgtgtgctgttcttgcctgagcagcgtaaaagctggagtggggtggggtagagtggggtgggctggggtgggrgccctgtagtcagggaggaaactgttgcttaggaaagatgaatgctgggtagggtggcctggcatccatctccctcagccacgtctcagaaaattgaattaaaacccatatttttcagctgctgcccgcctggctggctggcttgtggaagggagtgaggcagtgagcacctcaaggcagggaaaagctggtgaggggggcccccagcctccttccctaggagacagaaggcagcccaaggggtcctctgagagaagacccttcccaggggtggtcccttggcctcaggtcttcccaaagccaggcacgtaggggtagggtgggagtggtaggctggctggcttacaaggtcagagctagatctggaggtgaagttga

SEQ ID NO: 551183 - DNA, 1095 bp, Homo sapiens
tgccaagtcctttatagttacttgatctttctactctgtttgatgagaacagtgcaaaagtgggaaaaatgggttgctctggccaacttctaaatgttctggatatcgcttaacgtctttcacttccttcctcaataaaacctgctcataggagacaaaaaataatcactccgacaaagccttatcagaaatttggctttaaagcttgccttctgctcttggggaagaatgatgaaatattctatatttttacaagaaaggtcctggttggctggagtggaaattcagatacacctggctgggggaggcagacaacagcttactccccctacctatacatgtccattaatttatcaagagaacaagggccttctctgaaaagtctttgagccatgtccacgtttaatattccagaatgcagacatgtcttatgatatggagtgaggtggagattgggaggggaaatagaaaccaaattccatgagaggactctgagatgcttaagaaacaatacaaagaaaaaaagggcaggcatgatgactgaaacccaaccttcattcatcctcctcagaggagaacgtggttctggaagacagcatgatggttttcactgaaactttccatgatccaaccattcagcacatacacatgtaaggcagaatagtgtggcattagagacacacattttacagccaggctgcctaggttccaagcccagctttcctcctcactagctctgtaagctttattcttcagtggtctatgcytcagtttcctcatctataaaatgggagtgttagtaatagaagctacttcagactgggtacagtggctcatgcctgtaatctcagcactttgagaagctgaggcgggtggatcacctgaggtcaggagtttgagaccagtctggccaacatggtgaaaactcgtctctactagaaatacaaaaattagctgggcgtgataatggatgcctgtaatcccagctactcaggaggttgacacaggagaatcgcttgaaccgggaagatggaggtcgcaaggagctgagattgcaccactacactccagcctgggcgacagagcgagactcca

SEQ ID NO: 551184 - DNA, 563 bp, Homo sapiens
ataggaaggagtctcttcctcatggcttaatattccacctcctttccagcattattttagctgtggcctttctgtgtaaacctcacttgrtcctcttccctcaccttcagccctaaagcctccttatcctcattaatgcaacacatattggaaggttgtactggcctaggagtcatgctggggtcctttttttacacttgtcctctccatctaactaacccccatccctatttctaatctgaactaacactcacttgatttctacctaatcccatgtcttggtcttgggacccatatcctaatcttttccctgggactgaaattcagtgttttaactttaatttgggattctaaactgcagtttctcaaggcatactcacttctctgtctctcagcatccttatagactcaggtatatctcaagtcctaaggttctccacagtaaccgtgggtctggcctgtcctggctaggccaattcattttttctttcttcagaccacacaagagagcaaaggttggggtagagggattcaagcacatgcttcgacctctctactacata

SEQ ID NO: 551185 - DNA, 563 bp, Homo sapiens
ataggaaggagtctcttcctcatggcttaatattccacctcctttccagcattattttagctgtggcctttctgtgtaaacctcacttggtcctcttccctcaccttcagccctaaagcctccttatcctcattaatgcaacacatattggaaggttgtactggcctaggagtcatgctggggtcctttttttacacttgtcctctccatctaactaacccccatccctatttctaatctgwactaacactcacttgatttctacctaatcccatgtcttggtcttgggacccatatcctaatcttttccctgggactgaaattcagtgttttaactttaatttgggattctaaactgcagtttctcaaggcatactcacttctctgtctctcagcatccttatagactcaggtatatctcaagtcctaaggttctccacagtaaccgtgggtctggcctgtcctggctaggccaattcattttttctttcttcagaccacacaagagagcaaaggttggggtagagggattcaagcacatgcttcgacctctctactacata

SEQ ID NO: 551186 - DNA, 525 bp, Homo sapiens
ttaaaagtaaagagatttttatgttaaaatctagatttcttgcttttcttgaaaaatcagaaaatctggcaagggtcagcccttactcatgcatagctatagttagctggagctgagtagccagcacctcttttagaagaacactcactagtttgccaagcagtcaccagtcattccatttatggatatcatttataacactggctttctttatttatttacattaccctatagcttgagtttgctgatttctgatatactcattgaattagttcaacaaacatttagtgagtacctattaygtgccaggcactgtgctaggcactgggaaatacagtaagaacaaaacaaaagtcctggccttcatggaaattacattcttgtcagtgtcccataaaaccaaacaaaacagacaacttcagaaaaatttttacagttagacgtattcttcctcaccatttcagtttatcatttgctcctgatgaaaatgtagaacttttaatgacttcacccatttcctcccgg

SEQ ID NO: 551187 - DNA, 974 bp, Homo sapiens
ctggattgtggaaaataaaattcttggagcaagtgctatgttcccttagtgcttttaccccctagtccctagagtctgatttagttgagtatgacaagaattacacaattcataaactgtcacacattctttgattctatttttaaacacctatctaaaaacacttcactgcacacattatatacatgtgttgaaataacttgataaagctaagcctytaaccttaatggtaagtcatatgtttaaagaagtatatgtaaacacttgattgtttagtttacagttaggtaatcatataatcattaaataggcactgttaaatcatttttaagcaatattattataatcatcttttatgtatgtatgtatgtacgtatgtatgtatgcacaaacacttcaccatacattacaatgctctaaaataccacacttcaacacattcaagctttaagtccatatggcacccaaaatgtttaaagcagtattttcaaacacttctttacctagtttacagtttggtacacacttaagtccactcacataccctaccaccccattccagaaaaaaagagcatcagttctgatttactgttctggaattcagttttctcttcctttttggcccctggtgattctcccttactgtcttgcaagtttagctacatactaaaaatgagtttataaagcaaaaattgccaaatacactaagggccaattcaccatgaattggcagatgcaacaaacaaacagaacatctggtatttacttggaacttctcagcttttcaaacttaacatgagacagagttgtttaatagtcagagctacttaaaatggaataggctgcctagatacctcctgagctccctgtcaccacaggtgggtgaacagaggagacaggacttccatttgttggaaatgtaacccaagggtttggcaccaaaaaggaggaaaataaagagctctgagcttctg

SEQ ID NO: 551188 - DNA, 974 bp, Homo sapiens
ctggattgtggaaaataaaattcttggagcaagtgctatgttcccttagtgcttttaccccctagtccctagagtctgatttagttgagtatgacaagaattacacaattcataaactgtcacacattctttgattctatttttaaacacctatctaaaaacacttcactgcacacattatatacatgtgttgaaataacttgataaagctaagcctttaaccttaatggtaagtcatatgtttaaagaagtataygtaaacacttgattgtttagtttacagttaggtaatcatataatcattaaataggcactgttaaatcatttttaagcaatattattataatcatcttttatgtatgtatgtatgtacgtatgtatgtatgcacaaacacttcaccatacattacaatgctctaaaataccacacttcaacacattcaagctttaagtccatatggcacccaaaatgtttaaagcagtattttcaaacacttctttacctagtttacagtttggtacacacttaagtccactcacataccctaccaccccattccagaaaaaaagagcatcagttctgatttactgttctggaattcagttttctcttcctttttggcccctggtgattctcccttactgtcttgcaagtttagctacatactaaaaatgagtttataaagcaaaaattgccaaatacactaagggccaattcaccatgaattggcagatgcaacaaacaaacagaacatctggtatttacttggaacttctcagcttttcaaacttaacatgagacagagttgtttaatagtcagagctacttaaaatggaataggctgcctagatacctcctgagctccctgtcaccacaggtgggtgaacagaggagacaggacttccatttgttggaaatgtaacccaagggtttggcaccaaaaaggaggaaaataaagagctctgagcttctg

SEQ ID NO: 551189 - DNA, 974 bp, Homo sapiens
ctggattgtggaaaataaaattcttggagcaagtgctatgttcccttagtgcttttaccccctagtccctagagtctgatttagttgagtatgacaagaattacacaattcataaactgtcacacattctttgattctatttttaaacacctatctaaaaacacttcactgcacacattatatacatgtgttgaaataacttgataaagctaagcctttaaccttaatggtaagtcatatgtttaaagaagtatatgtaaacacttgattgtttagtttacagttaggtaatcatataatcattarataggcactgttaaatcatttttaagcaatattattataatcatcttttatgtatgtatgtatgtacgtatgtatgtatgcacaaacacttcaccatacattacaatgctctaaaataccacacttcaacacattcaagctttaagtccatatggcacccaaaatgtttaaagcagtattttcaaacacttctttacctagtttacagtttggtacacacttaagtccactcacataccctaccaccccattccagaaaaaaagagcatcagttctgatttactgttctggaattcagttttctcttcctttttggcccctggtgattctcccttactgtcttgcaagtttagctacatactaaaaatgagtttataaagcaaaaattgccaaatacactaagggccaattcaccatgaattggcagatgcaacaaacaaacagaacatctggtatttacttggaacttctcagcttttcaaacttaacatgagacagagttgtttaatagtcagagctacttaaaatggaataggctgcctagatacctcctgagctccctgtcaccacaggtgggtgaacagaggagacaggacttccatttgttggaaatgtaacccaagggtttggcaccaaaaaggaggaaaataaagagctctgagcttctg

SEQ ID NO: 551190 - DNA, 511 bp, Homo sapiens
actatttgatggcacaacagggtatttgtgctgatagcacaacagtagtatttgtactgataacacagtttgtactggtagcacaacagtagtacttgataccacaacactgcaattgtcaataattgacaattattataatcaataataatttagttgtaccttttaaaataactgaaatcatataattcaatttttgtaatacagagtaaatgcttgaggagatggataccccatttaccatgctgtgattgttacacgttgcatgcctgtatcaaagtatctcatrtaccccatttatacacacaactactgtatacccacaaaaaataaaaataaatgtgatataataatcaggtatggttttgctggggtatatattacatcgctgtattttgcctagtctataggattagggggaatagctgtggtaaattcccacagaggcagttgcaaaactccctacacttctctctcccatttgcactttagtttgttaaaatctgctaaa

SEQ ID NO: 551191 - DNA, 1060 bp, Homo sapiens
cttagagcaaagttatgaggaagaaaccattattacctgcattatatagctgaggaaacaaaaggttcagaataaaacctgagaactttgtcccagatcatacagaacaagcattggaatccagattttttttctctccagagtctgtgctctcaaccattttgccaaaaacaattaaatccttttatgttttgacttttcttctactttgcttagcaaatgatttttattatgtatagctttgtaaatttaaactgaaaccctttacagcgtcttgactattcagctgatggaacagcctctataaragatcacacagtacttaacaagtgctcttgtttaggattgaaggctaacactgggaaaaaacagtgtatgtagtgtgaatttaaaatagagcacacctttcaaatagcctctaaaattaaaaatatgatatatgactgtaaattgttgacttcatgttcacaacactttctgatttaatttcagaatatgtttattttatgatttcgtaaaaacttatcagtaaagggctataaaagctctaagataatggtttgacctttgttctttcaataccaaaagtaaaactagcactaccatccagtttcaatatataggcagggggctgtccagctggcattagcaattgcaaatgtagacttcacctttccaaggcaaaaaaggatggttggctgtgggaacaaatcttcatcttggaatagcctgtgagaatgcctaatcatctacgaatgttactttggcaccatctactggacacattaaataacaaccaactcactgtggattagacctacttctatttaagcgctttttgtagtagcaatccatatcctccagatagtcagaattaatttcccagccataacattcattttcttcttttcctgttgatttactagcatggggagctccaagtggccacttgtgggctcagcttccagtgtaatggaaccatattaaagcatctctggtggaagcattcctcccttggaaaccaagatcactaagttagcagaaccccaaatcttgggaa

SEQ ID NO: 551192 - DNA, 530 bp, Homo sapiens
agtcccttctgagtcaattactgtggtgagaacaacagaataaactgaacgcatcccatcctcttatctccattgttttctgtttttccctgacttcacttacccactgaggaaaataacatcccccatgatgaatttttccctcatcctttaaaactcataaaccaggaggagccccttttggtgccaaaagaagaaagcacaacactgtgaacctggtttccctcctcaataaggaacagtagagtggacctggagacaaagttgtcagagcattctctgcttagagacctaggctgcagtcagtgctattttatgtaaattacatgtactttaaaccaacactggcaagagtgycatactcttgtttaggaaagctggaagtctaaccagttgtaaaggttatgtgtttgatgaactcctaaaagttttttaaggtctaagtataatcaagctatccttttatgttctcaactctttgaataaaatgctggaagcacctaaaacggccaacacattccaaggtatca

SEQ ID NO: 551193 - DNA, 805 bp, Homo sapiens
gagttctcccaggaatgatctggttcccacgagttccttgcttgtgttcacttcccctttggccttctctgccgtgttttgatgtagcacgtggccctcaccagaagttgagtagatactagggccattccccttgaacttctcaggctgcagaatgatgtgctaaataaacctctttataaattactcggtgtcaggttttctgttatagcaaaacaaaacagactaagacacctatatttactgattaaaaaacccttggaggaggccgggtgtggtggctcatgcctataatcccagcactttgggaggccaaggcaggcagatcatttgaggtcaggagtttgagatcagcctgaccaacatggtgaaaccctgcctctactaaaaatacaaaaaattagccacgtgtggtcatgcatgcctgtaatctcagctacttaggaggctgaggcaggggagtctcttgaacctgggaggcagaggttgcagtgagccaagattgtgccactgcactccagcctgggtgacacagggatattccatctcaaacaaacaaacaaacaacaacaacaacaaaaaacaaaacaaaaaaactttggaggaatcagacataatacaggtaaccaaagagaattaaaagcatgtacaaaaagacataccacagtaaaaaataactttcgttgttatcttcagagaaatttgagaagatatttgtctgtgtgtaaaatgtcmaaaaaaaaaaaaaaaaaagaacaattagagaatggaagatcttctggaagtgaaaaatataactgccaat

SEQ ID NO: 551194 - DNA, 1082 bp, Homo sapiens
tgtgaatctctatcattgcagggattcattttctttagtctttgctttgtctggtgttgcacgggcagaagagagaaatagcagtcaaggaagaggtgagaaacaccagtgtggagcaaatctggaggtggccctcttggactaatagtgcacatttatagcagatgcttctgctggtaatttaagacttgagagcctaatgaacttctcttctcatttctttcccccctctagccccacaccagcaccctactgctttcctgagtttaatatgctctatgactatttagcaggaagacaaaagagtaaaggtcacatttaaaaggcactgtgtgttttgccttgccggtgttttgcctagaacacgtttgacatacgtttttcattatgcaagtaataggctttggacggtatcagaagtgcttctgtactttatttagttaatcaaactggggggaaaaaaggaattgaatcaaagaaacatgtaagactgcactattctattttactgggttatgacacacagtaattgtatgctcaggtttattgttattttcctcagtgcttatagatttactgatgtatttacgaccaaacagaattcgttctttaattggctcactggagctcaaggaatgtttatttaaccttaactcagttgagttgtttagactacagggacttcagttcaatttactttaatttttgaaaaaaattttcttatttataaaagttgagcttagagtgacctccccattctgatgttttctttacccttcgctgtgcacagagaacaaaaagccagtgtctcgtttttactccaaagaaactaaactgcttccttaartgggttagctcttacaactgaaaatggcaaccagatgtttaccaaagtccctagcattgccccttcaagcctagcttccttctaattgtttgatctttttaagtttcatagaaaccagactgggtatttaaattgtctaaagctgggaaatgtttaaatataactttgaagatactttctctgaactgtcttgttagatgtactttcttttatttttaaggaaaaatgcagcatt

SEQ ID NO: 551195 - DNA, 1025 bp, Homo sapiens
agcacaagccagccaccccaagtaaaagactcatagacaaagaaagaacatgcaggaaacaaaagtcgaaaaaagggcctgaaaaccagaatatatttcattatgttaagagccaacaaagtaaaattcttagttatgatctaaatgtatgatttagggatgaatacatagttagggagaaaagaaaaattatttagccatgaataaattaatccaggttcttattcatcaagattccattttgaagagggctgccgcttaggaacactcaagctacgagggccataaatttaacacacacatttctttatgaaggagtagagagaataaacaaattttttaaaaagtaaagggagaaaagggaaaataaagtaatatgcaaggacatccgatagtcaaaatgtattatctcataaatttatatgcttcagtaaaaaaattatcatatttacaatcaaaaaaggccatttgtaaagaatctcacatatattatctctgtcaaatctcacaacaacccaatgagagagatattgttggctccttttttttttctttttttttttttttttttttttgagatggagtctcgctatgtcgccagactggagtgcagtggcgagatctcggctcactgcaagctccgcctcccgagttcaagtgattctcctgcctcagtctctcaagtagctgggattacaggcacgtgcaaccacgcccaactaatttttgtatttttagtagagacggggtttcaccatgttggccagaatggtctcgatctcctgacctcgtgatccgcccrcctcagcctcccaaagtgctgggattgcaggcatgatttttggctcgtttgtacagacatgaaagtgtctcaacgtggttaagtgagtttggaagagccagattattatccaggcctctgactttacatcctgtacccactcaggcctacctcatttcattcaagagataagtacaacacaaagttcaacaacatctgaagccattctgaactagaaataaat

SEQ ID NO: 551196 - DNA, 1025 bp, Homo sapiens
agcacaagccagccaccccaagtaaaagactcatagacaaagaaagaacatgcaggaaacaaaagtcgaaaaaagggcctgaaaaccagaatatatttcattatgttaagagccaacaaagtaaaattcttagttatgatctaaatgtatgatttagggatgaatacatagttagggagaaaagaaaaattatttagccatgaataaattaatccaggttcttattcatcaagattccattttgaagagggctgccgcttaggaacactcaagctacgagggccataaatttaacacacacatttctttatgaaggagtagagagaataaacaaattttttaaaaagtaaagggagaaaagggaaaataaagtaatatgcaaggacatccgatagtcaaaatgtattatctcataaatttatatgcttcagtaaaaaaattatcatatttacaatcaaaaaaggccatttgtaaagaatctcacatatattatctctgtcaaatctcacaacaacccaatgagagagatattgttggctccttttttttttctttttttttttttttttttttttgagatggagtctcgctatgtcgccagactggagtgcagtggcgagatctcggctcactgcaagctccgcctcccgagttcaagtgattctcctgcctcagtctctcaagtagctgggattacaggcacgtgcaaccacgcccaactaatttttgtatttttagtagagacggggtttcaccatgttggccagaatggtctcgatctcctgacctcgtgatccgcccgcctcagcctcccaaagtgctgggattgcaggcatgatttttggctcgtttgtacagacatgaaagtgtctcaacgtggttaagtgagtttggaagagccagattattatccaggcctctgactttacatcctgtacccactcmggcctacctcatttcattcaagagataagtacaacacaaagttcaacaacatctgaagccattctgaactagaaataaat

SEQ ID NO: 551197 - DNA, 533 bp, Homo sapiens
cctgatatgtggttgatgctcaataaatattagttaattgaataagtaaagaataataaaattctatgcctttctttctaatttagttggacagctgtcacaatttgcaacttattttaatattcctcctaacctttctggttttttttcgagacagatctcattctgtcacccaggttagagtgtagtggcatgatctcagctcaccrcaacctccaccctccaggttcaagcaattctcctgccccagcctcctgagtagctgggattataggtgtgcaccaccatgcccacttaatttttgtattttttagtagagatggagtttcgccatgttggccaggctggtctcaaacgcctgacctcaggtgaaccacccacctcagcctcccaaattgctggaatttcaggcgtgagccactgtgaccaacttcctcttaaccctttctaacttaaagtttattttctctaaccccaagcttttgtggtatcttaattagaaaatctttgcttatagacaacaatgatcaagg

SEQ ID NO: 551198 - DNA, 1319 bp, Homo sapiens
atacatttataagatgcatattatgtttatttattatgcaatttgggttcgaggatgtgtaagacccggattttacacattcttgaaccccaattgcataataattaagcctatttatttacctatttgctcatttgataaacatttattgaatatctaccaagtggcaggctaagaagcatgtataaagtgcaacaggaacagtgcaaaagggtaacagccttgctttgggaagtcggcaaaggctccctgagggtcacgtggctttaaatgatgcctcaaagttttacaggcacaaaagagggagaagggaatttctggtgggagaaacagagcctgcaaaggtcagagtgtgttaagaatggggtgaatggcacagattttaatgaggctggaaacacagggtgtgcatgtatgtgtgtggcagcagcagggaagagaggcgggagggaaattattctagagggaagctggggttgggggaggtaggtcagagccagcctgtggagggcctagaaggccacactaactttggrcttgtcaattgtccaaggaagggccacagaaagttattagccaggagaaagacatgatcactttatgttacagaattggactagcattagtgtggaaaggggtgccaattatagtcctttaaattgaggaagatcctagctcagataagagcactggggatgagaggagggaaccaattcaagagacactttggaagtagaattattagaaacaagaggcctcctgcatgtggagactgaataatggtagcagctgaggatcagcctctagcttgggaaacagaaaaggatgtgagagaaatgtgcttaaatgtctgtcattttggggatgtgtgtaaatatatttacttattttgcacaaacgtaactgaaaacttttcaggacataaacacatcatgaatatgtatttatttaaacttaaatatttctcaccacgaagtcgaactaaaagcagaaataatataaaagctgtgaaagtacatccagtaggaaaggtacaaattaacagaccactatataatttcctagcctatccatttataaacgcaaaattatgctcaaaagacaatttttttttcaaagactccatccaactaaaagtagaccacagaggggaaaaaaaaatccctgaacacaaaggtgggttgtctaaccattatagccaaaggaaaaaaattttttttaatgttttattttttgaaacggggtctcactctgtctcccaggctggagtacagtggcgtgatcatggcttactgcaatctctgccacccaggctcaag

SEQ ID NO: 551199 - DNA, 1319 bp, Homo sapiens
atacatttataagatgcatattatgtttatttattatgcaatttgggttcgaggatgtgtaagacccggattttacacattcttgaaccccaattgcataataattaagcctatttatttacctatttgctcatttgataaacatttattgaatatctaccaagtggcaggctaagaagcatgtataaagtgcaacaggaacagtgcaaaagggtaacagccttgctttgggaagtcggcaaaggctccctgagggtcacgtggctttaaatgatgcctcaaagttttacaggcacaaaagagggagaagggaatttctggtgggagaaacagagcctgcaaaggtcagagtgtgttaagaatggggtgaatggcacagattttaatgaggctggaaacacagggtgtgcatgtatgtgtgtggcagcagcagggaagagaggcgggagggaaattattctagagggaagctggggttgggggaggtaggtcagagccagcctgtggagggcctagaaggccacactaactttggacttgtcrattgtccaaggaagggccacagaaagttattagccaggagaaagacatgatcactttatgttacagaattggactagcattagtgtggaaaggggtgccaattatagtcctttaaattgaggaagatcctagctcagataagagcactggggatgagaggagggaaccaattcaagagacactttggaagtagaattattagaaacaagaggcctcctgcatgtggagactgaataatggtagcagctgaggatcagcctctagcttgggaaacagaaaaggatgtgagagaaatgtgcttaaatgtctgtcattttggggatgtgtgtaaatatatttacttattttgcacaaacgtaactgaaaacttttcaggacataaacacatcatgaatatgtatttatttaaacttaaatatttctcaccacgaagtcgaactaaaagcagaaataatataaaagctgtgaaagtacatccagtaggaaaggtacaaattaacagaccactatataatttcctagcctatccatttataaacgcaaaattatgctcaaaagacaatttttttttcaaagactccatccaactaaaagtagaccacagaggggaaaaaaaaatccctgaacacaaaggtgggttgtctaaccattatagccaaaggaaaaaaattttttttaatgttttattttttgaaacggggtctcactctgtctcccaggctggagtacagtggcgtgatcatggcttactgcaatctctgccacccaggctcaag

SEQ ID NO: 551200 - DNA, 2007 bp, Homo sapiens
ctctctctctctctttgtagtaagaatgtttcagctttcaggtgaatgatcatgtttaactcttgggatgtgttattttatagtaaacaaactaaactttttattacataagtatttacacaaaacaaattgttgagtaaatgctaaccagcattattaggcatatattatgaacacaagcttttcttttaagctcatatttgattgactggtcatgtctctttttttgtttgtttctccctccttcccctttgtttaagaatgatttacctcagtctaacttcttccttgcagaccacatgtctttagtgtctattcttttgtttcacctctgtttctgttgtcaggatacttagttacagctttctatttagtagctatgtgtggccttcattcgtgaatcattgctccataaggtggatggttgctttgttctgtcttttttggaaggagctgaagttatacaataatttgcttttagcttttgacacacagaatagaagcaacttataccgattgcgatgatagcccatttaaatatagtactactaaaaactacattctcacattttttcccacagaaagtaattcacacaaatatatatcatgcataaatattttgaaaactaaagtgattaattgactttttattgttagttttgttcagtattactctaaattacatatgagtaaatttttgtcccagtttgttgtggttaataaaagaaactgatagatatcatagtatttgtataataatcaactgaggttgaaaggagtaacattttgagaatatctgtatcaccaatcataatcatcatctcatgtgaatatgtaaataagtaaatggcagacttgaggtttggatctacatatgagtgacttcaaagtctatcctttttgtgttagatcgtgtagtaatggtggcaattatcattattttaacttgctgcatgttattcttaaacctattgtctttcttctagagcatttcagaaccatactttaagaacagaggactatttctcaacaatctgcagaaaagtgtaagctatttgaaacctgactattgtattatctactgattcttttttttttctttttctttcttattttttgtagacagagtgttactcactgttgcccaggctggagtgcagtggcatgatcttggctcactgcaacttccacctcctgggttcaagtgattctcctgcctcagcctcccgagtagctgggattacaggtgtgcaccaccacacctggctatttttgtacttttggtagagatggaatttcaccatgttggccaggctggtcttgaacacctgacctcgtatgatctgcctgcgtcggccccccaaagtgctgggatcaaaagttgtgagcccccacacccggttcttatttattgattcttaattacatgcatttcatctactcttgactttgtttttactgtagtagatgctgcatgtggcattgaaaaaacagaaaatgaaaccttgtttgaagaccaaaatgttgataaggtaaatgaagatatggttaaaagccaacatagaataatcagagtccagtcctgttcaccaactcactcttatctgttaatgatctctagttttacaatggtaaattgttttatttggaaaatatttttcccatgctttattcacttgccatctccctgtctttataacgatgacaaggatcctataaaggaatggaagttctccaggtaataatagaaaagaagtgtaacarcaagggaaatatacgcatgggactaggattcctaaaaggtcgtgggagtaaatgattgttaggtttgccattagggaaggaaagaagtagaaagcaacctgaaagaacagctccacaaatacaaaggtgaggaggggaaagaagtaagaatacagagttgaataagagtgtcaagatgacaaagattagtataaaacacctcaaaaacggtgaatttaaatgacagtagaatgtctccatatc

SEQ ID NO: 551201 - DNA, 2007 bp, Homo sapiens
ctctctctctctctttgtagtaagaatgtttcagctttcaggtgaatgatcatgtttaactcttgggatgtgttattttatagtaaacaaactaaactttttattacataagtatttacacaaaacaaattgttgagtaaatgctaaccagcattattaggcatatattatgaacacaagcttttcttttaagctcatatttgattgactggtcatgtctctttttttgtttgtttctccctccttcccctttgtttaagaatgatttacctcagtctaacttcttccttgcagaccacatgtctttagtgtctattcttttgtttcacctctgtttctgttgtcaggatacttagttacagctttctatttagtagctatgtgtggccttcattcgtgaatcattgctccataaggtggatggttgctttgttctgtcttttttggaaggagctgaagttatacaataatttgcttttagcttttgacacacagaatagaagcaacttataccgattgcgatgatagcccatttaaatatagtactactaaaaactacattctcacattttttcccacagaaagtaattcacacaaatatatatcatgcataaatattttgaaaactaaagtgattaattgactttttattgttagttttgttcagtattactctaaattacatatgagtaaatttttgtcccagtttgttgtggttaataaaagaaactgatagatatcatagtatttgtataataatcaactgaggttgaaaggagtaacattttgagaatatctgtatcaccaatcataatcatcatctcatgtgaatatgtaaataagtaaatggcagacttgaggtttggatctacatatgagtgacttcaaagtctatcctttttgtgttagatcgtgtagtaatggtggcaattatcattattttaacttgctgcatgttattcttaaacctattgtctttcttctagagcatttcagaaccatactttaagaacagaggactatttctcaacaatctgcagaaaagtgtaagctatttgaaacctgactattgtattatctactgattcttttttttttctttttctttcttattttttgtagacagagtgttactcactgttgcccaggctggagtgcagtggcatgatcttggctcactgcaacttccacctcctgggttcaagtgattctcctgcctcagcctcccgagtagctgggattacaggtgtgcaccaccacacctggctatttttgtacttttggtagagatggaatttcaccatgttggccaggctggtcttgaacacctgacctcgtatgatctgcctgcgtcggccccccaaagtgctgggatcaaaagttgtgagcccccacacccggttcttatttattgattcttaattacatgcatttcatctactcttgactttgtttttactgtagtagatgctgcatgtggcattgaaaaaacagaaaatgaaaccttgtttgaagaccaaaatgttgataaggtaaatgaagatatggttaaaagccaacatagaataatcagagtccagtcctgttcaccaactcactcttatctgttaatgatctctagttttacaatggtaaattgttttatttggaaaatatttttcccatgctttattcacttgccatctccctgtctttataacgatgacaaggatcctataaaggaatggaagttctccaggtaataatagaaaagaagtgtaacaacaagggaaatatacgcatgggactaggattcctaaaaggtcgtrggagtaaatgattgttaggtttgccattagggaaggaaagaagtagaaagcaacctgaaagaacagctccacaaatacaaaggtgaggaggggaaagaagtaagaatacagagttgaataagagtgtcaagatgacaaagattagtataaaacacctcaaaaacggtgaatttaaatgacagtagaatgtctccatatc

SEQ ID NO: 551202 - DNA, 2007 bp, Homo sapiens
ctctctctctctctttgtagtaagaatgtttcagctttcaggtgaatgatcatgtttaactcttgggatgtgttattttatagtaaacaaactaaactttttattacataagtatttacacaaaacaaattgttgagtaaatgctaaccagcattattaggcatatattatgaacacaagcttttcttttaagctcatatttgattgactggtcatgtctctttttttgtttgtttctccctccttcccctttgtttaagaatgatttacctcagtctaacttcttccttgcagaccacatgtctttagtgtctattcttttgtttcacctctgtttctgttgtcaggatacttagttacagctttctatttagtagctatgtgtggccttcattcgtgaatcattgctccataaggtggatggttgctttgttctgtcttttttggaaggagctgaagttatacaataatttgcttttagcttttgacacacagaatagaagcaacttataccgattgcgatgatagcccatttaaatatagtactactaaaaactacattctcacattttttcccacagaaagtaattcacacaaatatatatcatgcataaatattttgaaaactaaagtgattaattgactttttattgttagttttgttcagtattactctaaattacatatgagtaaatttttgtcccagtttgttgtggttaataaaagaaactgatagatatcatagtatttgtataataatcaactgaggttgaaaggagtaacattttgagaatatctgtatcaccaatcataatcatcatctcatgtgaatatgtaaataagtaaatggcagacttgaggtttggatctacatatgagtgacttcaaagtctatcctttttgtgttagatcgtgtagtaatggtggcaattatcattattttaacttgctgcatgttattcttaaacctattgtctttcttctagagcatttcagaaccatactttaagaacagaggactatttctcaacaatctgcagaaaagtgtaagctatttgaaacctgactattgtattatctactgattcttttttttttctttttctttcttattttttgtagacagagtgttactcactgttgcccaggctggagtgcagtggcatgatcttggctcactgcaacttccacctcctgggttcaagtgattctcctgcctcagcctcccgagtagctgggattacaggtgtgcaccaccacacctggctatttttgtacttttggtagagatggaatttcaccatgttggccaggctggtcttgaacacctgacctcgtatgatctgcctgcgtcggccccccaaagtgctgggatcaaaagttgtgagcccccacacccggttcttatttattgattcttaattacatgcatttcatctactcttgactttgtttttactgtagtagatgctgcatgtggcattgaaaaaacagaaaatgaaaccttgtttgaagaccaaaatgttgataaggtaaatgaagatatggttaaaagccaacatagaataatcagagtccagtcctgttcaccaactcactcttatctgttaatgatctctagttttacaatggtaaattgttttatttggaaaatatttttcccatgctttattcacttgccatctccctgtctttataacgatgacaaggatcctataaaggaatggaagttctccaggtaataatagaaaagaagtgtaacaacaagggaaatatacgcatgggactaggattcctaaaaggtcgtgggagtaaatgattgttaggtttgccattagggaaggaaagaagtagaaagcaacctgaaagaacagctccacaaatacaaaggtgaggaggggaaagaagtaagaatacagagttgaataagagtgtcaagatgacaaagattagtataaaacacctcaaaaayggtgaatttaaatgacagtagaatgtctccatatc

SEQ ID NO: 551203 - DNA, 1036 bp, Homo sapiens
tccaaaactacatcaacacctctcttggtgctgaagaccacccttgcctcttgccctctcagatcccacttccacgttggtatcccttccctcacttggtcagcatcaaggcctttctaygtctgcctcacccctagcccaggggtagccacgctgcacacatcagcttcttctaaccctgctttcaagtgcacatttaaattagtggctcagttgtgaagtaggcaacacagatttccaggctccccattctgcgtcattttcccctttctttctggcttctcccccatatcaagcttccaaggtctttttgtttggaaacataccaatgctacccaaaggatgtttttttcaattatttatatttgatctgaaggtccattctagtaaggataagtcctcacattaaatgcatacaatttgcctgtgggactttggtatggttatggctgtcatacattctcccttcttagcccagtgtgggtgtgcccagactccactactggttgctgatagagcaccattctctttctcaatttaaagcaattaaagagcccatttctacccagcaccactctggtgttgtggcccagtctatgacccttaatcctattttaccaataggtgaaaccacaataatagctagcattttctcagtgctttacatttattaatttatatattacttatacaagttatatgtaacttacacttggtagttatacaaggtagattctattatcctaattttacaggtgataaaattgaggtacagaaaggctacatacttgtttaaagtcagtaagaggtggtaggtttcaaacccactcaatctggcttcacagtccatatactggcactcgataaatgccacatatcctctgggccaagcttaaatatcgccctttcggttctttttctgccttatacgatgggacaaatctctaccctctgcaccctcattaacctgtacatgcctctatagtagtcctcatctcattgcacagggttattttacaagaatgctttctagtta

SEQ ID NO: 551204 - DNA, 555 bp, Homo sapiens
gtggccttagttttcaaactgtactcagagaaaaatccccatctgaaaaatgactcttgttgagcccgcattgtttgccagctggctttccatggcagctctggctggagagaaccctggatgcttaagcagtccttttccttcctcctgttaggatgatgtgtgggagagtgaggaagagggagtcaaaaaagggaaagggatgaatgaagtcatctcaacgcacatggattgtttctttggtgttttgtggagatttcactccaggggcctcgggcmaaccagtttacttgggtagaagcatacgttgctcacctggccaagttttctcagtggaagatggcttagccattctttgccacgcttacttttggtcctgtatatgtaaagttgaccaaaaccctcacaagggccatgatccgatctgctttctcccatcgtctgctactctcctgcctatctcgcatccccaggctaaaactggtggtttggctgaggagtgggttatgcttcatggtacagctaaagttatcctgatctctcttgatatcccct

SEQ ID NO: 551205 - DNA, 541 bp, Homo sapiens
acaggattttgctcttggcttcagcgggaatgatgctggtatttctccagtaagctccaggaagatctccacgtacatggaaccctctcttaagcaatttaagtgaactgctgtgtgcgtaaagagggtggcctatgtggctgtgtgtgcatttgtttgtgcatacacaggacgcccctggaaggttacacaagaaactaacactattgagtgcctttgaggarggtacctgggtgactggggactggagtagggaatgaagctgttccattgttttatagctcttgattttttaaaatttaattaattaattaattaatttatttttgagacagggtttcactttggcatacaggttggagtgcagtggtatgaacatggctcactgcagccacctcaacctcccaggctcaagcgatcctcccacttcaacctcccaagcagctgggactacaggcatgcaccaccatacccagatatctttgtattttttgtagagacaaggttttgccatgttgcccaggctggtctctaactccag

SEQ ID NO: 551206 - DNA, 1130 bp, Homo sapiens
tcgggaaattgtcctgcctaagggcctggacctggaccggcccaagcggacacgtacatccttcactgccgagcagctgtaccgcctggagatggagttccagcgctgccagtatgtggtgggccgcgagcgcactgagctggcccgccagctgaacctctccgagacccaggtaagagaccagggccaggccactccactcttgtcctggcagcctgggaactcctggggatatgaggccctgtgagctgctacagggagacccaactttggaggagttcagacaagcatgagggaaagactttaagctacaggtaaaccagagtgaaagagcaaataaatatagcgccgaccacagacagtcaggaaatgccaatgggggccttctggatagatcaggcacttttggatggaatatggaaaaggttcagagaaactggggragagcagccctcagggcacagggagtggcttgggggggtgttggcatgtaagaggagtgacaagaagggatggtgagggcttggctggttggaaataacgattctggggaagatgaaacattataaaattgggctggggacctctcgcttctccatttctggccctttcccaccctccatcaccttcccttcatctcagggtgcctcagtctcttgttggaaaggaggggtctgcacacccccttcacctgggtaggactggcattttaacagcagtgtgcttaactcaaaagaaaaaaacttttgtaaattaagcacctaccctgtatgaatggagacccttcaagctggtactagagctataaaatactaccactactactactactactaatacttagtacttacatgtgtcaggcactaagtgctttgcctatgttaagtaactaatccctcccaagaagcagatgatgtcattcccatgttacacgtgaaaggaagttatgcccaaggtcagacaactaattagttccggagctgggctttggacaagcagtctctcatctttatgctgcctataaactgggcaaccttccttgagattgtcaaagaataactcagagacccttctttcagccagagctctagtagtttgctctcatatatgagggagatcaatcaatacat

SEQ ID NO: 551207 - DNA, 850 bp, Homo sapiens
tggcctttataggtgatggggtaggagggtgctgctaaaaacttcaaaccgggcaatggccagattgggttagaaagagctccctccaaaggcagcgtggcggccagcatggatgcagagacctcaccatccccagacaggcatctggcccctcctctggtcatgcccctccctacggaatgaggactctgcaaagccaaggggtctcgcctgccagaagcctgtgcccacctttgagaccacccatccctgccaacaaagtgtccagtttcagaattccccgccaaatggccctgagccacatccggcacctgcctgggcctctccagggtcagtcttcccaagggcagaccacagacattattcagcactccaggcccaagaagcggccaatggggggctatttgcagactgtgaacaggctggggcagccacacacgtgtgggtcagagccagggtgggccatgagccagaggcttccattttttctcttgccccagccctctagatgttacagtttagacctggggcagagacacctttaaaacactggcttcttcaccttggaatcacctggtgagctttaaaaactactaaagtctgggtcccaggttcccccgttctgagtttattggtccaaggtgagaagtgagttaggggcttaaagctccccaggttctcatgggcagccagggtcgagaggtgctgctgtagagacaatgccayggtccaggtcagagagaacaaagggagagaggagggtctgttctaggcagctgggagacaggctcctgcatgagtgagtggaggcagccatgatggaagagggagcgtgggaagcctctgtttg

SEQ ID NO: 551208 - DNA, 623 bp, Homo sapiens
gtgagggaatccrgtcacgttcccttctccccagagagggcgcatcttgacaagtgatcgagtagaaatcttttaaactctaagttaagttcataaaaaccactggtttcactctgtctcccagggccaggcctggcctctgagatgcactggcttggggcgccctcaggtggctgcatggaaaacccacagtctgaggccagcctggggctttcagacctgggcgggatctgcccaggccacctgtccttctgctttgggccgctgtctcttggcagatggcctgacacctgggggtggcccaaggatgcctcagaaaatcttgattcccactctacagatagcctgattagccagaggtttccaggccatctgtccgcctccaggagatggactgggacctttagacatcggtggagaacaggatgctctgtcccttgctgtccggggcagggacggcctccagccgcaagaagtacagcagcacctcgacctgccctcgcggagtggggaagaggagagtggctcagaggggggctcacagctgctggtggggaggtctttggggcccaagtccccaagtccacctcaggtgctagaaacccctgctggtgtcatgaacc

SEQ ID NO: 551209 - DNA, 623 bp, Homo sapiens
gtgagggaatccggtcacgttcccttctccccagagagggcgcatcttgacaagtgatcgagtagaaatcttttaaactctaagttaagttcataaaaaccactggtttcactctgtctcccagggccaggcctggcctctgagatgcactggcttggggcgccctcrggtggctgcatggaaaacccacagtctgaggccagcctggggctttcagacctgggcgggatctgcccaggccacctgtccttctgctttgggccgctgtctcttggcagatggcctgacacctgggggtggcccaaggatgcctcagaaaatcttgattcccactctacagatagcctgattagccagaggtttccaggccatctgtccgcctccaggagatggactgggacctttagacatcggtggagaacaggatgctctgtcccttgctgtccggggcagggacggcctccagccgcaagaagtacagcagcacctcgacctgccctcgcggagtggggaagaggagagtggctcagaggggggctcacagctgctggtggggaggtctttggggcccaagtccccaagtccacctcaggtgctagaaacccctgctggtgtcatgaacc

SEQ ID NO: 551210 - DNA, 623 bp, Homo sapiens
gtgagggaatccggtcacgttcccttctccccagagagggcgcatcttgacaagtgatcgagtagaaatcttttaaactctaagttaagttcataaaaaccactggtttcactctgtctcccagggccaggcctggcctctgagatgcactggcttggggcgccctcaggtggctgcatggaaaacccacagtctgaggccagcctggggctttcagacctgggcgggatctgcccaggccacctgtccttctgctttgggccgctgtctcttggcagatggcctgacacctgggggtggcccaaggatgcctcagaaaatcttgattcccactctacagatagcctgattagccagaggtttccaggccatctgtccgcctccaggagatggactgggacctttagacatcggtggasaacaggatgctctgtcccttgctgtccggggcagggacggcctccagccgcaagaagtacagcagcacctcgacctgccctcgcggagtggggaagaggagagtggctcagaggggggctcacagctgctggtggggaggtctttggggcccaagtccccaagtccacctcaggtgctagaaacccctgctggtgtcatgaacc

SEQ ID NO: 551211 - DNA, 1015 bp, Homo sapiens
ggcctggagttcctctgcccgtggccctggcccctggaatcccctcctccctctctgcccaactccccacccctgagagctggactgtccagaatactccagcaccttcaaattcatgagctgttaaatttggggcccacctcgattcttcacctgccagcaggttcacaggtgtaagaaaaatcggaggaaggcaagaaggaaacacacacaaaaggcttgcaggaggctcaggacacttgccaaagataggctctaagctccccaggaaccagagcaagaagggtaacaggagctccatcatttctatgagatttaacaaagcctttgcttgagggaagttggtgttttcaatgctgaggccaggcatctcctcagaactaacagtggggatgtgttttttgtctgtttgttttgtttygttttgttttgagacggagtctcactctgtcgcccaggctggagtgcactggtgcaatctcggctcactgcaagctccgcctcccaggttcacgccattctcctgcctcagcctcccgagtagctgggaccacaggcgcccaccaccatgtccggctaattttttgtatttttttttagtagaggtggggtttcaccgtgttagccaggatggtcttgatctcttgacctcgtgatctgcccaccttggcctcccaaagtgctgggattacaggtgtgaaccaccactccaggcagtggggatgtgttttacccaatcccttagtattgattggatttgggctccgacacctgcacaggtgactgcctggcagccccagaacacggagatgttctcaagtgtgtggcacagaaagtcactggctgcctttggggggcattctttttgggaaacacctctccattggatcctgggcctcaggtggaaaaccaggtcctgcctcgggactttctctgtgaggctccctgggtctggggctccagccattctccgagaggaaggtgccaggagagagagcaaggcccagccccacct

SEQ ID NO: 551212 - DNA, 637 bp, Homo sapiens
attccagaaacatggtaataaaaacaattatggtctgttagggtggtaactggcatccacaggtacattttataaaacctaacatttcatagttataaatgttaaaaataaaaaatcaactcaaacgtgaaaaagaccacctggttaagagaaaatatcagctcagactctaggtgaagataatgggatttaaaaaaagaacatattgagaatacattaaagatgtaagtcatgtgatatatatatatttaaaatctgcagtccttggaacttcagtctggacaaaaatgaatttcatatagcctcattaaatatttagcaacatttgacacaaagccaagaaaaawcccaaacttaatttatacttttattataaaaaattattagaccaagcagtgtgttttactctgcagcaaagtaattaaggaaagaaaaagagaggaatgaaatggaaatgaaattgcaagttagattgtggaataacactcactggagactcagaagggtggaaggttgagagggggatgagggatgagtaattacttaatcagtacaacatatattaatcgggtgatggttacagtaaaagctccaacttcaccactgagcaatatatccatgtaacaaaactacactc

SEQ ID NO: 551213 - DNA, 677 bp, Homo sapiens
aaaattttaaaaattagctggatgtgatggtgcttgcctgtggtactagctacttgggaggctggggcaggaggatcatttgaggcatgattgtgccactgcactctagcctgggtcacagagtctcaataaataaataaataaaatctcagccctgcaactacaagaggtgatatttctttcagacagtcctagaagctgttagatcccctatgcagatttttttttctttttgagatggggtctctgtcacccaggctggagtgagtggcttgatcatggctcactgcaacatcaacctccctggctcaagtgatcctcctgcctcagcctcctgagtagctgggactacaggtgtgtgccaccatgctcggcyaatgtttttattttttttgtagaaatggggtctccctatgttgcccaggctgttgttgaactcctgggctcaagcattcctcctgcctcgacctcccaaagtgctgggtttataggtgtgagccacggcatcaaacctccttatgtagatcttgagctatgaataaaaagttaaaagtcctgagctaattattttgattttaaggaaatgtggcaatcctctgactaaataattacacttttatgaatttattctaagaaaataaggaggtacaaaaaaatctaactatcagggtgaatca

SEQ ID NO: 551214 - DNA, 1442 bp, Homo sapiens
tgaggagagaaaataatctgctaacaygatgtaaccattgagatgcagaaatgaagctcactcttaactcttttattgttgttagggtttctaattaaaagcagtgctcttgctactatactttgtgatttaaaagagattgaatatttggaattatgttccttctctgcctaattttttgaggttttttttatgaagtgatactaaattttatcaaatgccttttctgcatctattaagaacatcatgtgttttttccttaattctgtgtatgtgatgaatcatatttattgcatatgttgaaccatcctcacatccctgaaataaaatccatttgatcatggcatattttctttttgatgtgctgttgtatttggtttgatagtattttggtgacaatttttgcatttatgttaatcaaccatgtactacaaatccatagccaacatcttactaaatggggaaaagttgaaggcaatccttctaataactgaaacaagacaatgatgcccactttcacgacgtctattcaatacaatactggaagacctagccagtgctatcaggcaagagaaagaactaaaagacaaacaaattggaaaagaggaagtcaaattatctctgttcactaataatatgatttaaaacaactctataaattaagagcagattaagtacagttagaaagaaaatgacttacaagatatttaagcggaaatgttatgcagcgctctgctaaaggagataaggagacaaaaacaaaaaaggattaagacataggaagaccaagtatttttaatatagctctaaatgaagacctataaagaaataaatgaaataatgcagaagagaaatatctgaagagagaactatttttcacaaattggtaaaaatatgaatgtattaatccaggaaaaaattgcttacaaaaaaatcatttagaatgacagtaaatttctctactaaaaccaatacatgccagaagataattgtgtaacatctttgaagcacttagagtaaataactgttaacatttatatatgaaaactatttttaaacatactatttcaaataaagatatgtatagtttaccacctagaaagttctaaagaatgatattcaaggaggaaaatgatctcagaaatactgtctaaggagtaagatgaaaattgaacaaattaaatgacaaatattagattaatcaaaataaatattttaagtatctaattatatgattatgtttaatgtgtataaattttaagaggctagaatagaaatattgcatgcaataggtaaataaaattatgtgagttaggaaacataaatgaagatgtttgaaatcctcttatcattagaaaaaagaggataaatatgttgttttactttattttttcaaagataattttgtaggataaaattttaagagtaagaaaatttaatga

SEQ ID NO: 551215 - DNA, 1442 bp, Homo sapiens
tgaggagagaaaataatctgctaacatgatgtaaccattgagatgcagaaatgaagctcactcttaactcttttattgttgttagggtttctaattaaaagcagtgctcttgctactatactttgtgatttaaaagagattgaatatttggaattatgttccttctctgcctaattttttgaggttttttttatgaagtgatactaaattttatcaaatgccttttctgcatctattaagaacatcatgtgttttttccttaattmtgtgtatgtgatgaatcatatttattgcatatgttgaaccatcctcacatccctgaaataaaatccatttgatcatggcatattttctttttgatgtgctgttgtatttggtttgatagtattttggtgacaatttttgcatttatgttaatcaaccatgtactacaaatccatagccaacatcttactaaatggggaaaagttgaaggcaatccttctaataactgaaacaagacaatgatgcccactttcacgacgtctattcaatacaatactggaagacctagccagtgctatcaggcaagagaaagaactaaaagacaaacaaattggaaaagaggaagtcaaattatctctgttcactaataatatgatttaaaacaactctataaattaagagcagattaagtacagttagaaagaaaatgacttacaagatatttaagcggaaatgttatgcagcgctctgctaaaggagataaggagacaaaaacaaaaaaggattaagacataggaagaccaagtatttttaatatagctctaaatgaagacctataaagaaataaatgaaataatgcagaagagaaatatctgaagagagaactatttttcacaaattggtaaaaatatgaatgtattaatccaggaaaaaattgcttacaaaaaaatcatttagaatgacagtaaatttctctactaaaaccaatacatgccagaagataattgtgtaacatctttgaagcacttagagtaaataactgttaacatttatatatgaaaactatttttaaacatactatttcaaataaagatatgtatagtttaccacctagaaagttctaaagaatgatattcaaggaggaaaatgatctcagaaatactgtctaaggagtaagatgaaaattgaacaaattaaatgacaaatattagattaatcaaaataaatattttaagtatctaattatatgattatgtttaatgtgtataaattttaagaggctagaatagaaatattgcatgcaataggtaaataaaattatgtgagttaggaaacataaatgaagatgtttgaaatcctcttatcattagaaaaaagaggataaatatgttgttttactttattttttcaaagataattttgtaggataaaattttaagagtaagaaaatttaatga

SEQ ID NO: 551216 - DNA, 1442 bp, Homo sapiens
tgaggagagaaaataatctgctaacatgatgtaaccattgagatgcagaaatgaagctcactcttaactcttttattgttgttagggtttctaattaaaagcagtgctcttgctactatactttgtgatttaaaagagattgaatatttggaattatgttccttctctgcctaattttttgaggttttttttatgaagtgatactaaattttatcaaatgccttttctgcatctattaagaacatcatgtgttttttccttaattctgtgtatgtgatgaatcatatttattgcatatgttgaaccatcctcacatccctgaaataaaatccatttgatcatggcatattttctttttgatgtgctgttgtatttggtttgatagtattttggtgacaatttttgcatttatgttaatcaaccatgtactacaaatccatagccaacatcttactaaatggggaaaagttgaaggcaatccttctaataactgaaacaagacaatgatgcccactttcacgacgtctattcaatacaatactggaagacctagccagtgctatcaggcaagagaaagaactaaaagacaaacaaattggaaaagaggaagtcaaattatctctgttcactaataatatgatttaaaacaactctataaattaagagcagattaagtacagttagaaagaaaatgacttacaagatatttaagcggaaatgttatgcagcgctctgctaaaggagataaggagacaaaaacaaaaaaggattaagacataggaagaccaagtatttttaatatagctctaaatgaagacctataaagaaataaatgaaataatgcagaagagaaatatctgaagagagaactatttttcacaaattggtaaaaatatgaatgtattaatccaggaaaaaattgcttacaaaaaaatcatttagaatgacagtaaatttctctactaaaaccaatacatgccagaagataattgtgtaacatctttgaagcacttagagtaaataactgttaacatttatatatgaaaactatttttaaacatactatttcaaataaagatatgtatagtttaccacctagaaagttctaaagaatgatattcaaggaggaaaatgatctcagaaatactgtctaaggagtaagatgaaaattgaacaaattaaatgacaaatattagattaatcaaaataaatattttaagtatctaattatatgattatgtttaatgtgtataaattttaagaggctagaatagaaatattgcatgcaataggtaaataaaattatgtgagttaggaaacataaatgaagatgtttgaaatcctcttatcattagaaaaaagaggataaatatgttgttttactttattttttcaaagataattttgtaggataaaattttaagagtaagaaaayttaatga

SEQ ID NO: 551217 - DNA, 1305 bp, Homo sapiens
aaaaaaacttttaaagtttgcttcctacatagtaagccagttttctgctttaatatccacagtccagattttaatttaactattgttaattttagtttaccgattatcttttcttatgttactcatctcatgttttaccttatcttactttctttacaactcagtatgattcttatatgactctctgttctcttgattgacataaatcacgtattcctgcctattgtttcaataccaaatagtagcctaacattttttgcgggttctgaaattggaaatgatagaatcatactcagtatttttctaacagttgatatatacaactttcttaattaccacttatatttaaatatcactaaaatcccattctcaatctatgcctgtagaacagattttaagcatgtctctgctggactgagttaggtttgtctccagcattcattgcatgattcactgacatgaaaccagttaagttcaaataacctacaattatcagtatttcccaccaacaaacatcctcctgtcaccgctcctatccacagtgctaaatttattgtggttatacctcaaagataaaatagatttccatcagcatctccctatttcttgtctttttgttttctggggatttactttctgaattgtaggggaaatttaaacatgaaaaattagaaacaataatttatgtcgaaataagatacctatggagcaaagctttcttagggcagggctatctgcttccaagacaagcaatgatagagggagaaattatatttctcttttttatcaggcctataggatccttgttttagcaccatatgcataatggcaaattgtgctgtttcatacaactacatagattttgtgggtagtaaaatattctcccaacttttggcaatagcttacttaactttttttattaaagttttgtgactttttatcttttttaggcatttatggatctttactgggatttcgggagaggctacattaggaatttctagtcagttctcctgtactatagtctactcttccctcatattaattactctgagcaatctttcagaaatatttccaaggcaaagtgatttgaaaggaatgaagtcaataaaaacctttcttcttctctgtccaaaatgacataatcaaataattttcatgagctctcttttataacagtgaaaatctacaaggctttgaatactaggcatcaaggtatgaaattacattattaaagttttccaatatttttcaacctctaagaatayacttaaattaaaatgcctacttttaatatactgtgac

SEQ ID NO: 551218 - DNA, 546 bp, Homo sapiens
caaagtggtgggattacaggcatgagccaccgtgcccggcctgcccattgtttctagtggaaaaacatcttttcaaacaactaatttacagtctttgtgaatataatccctttgtaagctgaggactgtctgcatttgtgtttttgtttttattaccttctgccttttaagtgttgtggagtctctgttctataaattcccctcctctaggtaggctgaacactccaggactttgccaagagaaaggaagcaatctaagctggaagcttcctggattgctctgaaagaaaggttaaatctgcctctttcctgtcctggttgctgatttctttgttggtcttcccagtctactttcctaattgcttggaaagaagtcctagaaatgaggaactttagacaggcaaaaagcaaataatatcctggtgccmtctctgaaattcagagcatcctcagtggtccaatgtttggattgccttctctgcactgaagggttgggcttttcaaagaggcaagtagagcagaagtcagaacaaaaaagctgaaaat

SEQ ID NO: 551219 - DNA, 625 bp, Homo sapiens
tgacaggtcctatgtaagatacacataccacatgctgtcaacccatctgagacactcagctttcaaatgacagttcttctctgaagctaacctagccaaaagagtgaaatacactatctgttaagctgtgtcagtagctaagtctgtgtgtctaaattaaaaacatgtaagttgcctttttcactaataattagtaacttagccagaggctgatcatatcagatagaaattggccgcatgcatgtgtattcgcttttacatattattagagagaggtaacatatcaaatcaaagatggattttaaaagcattgtattgtagccawataatttttaaattcttttttttttttgagacagagtctcactctgtcacccagggtggggtgcagtggcgcctgcaacctctgccgcctgggttcaagtgattctcctgcctcggcctccagagtagctgggattataggcgcctgccactgcgcctggttaatttttgtagttttagtagagacagggtttcaccatcttggccaggctggtcttgaactcctgacctcatgatccacctgcctcggcctcccaaagtgctgggattacaggtgtgagccaccatgcccagccataat

SEQ ID NO: 551220 - DNA, 1351 bp, Homo sapiens
tgtgtgtatgtaactttaactcctaggtctaagggcctcttggttgcctcgtcactccttcttattggcactcattactcctaaacagtctcaccactggtatcttcacttcaggatctccacctcagacataacccaaagagtaggctgacattaatttgtgtatttcaaagagctgttccttagaaatgtaaactctaaagctttttctggcataatgttgagttctgtttttatactcagaaaacaatttcgtgggattctaccaactttttcttttggaaatgatacktacatgctatatttgtaattatgtttatttacctgattttttccctgtggtatttttatctaataactttataataatttcatgtcatatacatataatattgatttaaaggagcaatttttttgtgaattgcatgcagcattccctttaatatttacactagctgggctttgttgaaatgggttaggtatggtgggtgttacctaactcctttattctgaactatattgtctacatatttaactatggatttcagtgtttctccaaacataataccttttatgcttgaataatttatttaatatagatatagttaaagggaacatgaatcatgaaacagatttataacaatgaagagataaactggggtttaattctgcattttacatgagaacaaataatggcattctattaagtagcaggttctcttatttgtgtatgacattaaagtgtacattaaatcttaggcaattacaaccacacctttcaccttttctgaaatggaagaattattcgtgtatgtctcttggccatggagcttttgcatggtagacaggtacaagaaaagagatacaaaagtaaaaagtggagagaggactatagttgtaaaagaaaaaaatcagagaagagcaatgtgagggagcttcaaagagaacagttttcagagagacagaaatagaaagtgacagaatacatacatttgcataaatgctaaagaaattttgatgagttgaataagaaaggattgggaacagcttttttattgtggtgttctcttaacccttcctctacttcctcaatgcattttaatgtacatttttatcatataattatatgtaggttagatcaagagcatagactgagtagatgtaagtaactctcccattatatagcccttaaaatatcataaaatagatatttaaaaataaaacttcataataatactgggagagtcttaatatttactaatattcaaacattaaagtagtaaataatgtcgatatggggaattgtgtgaggaaggaagtcagaaattattaggttcctgatcggtttagt

SEQ ID NO: 551221 - DNA, 775 bp, Homo sapiens
gtcctcttggttgttgacaagatactgttttaaagttccattttgccatacttcgaacagcttgtcattagctcaatttagccacatgtaaaatcactaaggcggacttccagagttcccacatgaaaatcaaatgtaaaccagcagtgacctgcttcaacaccatcatcggaagtcagaagttgaactcttttttgatgtttaaagcctgcataatattcgctgtattattattcagcatattactatttccttcgtgatggaaatttggtttatcccaattttctattccatcaaaacaccgctacatagaaaatccccatgcacatatttctcctaattgtggaaawattttacataaaagactctagacatgggatgaaattcccaggttattggaattttaaaatagataggtacttccaaattgacctcttacaaattatatgaattcgtaagcttccaactgttatggagttacccattttgagaaatctgtgctaaaaggacccaaacaatgctgatgacaatgatcaggataataagtacgctgggaagacaacaaaatgatttagatcttagacaagtcattctaggtgtctccactgtttcagttcttgcgttcgttcattcttgtgctttttcgttttaccaaataaaatagctccttgatgtcatatgaatccacgctatgcttaatgagtattggttagtaaaatgcctataactagtaatcttcatctatgcaattaaatattaattcataaaacacttc

SEQ ID NO: 551222 - DNA, 637 bp, Homo sapiens
aatcgtcggaggtgaagtgtgagcggagctgagtggaagggtgagctgctttttgtgtctgtctggtgatattcagcacgctgtttaaatttatatctggaaaaaaattctgtttgatgatagttagcaatgttttgtgcaacgtagaagagcatatggccatgcagaattcaagggatgctctttcattcttaatttgtaattatttttacactcaactgtactgaggtcagagagtttcaaaaattaatgagattccctgtggagttcaaatagtaatatctacgtgagctgtcacaaaaagataagattatgatggtatgttttcaacatagatttaactgtcttatttggaacatactccatttgaaatatatatgaaatgtacaatagtttatggaagcctatatgtttttggaaattagtyggttttttttaatgatgaggagaaattgactcaaaattagactgtagaggatgaacactttgtgtagagatattactaaaacttaatagacattgttatggcaatagagaatatcttatactttcgaggaaataagaaataatgaatgagtcgcacgctaaaaagaaatctgcaaatgtgttttcatttcaagtaatacaaaaaaactca

SEQ ID NO: 551223 - DNA, 554 bp, Homo sapiens
tttattttcctaactgggacaggtttgtgagtgaaagaggacaccaaaataattaaaattatattacttttggaaatatttacttattgatgacaaattggtttttatattaaggcccctataaaataactagattcaaaaaccattttccaaaataaaatatttctttaaaaaatccaaataacttgtatgtgtacatggaagcaatgttgaaaaactcctttatggggtttatcttcacatgcaaagatgtaggcggaataatcgttcttagtccttctttaagtttttaaaattagctttttttttttttttttttgayggagtctcaaactcactctgctcactctgtcacccaggtcacccaggctggagtgcagtggcaccatctcggctcatgcaacctccacctcccagattcaagcgattctccttcctcagcctttcaagcagctgagactacagacatgcaccaccatgcccagctaattttgtattttgagtagagacggggtttcactatgttggtcaggctgctcttgaactcctgatct

SEQ ID NO: 551224 - DNA, 621 bp, Homo sapiens
tatagacaggaataaatacatagtcgatgcgtagaggcaatgtgtgttgtgtagggagctggggatgggagatgtttctgagaagtgaccaccagtcttagtggagtagtgtccctacaggagggaaccctggagttgtcagagtcaccaagaaggttctttgcattttgatagactgcacaaggcttttgaagattcagtggaaaatggaataggaaggaagctgatgcctaacagaagccatcttctccagtaatagttcgaagggactgaccccaagtgctagaaaaaaaggaaatggttttaaaagcattttctttaaatattgccatgaagattgtgtttcaggtttagatttacatattgtcagatttttaaaagagaaaaaggtatatctttaacagacaagtgaaacctccctcagaaggtaagaagcagtcgttgcaaagcagttcaaygtaacaacatggaaagctttgcaaaggggccttcactggagctgtagttctgcttttatgaattgtgacttcagggaggagcagaaaaaaaccatgacaaaagcaggtggaagaagagatggagaaaagtttgcagaagtagaggagttcacttgctgcttca

SEQ ID NO: 551225 - DNA, 1552 bp, Homo sapiens
aattctagtggaaagaatatttgattgaaaatcaaaaataggactcattatccaaccagatctctcagggattcctcaagatttatgccaaatccatttatgcattagttttcccatcactaggaatgtgactattttgcgtcacaaaaaatatattagtaccactaaaaatagagtgtgaaaatgaatatatttatttgatcatagtctaaacacacgaatgataaactaaggcaagctaaagtttgatctacagatgctgaaaacagaaatggtttatttattatgtacctattactttgaccattgcatctcacatatacttgaacataattggaagaccagaagaaccaaacaatcttcaaattctacattcttcttccctcatcctctctctctccagtttagactcataaacttgtcactttccctccatccctgctgctgctgtttgacttcatttccccatctcacttgcctagataattttaactgctctagtatcagatcttcctgccatccatcattcccagcacctgtccactatccacacaaataagggcctcataaacctcttcagcttaattgcctacaacctatcatgacttcctgatctcatgatgcactctcatgtcactatgcttttctttctgccaaggatcccctggcccctcaacccagcttctaaatatccagtgataccccaagattcactgaagtttcatattctccagtagcctttccaatttcccaaggacaaacgtagtcttgactctggtgtactatagacctttcaacccaactctgttatagtcctaatcatactactctgaagcaaaagacattttttattctacttagtattgggcatttttttaaagtctggcatacaggagggattgaatttaattgatctcaaggaaaattggtctaagagtttgttggaatgagtaaatgaaagtactcccaacaaaggcattcattatttataaccattaaatgtagataataaaagacttctggtacaaaatggcatctggctaccatcccctgggcactgcctctcccagttgtcaatatcatacatatcaaaatggaaaactttaacacagaaaactaggagtgacaggaaatccagagctacaaatttgggaaaaacttagaccaattataaggttgatgagtcaagaatgagaaaatatccagtagcctatccaagtatcacttcacaaaacagaaaagtccacgtccttgaaagaggagcaggtatctttttttcttctcctattatctgctgcacagctcagctcagagatttggaccctgtagtaaacaggaaactgaamagggattctgttcaacatgggtgttaattttcagatggatagaatattatattcccttcctatccactaatatttctgtgctattcagatagagaaactcccagaaaataaaagggtggaagaataattacagcacactacatcctgggagacgctgtacccacaaataaaatgtggaagaaagaactggaagagtattgctccaa

SEQ ID NO: 551226 - DNA, 1223 bp, Homo sapiens
tttagtacatcacttgaggcaaccacgcagaaaaaggtggctttatgttcctaatttttcagcgtcatgactttaccgtgatctaaaattgctttctaatacatggggagaagttacgattgaagagaaagtgatgaacaatggcaaagtacagggcctgtacagcatggccggtcgatagcaactatgtagtaaaactctgttcattctggaaaaawaggaatgtttgctcctatgctcaaaacgtgacacagctgtcgggggcgccattcattatatataaatacaacgtaacctccatggagaacacactgtggatggtgtcccctagaggagtactgcatacttctttgctgtagtacagcaggtcctcaaacagcaatggttttgttcaacatcattgtgtcataacttttaggaggggaataaaaaccagttctcggttggggccactctctgtgtggagactgcatgttctctcatgctgtgtgggttttctctgggtactctcacatcccaaagatgtgcacgttaggtgaactggggtatctacatggtcctaatctgagtgtgtgtgtgtgtgtgtgtgtgtgtgtgtgtgtgagagagagagagagagagagagagtgtgtgtgtgtgtgtgtgtgtgtgcaccctgcaatgggatggtgtcctgttcaaggtcgattcctaccttgcagcttgcagagctgctgggatgggctgtggccaccctcaaccctggactggaataagcaagttggaaaataaatgagtgaataaatacaaattcttataaaatacaaatctgttaaagcaggtgataatcacacaaacgtacaacaataaacactgcaggacaacagcgttcagtgagcctgccacactgggtatggtatgtgtttgaactgcatggcagaaggaggtgctccttacaatgtttgctttgcaaacatttattcgttgattcaacacagcaccactacaaccactatcactcactgattcattaaaaatggggaatcatcattgtacttgttttttgttaacctttcttaaatgtatatataactcatgcttactttaattgttactattagaaatgttttaggtctttatttagaagtttggtgatgttttcgtgaccagaaatatatggtaggaacttaactcttgtttatatcaattagcctctggtaaaactggttttgttacatgtcatt

SEQ ID NO: 551227 - DNA, 1223 bp, Homo sapiens
tttagtacatcacttgaggcaaccacgcagaaaaaggtggctttatgttcctaatttttcagcgtcatgactttaccgtgatctaaaattgctttctaatacatggggagaagttacgattgaagagaaagtgatgaacaatggcaaagtacagggcctgtacagcatggccggtcgatagcaactatgtagtaaaactctgttcattctggaaaaataggaatgtttgctcctatgctcaaaacgtgacacagctgtcgggggcrccattcattatatataaatacaacgtaacctccatggagaacacactgtggatggtgtcccctagaggagtactgcatacttctttgctgtagtacagcaggtcctcaaacagcaatggttttgttcaacatcattgtgtcataacttttaggaggggaataaaaaccagttctcggttggggccactctctgtgtggagactgcatgttctctcatgctgtgtgggttttctctgggtactctcacatcccaaagatgtgcacgttaggtgaactggggtatctacatggtcctaatctgagtgtgtgtgtgtgtgtgtgtgtgtgtgtgtgtgtgagagagagagagagagagagagagtgtgtgtgtgtgtgtgtgtgtgtgcaccctgcaatgggatggtgtcctgttcaaggtcgattcctaccttgcagcttgcagagctgctgggatgggctgtggccaccctcaaccctggactggaataagcaagttggaaaataaatgagtgaataaatacaaattcttataaaatacaaatctgttaaagcaggtgataatcacacaaacgtacaacaataaacactgcaggacaacagcgttcagtgagcctgccacactgggtatggtatgtgtttgaactgcatggcagaaggaggtgctccttacaatgtttgctttgcaaacatttattcgttgattcaacacagcaccactacaaccactatcactcactgattcattaaaaatggggaatcatcattgtacttgttttttgttaacctttcttaaatgtatatataactcatgcttactttaattgttactattagaaatgttttaggtctttatttagaagtttggtgatgttttcgtgaccagaaatatatggtaggaacttaactcttgtttatatcaattagcctctggtaaaactggttttgttacatgtcatt

SEQ ID NO: 551228 - DNA, 932 bp, Homo sapiens
caaaaacaagtaacgtctaatgtggttcttcagtgagaaaagagtacaagatttcttgcctcttccaagaaagttattctaatcaagtcatttgagaagtttctataaatactgtttggaaagttctaaaacagtattctttaattaattctgtattcctgacttcacattttagacatccttatttcattttcactccgttattccgaatttataaatttgaactgtcttcttaacttcacctgattttgttccatgacttttagctcattagtgtcatgtgtgttcttctatgaggagcaaaccttaaaaaattggtgttactttttcttcaaaatgtcagtgtacaattttgttgtatttacttaaataattttycagagacagacttggtttggaacctgacatttaacagatgtgtttctgaatccaagataacctttaaaaaaacaaaaacaaaaagacaaaaacagaggtgtggccctgggacaagttgtttcacttctgtaagtctcagctttctcctttatgaagtcatgcctggaattctgctattaattatatatttaaaacaaaaaaaaatcagtatgtcgaagagatatcggcgctcctatgtttattgcagcactatgcacgatggccaagatatgcaatcaaactaagtgtccatcaacaaatgaatggataaagaaaatgtggtacatatatgcaatggagtactgttcagccatggaaaagaatgaaattctgtcatttgcggcaacgtggatgagcttgaaggacagtatagtaaatgaaataagccaggcaccgaaaggtaaatactgtatgttctcattcatatgtggaagctaaaaaaaaagttaatctcataaaagtagagcatagaatagtggtcactagaggaaaagaaggagcaggggcaagagggc

SEQ ID NO: 551229 - DNA, 1064 bp, Homo sapiens
atggaaacactttcttttcaggtcatccacttacaaaggtaacatttgcattaaaatatgttggaagttaattttttttkttaatgctcaagtagggtcatgccaccatagccatatccattatttcaaaattcataaacatagattgacttaatctacaaaaatacttaaatgaggtactcaccctataggcataattgccagcatgttaggtagccacttggaacattgtcaaagaaagacaccaaaagagatgttagcaatgacctatttgctggcattcctcgttaggctagcttgttgagtatttaagattgtgttggccaggcacggtggctcacgcctgtaatcacagcactttgggaggctgaggtgggctgatcacgaggtcaagagattgagaccatcctggccaacatggtcaaaccctgtctctactaaaaatacaaaaattagctgggtgtggtggcacatgtctgtaatcccaactacttgggaggctgaggcagaagaatcgcttgaacctgggaggtagaggtagcagtgagcagagactgtgccactgcactccagcctggcaacagagcaagactctgtttcaaaaaaaaaaaaaagattgtgtcatgtctgacacgaagagaagaggctggagatgagaatacagcacaggtctcaatttatatgtgctttccctttggagactcatagatgtttctgcctcagttacccatctgggccatcaagaattcaaacatttgttgaggggcagcaaagtactcagcatgaggttgggcacaacgtagggctcaaatgtgcatgacttcttaaataagttgtttgctggtaccaggtaggatgtggttaagttttacttcctggtgtagactggaagtgctgacagggagagggagatgaggctggagcagctggagaaggcttcatgagaggctactgtgactgtacagatgtatgaaatgtgagcacaacctcttaccaggaagaccaatgggatgctgtctaacctagcttctggatcactcacatagaccattggctgctgacta

SEQ ID NO: 551230 - DNA, 1064 bp, Homo sapiens
atggaaacactttcttttcaggtcatccacttacaaaggtaacatttgcattaaaatatgttggaagttaatttttttttttaatgctcaagtagggtcatgccaccatagccatatccattatttcaaaattcataaacatagattgacttaatctacaaaaatacttaaatgaggtactcaccctataggcataattgccagcatgttaggtagccacttggaacattgtcaaagaaagacaccaaaagagatgttagcaatgacctatttgctggcattcctcgttaggctagcttgttgagtatttaagattgtgttggccaggcacggtggctcacgcctgtaatcacagcactttgggaggctgaggtgggctgatcacgaggtcaagagattgagaccatcctggccaacatggtcaaaccctgtctctactaaaaatacaaaaattagctgggtgtggtggcacatgtctgtaatcccaactacttgggaggctgaggcagaagaatcgcttgaacctgggaggtagaggtagcagtgagcagagactgtgccactgcactccagcctggcaacagagcaagactctgtttcaaaaaaaaaaaaaagattgtgtcatgtctgacacgaagagaagaggctggagatgagaatacagcacaggtctcaatttatatgtgctttccctttggagactcatagatgtttctgcctcagttacccatctgggccatcaagaattcaaacatttgttgaggggcagcaaagtactcagcatgaggttgggcacaacgtagggctcaaatgtgcatgacttcttaaataagttgtttgctggtaccaggtaggatgtggttaagttttacttcctggtgtagackggaagtgctgacagggagagggagatgaggctggagcagctggagaaggcttcatgagaggctactgtgactgtacagatgtatgaaatgtgagcacaacctcttaccaggaagaccaatgggatgctgtctaacctagcttctggatcactcacatagaccattggctgctgacta

SEQ ID NO: 551231 - DNA, 1064 bp, Homo sapiens
atggaaacactttcttttcaggtcatccacttacaaaggtaacatttgcattaaaatatgttggaagttaatttttttttttaatgctcaagtagggtcatgccaccatagccatatccattatttcaaaattcataaacatagattgacttaatctacaaaaatacttaaatgaggtactcaccctataggcataattgccagcatgttaggtagccacttggaacattgtcaaagaaagacaccaaaagagatgttagcaatgacctatttgctggcattcctcgttaggctagcttgttgagtatttaagattgtgttggccaggcacggtggctcacgcctgtaatcacagcactttgggaggctgaggtgggctgatcacgaggtcaagagattgagaccatcctggccaacatggtcaaaccctgtctctactaaaaatacaaaaattagctgggtgtggtggcacatgtctgtaatcccaactacttgggaggctgaggcagaagaatcgcttgaacctgggaggtagaggtagcagtgagcagagactgtgccactgcactccagcctggcaacagagcaagactctgtttcaaaaaaaaaaaaaagattgtgtcatgtctgacacgaagagaagaggctggagatgagaatacagcacaggtctcaatttatatgtgctttccctttggagactcatagatgtttctgcctcagttacccatctgggccatcaagaattcaaacatttgttgaggggcagcaaagtactcagcatgaggttgggcacaacgtagggctcaaatgtgcatgacttcttaaataagttgtttgctggtaccaggtaggatgtggttaagttttacttcctggtgtagactrgaagtgctgacagggagagggagatgaggctggagcagctggagaaggcttcatgagaggctactgtgactgtacagatgtatgaaatgtgagcacaacctcttaccaggaagaccaatgggatgctgtctaacctagcttctggatcactcacatagaccattggctgctgacta

SEQ ID NO: 551232 - DNA, 392 bp, Homo sapiens
ggtctgtgtcctggctcttttccttctaattatgttgggaagtrcaatgacatgataaggttttttaaatatatataaatgaaagtattgtcttaatgtagtagtgcattcagccttgatgtctacaaaccttcagtatgttgcagtgatttaaaagtatccttacaattcatatgtaaggatgttatatgtattccaaaagaaaatgtattaatgctaatcctgagtaaagctgtgagtcttaaaggatgccttgtccaccaaaaagggattagaataggcccattggttcagggatgtgggaaggatcttggcatacacttgggtttcaggtgaaaaaatatgagagtaacctgatggaaatggaaacaccacgaccaggaaagggatct

SEQ ID NO: 551233 - DNA, 646 bp, Homo sapiens
gatccatcacatcacatgtgtttcataagttgcccttttgtatagcaatgtacttaaatatctctgactacatcttgtcaatgtgcttttttctcaaaataattttaaaaatagttttatctagctcattttttaaatcttaaaagcaatgcatatttactgcaaaataattcagaaaacatacattaaaaagatatcgtctttcgtactactgccaaaagttgctgaagcttgttttacagggcacttgaaagaaggtatttataagccaggcgcggtggtgcgtgcctgtaatctgagcattttggaaagcagaggtgggcagatcacctaaggtcaggagttcaagaccagcctggccaacatggtgaaaccctgtctctactaaaaataaaaaaattagctgkgtgtggtggcgggagcctgtaatcccagcaacttgggaggctggggcaggagaatcacttgtgcccgggaggtggaggttgcagtgagaagagatcgagccactgcactccagcctaggtgacagagcgaggctccatctgaaaaaaaaaaaaaaaaaaaaaaaaaaaaaaagaaggtatttatgctaaaataggtttaggaaattgggggttaaatgcacataaacaggttttctttt

SEQ ID NO: 551234 - DNA, 1014 bp, Homo sapiens
gaaagcaaccagaggtaaaatctgaaagctgtagctgaggaagcactaaaggtatggtgatatcctgcctggaggacggtagagccagaagtatctttcctatcacaattctgaagaattgtgatgcagtaggggaattagtgtggcctatccacataggaaccaggaacaaacagacacttcttacttccacaagaaggcaaaaactcttacaattagtgtagccaaacagtaagaccatgctgctaagaatatgcaatcacatatttaacaactatcctggaagaatattacacatgggtgcccactttggttgggatttaaacatttctatgaaaactataaatcaaatttcatatgattttatgagaatccrtacaaaaaggaaaggaacttctataattgttttaaattcatgaaacatcataggttaaaagtgtatatatgctttagcaaactctagaatttttctttaaccttctaccagttttgtcttgggagtcaaacatgaattctacataagcaacccagcaaggtttggttgaaaagaatactagatttagaatcagaagttttgtggatttttatttattcttttaccttttgcaaattcatatctcggaatattgtttctcatatataaagtggcaataatatcatctgccttacagattgctgtgaaaatcaaatgaaaccacatttatacaatcaggttgtagactatgtgacactgaatattataaagggttgttttcattccttttttttgtttcaaaataagtctctctgtctactatttctttccacaaatctcttagttattaaagaactcatctgtccccactttagttttccccttcttttcttttaaagttctactacaggttcattatcatgagaacatatgtaataggcacacaaatacctttgaaaaatggatgctctgcagtaatggcatctccaaaagataattatcatccaaactttagtatgcatgtcagatatgacctcaca

SEQ ID NO: 551235 - DNA, 1014 bp, Homo sapiens
gaaagcaaccagaggtaaaatctgaaagctgtagctgaggaagcactaaaggtatggtgatatcctgcctggaggacggtagagccagaagtatctttcctatcacaattctgaagaattgtgatgcagtaggggaattagtgtggcctatccacataggaaccaggaacaaacagacacttcttacttccacaagaaggcaaaaactcttacaattagtgtagccaaacagtaagaccatgctgctaagaatatgcaatcacatatttaacaactatcctggaagaatattacacatgggtgcccactttggttgggatttaaacatttctatgaaaactataaatcaaatttcatatgattttatgagaatccatacaaaaaggaaaggaacttctataattgttttaaattcatgaaacatcataggttaaaagtgtatatatgctttagcaaactctagaatttttctttaaccttctaccagttttgtcttgggagtcaaacatgaattctacataagcaacccagcaaggtttggttgaaaagaatactagatttagaatcagaagttttgtggmtttttatttattcttttaccttttgcaaattcatatctcggaatattgtttctcatatataaagtggcaataatatcatctgccttacagattgctgtgaaaatcaaatgaaaccacatttatacaatcaggttgtagactatgtgacactgaatattataaagggttgttttcattccttttttttgtttcaaaataagtctctctgtctactatttctttccacaaatctcttagttattaaagaactcatctgtccccactttagttttccccttcttttcttttaaagttctactacaggttcattatcatgagaacatatgtaataggcacacaaatacctttgaaaaatggatgctctgcagtaatggcatctccaaaagataattatcatccaaactttagtatgcatgtcagatatgacctcaca

SEQ ID NO: 551236 - DNA, 638 bp, Homo sapiens
ttgstattattattatttaaaagatgagtcaggagggactcagttatattcaacatcaaataagtactcagaaaatgaaaaaaataaaataaggcaacatatgtccttaaacaagttgacagactgaaattaaggaagagatggagaggaactttccctaatactctgaaaaaatgccccattaattgctgaatgtcacataaacatgataagtaagaaaaagaaacattcttgccagagtaatatgcatgagtaataatcacccagcacatggcagggactcaatgagtatgttcagaatgaatgaaaaataaatgaatgaatgagtgagagagggaagggatgatatttaatttttcctaggtctgcaactagagtttttcttttggctaaagctacaattctccacatcatttcttctgctttggaaaataactctttctcgtccccagggtattatttcaattactacttcatcaaaagagttattctcactccttactactctcagggagtagtttacacaatggaggaatttgtcctaaaatatttctgttttttcctctcataaagtcaataaagtggaagctctgtccaaacacaatcattgacttgagcaatttaaagctgaggatatt

SEQ ID NO: 551237 - DNA, 638 bp, Homo sapiens
ttggtattattattatttaaaagatgagtcaggagggactcagttatattcaacatcaaataagtactcagaaaatgaaaaaaataaaataaggcaacatatgtccttaaacaagttgacagactgaaattaaggaagagatggagaggaactttccctaatactctgaaaaaatgccccattaattgctgaatgtcacataaacatgataagtaagaaaaagaaacattcttgccagagtaatatgcatgagtaataatcacccagcacatggcagggactcartgagtatgttcagaatgaatgaaaaataaatgaatgaatgagtgagagagggaagggatgatatttaatttttcctaggtctgcaactagagtttttcttttggctaaagctacaattctccacatcatttcttctgctttggaaaataactctttctcgtccccagggtattatttcaattactacttcatcaaaagagttattctcactccttactactctcagggagtagtttacacaatggaggaatttgtcctaaaatatttctgttttttcctctcataaagtcaataaagtggaagctctgtccaaacacaatcattgacttgagcaatttaaagctgaggatatt

SEQ ID NO: 551238 - DNA, 665 bp, Homo sapiens
aagatagttcaagaagagaaatttaccctcaatatctaggaaatgttctctctgtatttctctgaacataagaaagtctaagtgagacatttcaagacatccttcatttcatttcctccctgcattcctatccaaaaggccaaaacaccaaaactagcttattattcctgctattctttcatagacttcatcagctgaatgcagaaaaagtaagatttgctgtaaatggaggagctaagctactatcagaaggtactaataaccttgattaggatattagagtctatagatagtggtcaaagggcttgtcttaggcragtacattgccgacaataccagaactagaactcaagccaactactcgatttccaagtagtacatttatatgttacgctgagaaggaaaattgctatcttccttacaacattgaagctaaaaaaaaatttgttccatgtacgggtataagtactgcatgcttgatacagcaaacagaggtttccattgactattttcattgagtccaaatttcccttaactagcagacggctcttactcatctcagcaagctcctagcagattgactttttactgtgcaaggagtagaagtcagcagggaactcggatcctgaaacaataagaaaattgagttgagatggatatgtaag

SEQ ID NO: 551239 - DNA, 665 bp, Homo sapiens
aagatagttcaagaagagaaatttaccctcaatatctaggaaatgttctctctgtatttctctgaacataagaaagtctaagtgagacatttcaagacatccttcatttcatttcctccctgcattcctatccaaaaggccaaaacaccaaaactagcttattattcctgctattctttcatagacttcatcagctgaatgcagaaaaagtaagatttgctgtaaatggaggagctaagctactatcagaaggtactaataaccttgattaggatattagagtctatagatagtggtcaaagggcttgtcttaggcgagtacattgccgacaataccagaamtagaactcaagccaactactcgatttccaagtagtacatttatatgttacgctgagaaggaaaattgctatcttccttacaacattgaagctaaaaaaaaatttgttccatgtacgggtataagtactgcatgcttgatacagcaaacagaggtttccattgactattttcattgagtccaaatttcccttaactagcagacggctcttactcatctcagcaagctcctagcagattgactttttactgtgcaaggagtagaagtcagcagggaactcggatcctgaaacaataagaaaattgagttgagatggatatgtaag

SEQ ID NO: 551240 - DNA, 1389 bp, Homo sapiens
accttcttctgaatgtttgggaagggctcatggagcaatggagtttccagaagtcatttaatggagagacagggagatttggaagtcttgggagagtattggaagcataaggggtggactgtgaagtcagaatcctagagtaagggcaagtcggtggccgctgggtgaggcatgggtgaaagacctccagggtggaagcctgggggactgggaggaatttttcagtaaaccattcgaaatacaagcaggacctaggctctagtgtacctcttgggtagagggaacaaatatgaacagcaccacagagaagagatacccagactttggtaagttactgcatttgaaggccggaagaacagagtgaatacagtaatgatcacatagtaaatgtggaaaaaaagaaaagggtattttccatgtttatattgataaaccatatacaattagagttagtgttaatgagatgtggagcttagttaaggcttcataatgtttcaaggatatgtgttgacaatacagagagtagatacttgtgagctgactcctggttgacccttttcagtgctggagaggccttgagtagaggccacaggataaagattgcaaagcataaagaggatctggctaagtctcaggctgaggaggtgcaggtgcaaaatttggcaatatgcagaaaatacattcaagtacctatttcatcaaaaatttccctgagcaagaaaataattttcaacagcccacagagcagcccacttactagaacactgttcactgcaacaaacctttcccataaaataaacgtatgttgaatagtcccttgacatttattataattggatatgacctgtaataacagagcagaaaggacaaagaaaatgggaattatgattgtrgtgttgatctgtgagctatgcagaaattcgcagcaataaatccagccactcccagacttatctgattgaagattattcgtgtcactcatgttttttccttcttccaagtgcttgcttacctttgattctgaaaagggtaggaagtttgatcagtttccatactagttaaaagtaccaataaaggatttgattgggaagaagattagaagttagacaaggtttcagacttatctgtagatttcatgtgaccaaggtttcccagttttccattaatggtcaaaagttgcctgggtgttaatgcttggagttaaggcagttctggccatcgattagagtcataagaatttctcaaggttttactctaatttttttccatccttgcaggtggtgcttggcacttttcatttaatgtgaaattttatccaccagaccctgcccaactatctgaagatatcaccaggtatttgaaagttggctatgcaaaagacaagcatat

SEQ ID NO: 551241 - DNA, 2326 bp, Homo sapiens
ttttgatttatttattagtttaacatttattactttaacaatttacttatttattactttaaccaatcagcaagtagtcagcccaagtttcactgtaaaccctaaaaatatacaatattgccacattaaagtctctgggattctcaaggctaacttgctgacttagcagtggactgtatcagttaaaaggcagtgtggactcagacaatcaaagaaccaggggccaggagacctgagaacaattaaaagcaaaatgtagatagattttttttttaactacaaaaaacacaaagctaaaaagtccagcttaaaccagatgagtaaaaaaatagctggagatattcttttaagtcttagccagagtgcaaaagggaggatggaaagtcattttattaagagctgaagctagcccggcacagtggctcacacctgtaatcccagctctttgggaggccaaggcgggtggatcacttgaggtcaggagttcgagaccagcctgaccaacatggtgaacccccatctccagtaaaaatacaaaatyagtcaggcgtggtagcgcacacctatagtcccagctacttgggaggctgaggcaggagaatcacttgaacccaagaggcagaggttacagtgagctgagatcgccccattgcactccagcctgggcaacaaaagcaagactccatctcaaaaaaaaaaaaaaaaagacctgaagctttttgcggatgaagatatctcacaaaagacaagtactgaaaattcatggccaggcatggtggctcacacctgtaattccagcactttgggaggccaaggcaggtggatcatgaggtcaggagtttgagaccagcctggccaacataatgaaaccccgtctttactaaaaatacaaaaaaattagccaggcatggtggcaggcacctataattccagctacttgggaggctaaggtaaggagaatcgcttgaacctgggaggcagaggttgcagtgagctgagattgcaccactgcactccagcctgggcgacactgccaagactctgtctctcaaaaaaaaaaaaaaaaaaaaaggaagaaaattaatttaaaaataattttaggtcgggtgcggtggctcacgcctgtaatcctgacactttgggaggccgaagcgagtggatcacctgaggtcaggggtttgaggccagcctggccaacatggtaaagccctggctctactaaaaatacaaaaagtagctgggcatggtggcgggcgcctgtaatcccagctactcaggaggctgaggcaggagaattgcttgaacccaggaggcggaggttgcagtgagccgagatcgtgccattcattgcactccagcctaggtgacaaaagcgaaactccgtctcaaaaaaataataataattttaactctgatgcctcataaggaaagtattaaaagccttctaatttatttctgtagtattaccattttctaagtgtaataatgaaagacgaagacaccatagctgaccaagaagattaattactgtgaaataataaatactcaagactaaactgtttttaattaacaggtatttcagcaaaaagtaaataatctgaaagactaatagtatcaatagaggtagtacaaccactaggaaaaaaagttcaaccttttgtttctattgatatgttctccatatttagatcctcaaaactgcagatatatacagtcattcatgacactatgtaaatagcagataacaggaaaaacaattcaatacttaaccaagttcactggagcacaaagtaatcgccactcaagaatgctgacacaaaaactgaaggacctctcaagttccaatagcacgcagataagctgagcccctatgcagttactcatctgaacagaagtggaagattaacctaccctcactcatttcacacactaacctgacaaggcagcaggcagtctcttcggagcttgttcatcattcagtctgttccagaagtaaccgattccgttaggatctgtgccttcaggttaccactgtttcactacagccctgtatcacttcacccttgtcccaccttattctttcaggcattataaaattcttgttttctaaataaagttctaaaccttactcacctgcagttcactgcactgggtatcacccaaatagcccatcagagctctttataatttctgaaagacaaagaagaaagtttttttaatacatagtagaaaacaccattcaccaagatatcagttccaaagcatttgtatccaatattcccagcatatggtcttttggtccacactagttcaataaaatgtagca

SEQ ID NO: 551242 - DNA, 2158 bp, Homo sapiens
tctgagcttctttcagcactacagttctgtgaaaaagttggacatctgcttatggccacagtaaaagtagaggaaaaaaatcattaatttaaaaagctgttaccatacccaagcttgttcttaaaaataatatatgcagttgatatccatttactcattagtgaaaccccattagaaatacaatccccagaggctgggcacggtggctcatgcctgtaatccaagcactctgggaggctgaagccagtggattccttgaggccaagagttcaagaccagcctggccaacatggcgaaacccaccccccaccgtctctactaaaaaacaaaaataaaaattagccgggtgtggtgatgtgcgcctgtaatcccagctactcgggaggctgaggcatgagaatagcttgaacccgggaggaggaggttgcagtgaaccaagattgtgccactgcactccaacctgggcaacagagtgagactctgtctccaaaaaaaaaaaagggaacaattcccagtttgaaattgaaactgattttgcttactgtatgactgggacctctgtgttcaggactttttccagtctcatacgttcccttctaactccattctacctttgtatttcttgtcattaaaagaagaagaaaagctcttggcattcccagtagtttgccctgtcatcatttccatcttattgcttaggccaagaaaacatccttcagttaatcatttgtgtgaataagcatcactctgaaacttatctcaaaagcctcccctgtttatctgcaggtctcttctaatactccaagtagttcttttccaattatgcagtaatttaccatagttacactgtttcctttcgtagttcttactgtgtctgtctgcttacacttacctgatcagcaaaagtaactataccctgtatctcaaatgattctcatactgaaataaacaaataaaaattcagaagtgagaaagtggaaaagccagatcttttttttaatgttttttgtattttactaagcagatttatgactgaaagaaaaacattttaagcattttatcctcctctgttttaaataactattgtgggttttttttttttcagaaaattatttaaatacactggcggtagttaaaataacttggttttgattcatatattaatagttaaagtaaatattttgaactttcccatgaataagtacaatttagttagtcaagactttattattttatgaattatataaaaatattgttctctttcattcatgaagggaaggagaatctggtcatctagttggccagtgcatataatccactcagctgatgtagatatctgagtgtttatgtcaggcaaatgtgctccaggaggctgggataaagccacggatgtggcctccatgtggctcagcacttgagatgccaggacgcgctgccaacacctgggaataatagagaatgcgaatacctcccagattatcatagtatataaaccactccctgggagtaaatcaggaaccttgttcatgtgctttcaccctttccagactcctgggtaccttttaatgatcacttctgtagtgtattgcaggatactctggcaacaacttgaaggccttaatgtgactgccacaactgcctcgtaagttttcagtattggaggattatatcttagagagtctgtttaaaagccagtcactcaaatacctacaaggtccaggtggtagcacatgagtgaaactcgcactgggtaccatagtgaaagggaaaacttggcctgcttaaagagggcagctgtttctctgctccagtgaatggtaccaggtcagaatgtgggctcagagttatcacttcttcttgcctttaagaagaagctggaarttcagattttttgttggtgaaatctcctgaatcttaaatactggcaaatttacttcaaattaagaaagactgtaccagctaaatacgtctgtgggtcatcagtttgtgaattctgaaggagaatccaaaaatatattaatgtgcttcaacaggtaaattttctgttgactttagttggttatgagccacagggcctggggttctggctctaaatttctacataggaaaagccctgtgtttcctgtggacttgctatctcctatcctaccatttctct

SEQ ID NO: 551243 - DNA, 552 bp, Homo sapiens
aaattcttaacataattttgcaatgtaagtatttgtactgtgcttcagctatttccaggagtgctagcaaaagggagacagaagaagaaatattacccacagcaatattaaatgcaattcattgcctgggataatctgtagaagaatgcacagactatgatgctatagaaggaagtaatagcatgttctgggacttcctgcctgtgagttgagtaactatggtcaatctgtatcccctgagagggctggtaagcgaccgagggccattatatacatttgtggtggctgcaattatataatttacactacaactgcctaacccctgctgatcctttaataaagcattgagaaatcagaaattctataaagcaatatgtttaaaccaatgaaaacagtagcagttaagagttgcaggtctcaatacctcccgtcgttcctttgcattctatcatgacacagtcctccggcattattgagagcttgcatgtggtggtacagatcaccttccactcacatgggcaggattttacaaatgttcatggggwcagtttg

SEQ ID NO: 551244 - DNA, 669 bp, Homo sapiens
tggcacacgtatacatatgtaacaaacctgcacgttgtgcacatgtaccctagaacttaaaagtataataaaaaaaaaagtaccaaaaaagaaaatattttctcccattctctaggctgtctcttcactctgctgatttgattgtttcctttgctgtgcagaaggttttaattttatataatcccatttgtttactttcacttttgttgcctgtgcctttgaggtcttatccccccaagaaaaaaccattgcccagacaagtgtcataaaatgtttcctgtgggttttcttctagttgttttattatatgtggtcttatatttaagtatttaatccattttgggttgtttttaaatgagttaagaaatagggtctaaatgtgctgcttgcctaccatatgcaagtcacaggctatatkgtataaaatagaaagtaaaattgaattaaaaatgttcccatcttcaaaaagattctagagacatgagtcatattcacctataattcatctaaaaactagaatattaaaaaataaaagtacaacactgtgtggtgtcaacacagaagtcactgttggttggggaaaataagaaagattgaaaagagaagctaacattttatataggttcagattgtggtgtccagatcacagggatggcattctcagcaata

SEQ ID NO: 551245 - DNA, 549 bp, Homo sapiens
ttacttcatgttttataacttctgtctgctaagccctctcccaaccactgattcagagattcatagagtaggtgctcagttaatttgtrttaaacagacagataccagtttctgctgccagaaatataaaattatgtttggctgaaacattatagacaccaggccagttaccttttccctaaatcaatgtctgcagtctttctaacgctcaggccaatcctgccgctttatgtttcacgggggagcttgctttaccccagggcataaactgcacagcttgtaagacaactgatgctcacactgataggcttgaggtgggagcagggaagaaggaaagcgcggagttacgtgttgcctagcgagattgatgagatgatgtgttcgtatttggccacaggagggagccagaccctttgggaagcagcaacaaccaaccagagcggcgccacactgtcccacccactttaggaaaacttcaccagaaacaaaccaagaaaaaccagagttcctagacatatccaggtttcctaagcttttcatctagaatat

SEQ ID NO: 551246 - DNA, 584 bp, Homo sapiens
ttactgacaagtgagaaaggcaatgcacaatgcacagatagtctaacattttcaaaaccttccaggaactaaagacaccagttgctggaagatctggtcttggcctgtcagcctgccaaaaaaaaaaaaaaagttatttcctacaatataaactgactgaaaatgcctcacagtgtcttcaagagagctgggtcagggaagggaagatgatcatactgttagtttggctgtgttatctgtatgtgtttcggctgttaaaagcatactcatgcacaaggcagaacccattaatgtatctaaataagataagacagttaaggcacgagatcagaacttggcctatctaagtgagcctgtttacccaagtgctgagaacagcttaattccgaacttagaaacatggacataacaccacagaattcatattttgcattgagacttttaattkttattagtcattccttacattgactaatgctcatatatctttatatgtattccacaattgcagaagaattcttcttttaggcctatttctaaataaatatataagtggcaagtggacaaaagcatacatctattca

SEQ ID NO: 551247 - DNA, 581 bp, Homo sapiens
ctgtacctgcgatttggactttctgtgtaacggctgcttaagttcctctggcacatgggaagtactaaaagaagacagctcagcttcagaatattgattatcttccattttcctcattttgaggctatctgtgaagtgccttatatgatctagagcagaaagtccacttttatattcttcctctttatacctaaaatgaaccaacraaaaacacagaaattttcttttcatttgttatctaatcaaatcactttcatttgaatctatctatacaactgacaaacttcatattgtatctgcaaggtaaagtagcatgcatcaattattgggtttttataaatacttacaaacatcatgtcttaaaaatatatttctgttaagatttttagtaactaaagccaagcatatatttgagataaagagttaaagtcagtgacacattagtcagtaataggcagagacagaattcatatattcattatttccatttaaagtaaagctaattatgacaatatttagtcaacatccatcatgaaaatataatagtcccatcaatttaactgtttggttatttcttttca

SEQ ID NO: 551248 - DNA, 522 bp, Homo sapiens
agaacattggaactcatcagcttttggggccagcttgaggatagatttacagggtctatgtctaccttgtctccatagactttctcttaaagacgaaaagtgctcaagatattggacaaacagaaagacaatagatgatggtgttaaaagctaaattttgcaaaggaacaatrtaatttgatgtgaaatcaaaagcctaagaaaccagatataaataacactccagatttcaagcaataattgaaacttagcttcatcatgaaacttactttgctgtagtaggcaaagtagccttgagtaggtggactttcaaggggtcttagataagcacactgttttcaaggtcctgttttgcagtggtaggcttctttttggaatcttagtaggacctctaggatagttggtgtgctctgatcaatgaatggccaataggaacacacctgaagcttaaaaaatgttagattttttttttttggcactctagggaaactctgggaacatctcagcaaagaaaaattggca

SEQ ID NO: 551249 - DNA, 522 bp, Homo sapiens
agaacattggaactcatcagcttttggggccagcttgaggatagatttacagggtctatgtctaccttgtctccatagactttctcttaaagacgaaaagtgctcaagatattggacaaacagaaagacaatagatgatggtgttaaaagctaaattttgcaaaggaacaatataatttgatgtgaaatcaaaagcctaagaaaccagatataaataacactccagatttcaagcaataattgaaacttagcttcatyatgaaacttactttgctgtagtaggcaaagtagccttgagtaggtggactttcaaggggtcttagataagcacactgttttcaaggtcctgttttgcagtggtaggcttctttttggaatcttagtaggacctctaggatagttggtgtgctctgatcaatgaatggccaataggaacacacctgaagcttaaaaaatgttagattttttttttttggcactctagggaaactctgggaacatctcagcaaagaaaaattggca

SEQ ID NO: 551250 - DNA, 1327 bp, Homo sapiens
ctgggaagaatcccaatcacrgggcacctaagtgcaataggggatgcccaaaagcatagtaatattggtcaggtagtttgcaggggtgagttccagagagaaaacccctaagtatctcttgacgtacttttgtacgcagcttcctggagttctgacatgctccttgtgggatgcagaaggcagctgatggctgcgaagcagtaggcctatcacagggatccctgtagtgagggataactctagctggggttacagcagagactataggtggagttgtagagtaacggtagaggccaaagaaggaacaggagttaggtgggaaaggggaaatagtatcaggtgctagatatgctgagaaaacagcccatggatttcacccaccgtggacttgctagaatggatttagataggacagatcagaagaaactatttgcaactcagagaagcagaagccagggaagaaatataatttggaactaaagatcgcctccccagtataaagttcttattgtgcccaaattttattttggagaggaggagaatcttgaaaagagaaattttaataagaaatagtttgaactgcaatatgaattctgctgcaatggaccattgtaatcagtgtgaatggggcaagtctaaaatttcttttgtcattaggtggagggaggttggaagtgaaggaagaactctgaggttacatcaatcacatgatttctttaaaactacatttgtgtgcatgaattgtatataatatttgatcttattacacatagaaatggcaaaaatcagtggttatatgctttcaatatttttctcaagtaaaatccactataatttttaccggctaaatttatacttattttattaacaatttatttgcacatctgcctgggaaaaagtctgtttcaaacaatgataatctgatgcaactgtatctcttttagtttcagacctaccatcaaagcccaggagaagcccgtctcttttcaaagggctttcttttttttttttttttcctcaatctgggtggctaactttgatttgtctttggcacgatactgtggagctcacaagtaactctcattaagagttctgcaaatgctaattgatagatcagcaagtttggagggctgcttttaatacatacagtttcttttggagttttgcgtcttttctacctcttaagagtcaagtctatttgacagccaactagagagtattgaagtaattgcccataaaatgagagtctcctatctaccctcttctcagcacacttgcctaaagaatctgcctactgccttcactctttgcttcatttggtctttca

SEQ ID NO: 551251 - DNA, 1327 bp, Homo sapiens
ctgggaagaatcccaatcacagggcacctaagtgcaataggrgatgcccaaaagcatagtaatattggtcaggtagtttgcaggggtgagttccagagagaaaacccctaagtatctcttgacgtacttttgtacgcagcttcctggagttctgacatgctccttgtgggatgcagaaggcagctgatggctgcgaagcagtaggcctatcacagggatccctgtagtgagggataactctagctggggttacagcagagactataggtggagttgtagagtaacggtagaggccaaagaaggaacaggagttaggtgggaaaggggaaatagtatcaggtgctagatatgctgagaaaacagcccatggatttcacccaccgtggacttgctagaatggatttagataggacagatcagaagaaactatttgcaactcagagaagcagaagccagggaagaaatataatttggaactaaagatcgcctccccagtataaagttcttattgtgcccaaattttattttggagaggaggagaatcttgaaaagagaaattttaataagaaatagtttgaactgcaatatgaattctgctgcaatggaccattgtaatcagtgtgaatggggcaagtctaaaatttcttttgtcattaggtggagggaggttggaagtgaaggaagaactctgaggttacatcaatcacatgatttctttaaaactacatttgtgtgcatgaattgtatataatatttgatcttattacacatagaaatggcaaaaatcagtggttatatgctttcaatatttttctcaagtaaaatccactataatttttaccggctaaatttatacttattttattaacaatttatttgcacatctgcctgggaaaaagtctgtttcaaacaatgataatctgatgcaactgtatctcttttagtttcagacctaccatcaaagcccaggagaagcccgtctcttttcaaagggctttcttttttttttttttttcctcaatctgggtggctaactttgatttgtctttggcacgatactgtggagctcacaagtaactctcattaagagttctgcaaatgctaattgatagatcagcaagtttggagggctgcttttaatacatacagtttcttttggagttttgcgtcttttctacctcttaagagtcaagtctatttgacagccaactagagagtattgaagtaattgcccataaaatgagagtctcctatctaccctcttctcagcacacttgcctaaagaatctgcctactgccttcactctttgcttcatttggtctttca

SEQ ID NO: 551252 - DNA, 1327 bp, Homo sapiens
ctgggaagaatcccaatcacagggcacctaagtgcaataggggatgcccaaaagcatagtaatattggtcaggtagtttgcaggggtgagttccagagagaaaacccctaagtatctcttgacgtacttttgtacgcagcttcctggagttctgacatgctccttgtgggatgcagaaggcagctgatggctgcgaagcagtaggcctatcacagggatccctgtagtgagggataactctagctggggttacagcagagactataggtggagttgtagagtaacggtagaggccaaagaaggaacaggagttaggtgggaaaggggaaatagtatcaggtgctagatatgctgagaaaacagcccatggatttcacccaccgtggacttgctagaatggatttagataggacagatcagaagaaactatttgcaactcagagaagcagaagccagggaagaaatataatttggaactaaagatcgcctccccagtataaagttcttattgtgcccaaattttattttggagaggaggagaatcttgaaaagagaaattttaataagaaatagtttgaactgcaatatgaattctgctgcaatggaccattgtaatcagtgtgaatggggcaagtctaaaatttcttttgtcattaggtggagggaggttggaagtgaaggaagaactctgaggttacatcaatcacatgatttctttaaaactacatttgtgtgcatgaattgtatataatatttgatcttattacacatagaaatggcaaaaatcagtggttatatgctttcaatatttttctcaagtaaaatccactataatttttaccggctaaatttatactyattttattaacaatttatttgcacatctgcctgggaaaaagtctgtttcaaacaatgataatctgatgcaactgtatctcttttagtttcagacctaccatcaaagcccaggagaagcccgtctcttttcaaagggctttcttttttttttttttttcctcaatctgggtggctaactttgatttgtctttggcacgatactgtggagctcacaagtaactctcattaagagttctgcaaatgctaattgatagatcagcaagtttggagggctgcttttaatacatacagtttcttttggagttttgcgtcttttctacctcttaagagtcaagtctatttgacagccaactagagagtattgaagtaattgcccataaaatgagagtctcctatctaccctcttctcagcacacttgcctaaagaatctgcctactgccttcactctttgcttcatttggtctttca

SEQ ID NO: 551253 - DNA, 1327 bp, Homo sapiens
ctgggaagaatcccaatcacagggcacctaagtgcaataggggatgcccaaaagcatagtaatattggtcaggtagtttgcaggggtgagttccagagagaaaacccctaagtatctcttgacgtacttttgtacgcagcttcctggagttctgacatgctccttgtgggatgcagaaggcagctgatggctgcgaagcagtaggcctatcacagggatccctgtagtgagggataactctagctggggttacagcagagactataggtggagttgtagagtaacggtagaggccaaagaaggaacaggagttaggtgggaaaggggaaatagtatcaggtgctagatatgctgagaaaacagcccatggatttcacccaccgtggacttgctagaatggatttagataggacagatcagaagaaactatttgcaactcagagaagcagaagccagggaagaaatataatttggaactaaagatcgcctccccagtataaagttcttattgtgcccaaattttattttggagaggaggagaatcttgaaaagagaaattttaataagaaatagtttgaactgcaatatgaattctgctgcaatggaccattgtaatcagtgtgaatggggcaagtctaaaatttcttttgtcattaggtggagggaggttggaagtgaaggaagaactctgaggttacatcaatcacatgatttctttaaaactacatttgtgtgcatgaattgtatataatatttgatcttattacacatagaaatggcaaaaatcagtggttatatgctttcaatatttttctcaagtaaaatccactataatttttaccggctaaatttatacttattttattaacaatttatttgcacatctgcctgggaaaaagtctgtttcaaacaatgataatctgatgcaactgtatctcttttagtttcagacctaccmtcaaagcccaggagaagcccgtctcttttcaaagggctttcttttttttttttttttcctcaatctgggtggctaactttgatttgtctttggcacgatactgtggagctcacaagtaactctcattaagagttctgcaaatgctaattgatagatcagcaagtttggagggctgcttttaatacatacagtttcttttggagttttgcgtcttttctacctcttaagagtcaagtctatttgacagccaactagagagtattgaagtaattgcccataaaatgagagtctcctatctaccctcttctcagcacacttgcctaaagaatctgcctactgccttcactctttgcttcatttggtctttca

SEQ ID NO: 551254 - DNA, 1327 bp, Homo sapiens
ctgggaagaatcccaatcacagggcacctaagtgcaataggggatgcccaaaagcatagtaatattggtcaggtagtttgcaggggtgagttccagagagaaaacccctaagtatctcttgacgtacttttgtacgcagcttcctggagttctgacatgctccttgtgggatgcagaaggcagctgatggctgcgaagcagtaggcctatcacagggatccctgtagtgagggataactctagctggggttacagcagagactataggtggagttgtagagtaacggtagaggccaaagaaggaacaggagttaggtgggaaaggggaaatagtatcaggtgctagatatgctgagaaaacagcccatggatttcacccaccgtggacttgctagaatggatttagataggacagatcagaagaaactatttgcaactcagagaagcagaagccagggaagaaatataatttggaactaaagatcgcctccccagtataaagttcttattgtgcccaaattttattttggagaggaggagaatcttgaaaagagaaattttaataagaaatagtttgaactgcaatatgaattctgctgcaatggaccattgtaatcagtgtgaatggggcaagtctaaaatttcttttgtcattaggtggagggaggttggaagtgaaggaagaactctgaggttacatcaatcacatgatttctttaaaactacatttgtgtgcatgaattgtatataatatttgatcttattacacatagaaatggcaaaaatcagtggttatatgctttcaatatttttctcaagtaaaatccactataatttttaccggctaaatttatacttattttattaacaatttatttgcacatctgcctgggaaaaagtctgtttcaaacaatgataatctgatgcaactgtatctcttttagtttcagacctaccatcaaarcccaggagaagcccgtctcttttcaaagggctttcttttttttttttttttcctcaatctgggtggctaactttgatttgtctttggcacgatactgtggagctcacaagtaactctcattaagagttctgcaaatgctaattgatagatcagcaagtttggagggctgcttttaatacatacagtttcttttggagttttgcgtcttttctacctcttaagagtcaagtctatttgacagccaactagagagtattgaagtaattgcccataaaatgagagtctcctatctaccctcttctcagcacacttgcctaaagaatctgcctactgccttcactctttgcttcatttggtctttca

SEQ ID NO: 551255 - DNA, 1327 bp, Homo sapiens
ctgggaagaatcccaatcacagggcacctaagtgcaataggggatgcccaaaagcatagtaatattggtcaggtagtttgcaggggtgagttccagagagaaaacccctaagtatctcttgacgtacttttgtacgcagcttcctggagttctgacatgctccttgtgggatgcagaaggcagctgatggctgcgaagcagtaggcctatcacagggatccctgtagtgagggataactctagctggggttacagcagagactataggtggagttgtagagtaacggtagaggccaaagaaggaacaggagttaggtgggaaaggggaaatagtatcaggtgctagatatgctgagaaaacagcccatggatttcacccaccgtggacttgctagaatggatttagataggacagatcagaagaaactatttgcaactcagagaagcagaagccagggaagaaatataatttggaactaaagatcgcctccccagtataaagttcttattgtgcccaaattttattttggagaggaggagaatcttgaaaagagaaattttaataagaaatagtttgaactgcaatatgaattctgctgcaatggaccattgtaatcagtgtgaatggggcaagtctaaaatttcttttgtcattaggtggagggaggttggaagtgaaggaagaactctgaggttacatcaatcacatgatttctttaaaactacatttgtgtgcatgaattgtatataatatttgatcttattacacatagaaatggcaaaaatcagtggttatatgctttcaatatttttctcaagtaaaatccactataatttttaccggctaaatttatacttattttattaacaatttatttgcacatctgcctgggaaaaagtctgtttcaaacaatgataatctgatgcaactgtatctcttttagtttcagacctaccatcaaagcccaggagaagcccgtctcttttcaaagggctttcttttttttttttttttcctcaatctgggtggctaactttgatttgtctttggcacgatactgtggagctcacaagtaactctcattaagagttctgcaaatgctaattgatagatcagcaagtttggagggctgcttttaayacatacagtttcttttggagttttgcgtcttttctacctcttaagagtcaagtctatttgacagccaactagagagtattgaagtaattgcccataaaatgagagtctcctatctaccctcttctcagcacacttgcctaaagaatctgcctactgccttcactctttgcttcatttggtctttca

SEQ ID NO: 551256 - DNA, 1388 bp, Homo sapiens
tagaaactcaaatcaaactattttttaagtctgttgccttacatttaatctttccacaaatatttactgagtagctcttatatgccagcctgttgcttattatgctaggtacgtaaagatgcacaagaaatccctttctattacactcacagagtttatactctagtggacagtgccacacaatgccagatagtacaaagttctatgaatcaaatatagcagggtgagctcataaacagtaaataggaaatatggtaactcatttagatttaatgacccggtaaktaccctccgtgtagatgaaaactcacatgagatctaagtgacaaaaaggatgttgggaatgaagccatgtgaatatctggggaaaagatagcatagatgaaggcaaccagaaaggcaaagtccctgagacagaaataagtttgttagaatacagaattagacagaaagccagtataactgaacaatgttgaacaagatggttggccagaggttctaatgtgtcaccgaggttcatctcttcctttccatttctagccactgcctgacttcatgtggctttttcctcagtcaggctttctctctgttgctgccagattgtctccagctgctccaggattatgtggttcccacagttaaattccagggagagagaagctgtgtctttcccagcttctatgtcgcttccccttaaagacctctgtcaggttgtgctgggattgtgggtgtgtccctggaccaatcaccttgctccttgagttgagatattctacttgagatattctaattgaccactaagcactatgtgcctactgctgtggcagggaatgcaaattcttgattgacagctctacaagaaacacatgcagtggggagaaattgttcccaaagggaaaaaatgcaagagaagcaagagaaccaatgccactgcacatttcttaaaaacaatttaataacagccaatgaactctgggttcaagattacaaatgtaaaagagaaggtcaatcttcataaattttccattcatataccttatgtttcattcaagctttggtaaatacttgttcctcatgaaaatttgaaagtcggctattatattaataatcctgttgtcttttcagaagaataatacattaaaagttttatgatttatcttcagattccaattctgttagtagatcatgctgaaagagctacttatattcccatcttcaagttttccattgcatagaaaaatgacataccaactatttgttgcgcgaatggtgggtaagagctcaggttctggaggtagacagcattaactcatgctttggttctgccccttagtatctttgtgaccgtaagtgtctctgtaccttagtctgctcatcattaaaatagg

SEQ ID NO: 551257 - DNA, 602 bp, Homo sapiens
gaaaacactttgagttgaaagtaaacacaagctggctgcttccctgtggcaactgtggctattgtgagcctccgtgtgtgtgcttccaggaggctttgctcctcttcatgcacccracactgccccttccctggcttccctccatccctgatcatcttcatgaagccacagatataagatcagcttaatattttatcagtgaccttagtgttggtgaaggatgccaaatgaacagctctgcaccccaccgtctcttgtcactgaaaaggcttggccatggcagaccttggcagagtttcttgcaagatctggccagtgagtctcagtttcaccttgcagggtgaatggcagaggatgcccataccctgcaggttaacagcttgggctcctcaggggttgtcagttcctactcacctccctgctaccacctcctcctcttcttctcacccccgactcctttatttccctttttggacattttaataatgtgtcgcaccattctcaggaacaaacatggttaatgaaaggtggcaaagggatgtgtgacattcttagattttcacacatgggcagtcaggagtgaaatgtgcaaccttggaaga

SEQ ID NO: 551258 - DNA, 602 bp, Homo sapiens
gaaaacactttgagttgaaagtaaacacaagctggctgcttccctgtggcaactgtggctattgtgagcctccgtgtgtgtgcttccaggaggctttgctcctcttcatgcacccgacactgccccttccctggcttccctccatccctgatcatcttcatgaagccacagatataagatcagcttaatattttatcagtgaccttagtgttggtgaaggatgccaaatgaacagctctgcaccccaccgtctcttgtcactgaaaaggcttggccatggcagaccttggcagagtttcttgcaagatctggccagtgagtctcagtttcaccttgcagggtgaatggcagaggatgcccataccctgcaggttaacagcttgggctcctcaggggttgtcagttcctactcacctccctgctaccacctcctcctcttcttctcacccccgactcctttatttccctttttggacattttaataatrtgtcgcaccattctcaggaacaaacatggttaatgaaaggtggcaaagggatgtgtgacattcttagattttcacacatgggcagtcaggagtgaaatgtgcaaccttggaaga

SEQ ID NO: 551259 - DNA, 3368 bp, Homo sapiens
aacattcaaacaaagctatctagtaatttataagatatagcattctggggcccagaaaaagaagtttgagctaaagataagatttggggccattagctcattgataggatttactatgtgttgagaaaaaggggacctaagatgaaaccctgaaaaataccaaccagtatttatggataaggcagagtaagcagcttaagtaggaaaataaacatcagggagagtgatatgtaagccaataaagaagaaagttttaagtggaggaaataatcagtgtggctctgtaaaacacgcttctagtgaatttagtaactagaaggttgctgaaagcctcagcaggggaatttacaatagactgaggtgtgaaatgcattcattgctgaatccccacctagcataattattggccccttcctacatgttccgtaaatatctattggattattgcatgataaatctttttctaggtcacgtcacagaaaatgagcagaggaagtgctgttctttctcctcaatgtgattcttagtgattctcattctccgatctgtgaggttgcgtggaagactaacagtctactaattacaatcacactcactcagctataccctctgtgttccatgattctactcagttcgtcttgccagggtttttaaacaaagttcttttatttagcaaatagtatacactttaaaatactttaaaaatttttaattgtgttgaaaatcacaaacataaaatttaccatcttaaccatttgtacgtgcaccgctgattggcattaagtttattcctattattgtacaatagatatccagaacgttttcatcttgcaaaactcaaactctatacccattgagcagcagctcatttgacccttcacccagcccctggcaaccaccattctactttatgtttctatgagtttgatacctcatttaagtgggtttatacagtgtttgtctttttgtgactagcttatttcatttagcataatgtcctcaagattcatccatgttgtagcctataaaatgaacctacctgtttttaaaacatggtttcagtgtttttctcaaaaagttctaataatccaacaacacatataaatcatataatttccaggtaagtaggagttgtgagggcttacccatctattttgcaagtttccttaacatggcagaaatcattcttctcattagaaattattttgtggtaaggaacccactaactttgagagtggatagcccattttgcaataagacccatcatcagatgctaccacagctctactctctgaactgttctggggatgcattgattgagatcctagcatttgacagaaacaaagcaaatatataacgtctgtttagagcccttattttcctcaaaatcttctgatgttctccaggtcacctttgtctttctggcaactagctattttattccttgtatcatttaaccatggttacttattaatcatcccccatgagatgcctgaagtaacaatgttttgcaaataggttcagctctctggttttagggaatgaagagagggagaactgtaaaaggggagtgttagacttcatccccaaaggccaggaacaatgtcaaaaaactctggtatctctgcagttgatagttccctctcacttgactagattttaaaataattaagttctcaatttccaacttagtacaattgcaatctccaacagcatttcagaaataggaaacctgaagcatatctctgcacacttttatttgtagtttagtaaacagaaagtctgcaaatgagaaagaataatgcctaacttcttaaataagcagaagatgggaataatccagtcattgtgcttatacctgcacttctcagttctgccgcaagtattccagtaaaaactgggttgatctgagctgaagtgtttcttccttttggccaggtgcaaaagtctggagtctacttcagaggacgaatgtgtttagtcatttttataagagttgaaaaaaataagcactaaatctttctttcaaacttgaactgatcctcaaaacagttttaggaatttccaaaggatctttttgctttagtttccaaactggtattttcacttgtttccatcttgtttgctagataacctgagtcttaaatttaaaagaaaaatgctttgaggatgattttatcagctctccatatggaatatgagaaaaaaaatccataattattctgtatccagtttacctaaaatatttttctaagtttttggtaggcaggtattctcctttccaccgtagaactcaagcagtacagactataccatggcctattgctaagatttactgagatctccacttttggaaaccccacaagtgtaaattgagattaataaaaattccttggtatgaaaaatgctaacagttgaatttcactctcccatctactcagatattactttatactcctggatacccctcataactgctcctgatgcccaggcatccagggttaggtgaggaagcatgacctgggttttcaacaaactgcatgaggccactctggccaygagcagactctctatcctcaggcccccagtaattttgagttacttcctctcagccatctgacttatatgtgaggcacaactgcacaaaaatagcaattcttgacgcttttataaacacatctacagagaatgttcccattattgccttaatatagcaatctgagataatcaggtctggaaacatagccacgttttataggtaaggaaaccaagcataagtgatctaaaaactaacaggagagtgaaattgaaaccagaaccttggttttctgactgcccgttatggattccccctctggttttctaggaaagccctatagtgaaggccatattgctctcaatatttcttcttcttttcagttgcctttctttatgcccctcatccctgtctgtcttttcctcatccaatctccttgtgactctctgaaagtccctgccctgtgacagtcagttcagacctaccctttctagccattttctgatgctctctgagctgcagattttcctgagcttcagacacctctcgttctctcaatgccttgctagactgctgcaagttcaatttataaggagctgatgggagataatagtttactgcagtggttctcaatcagggcagtttttctccctgggggacatttggcagtgtctggagacattttatgctactggcacatattgggtggaagccagagatgctggctgccatcctgcaatgcacaggacagccccccaaatactaagtagaaatacttcgtgcctaatgtcgatagtgcctccaatgtcaaggttgagaaaccttggcttag

SEQ ID NO: 551260 - DNA, 567 bp, Homo sapiens
tttctgtttttaaatttctcttaattcctacacttaaaactttgtatcaggtctttaagaaattaatatttttaatcatgctgctttattcgttttttcctgtaaagaaaacctttctcatttttttctttaaaaccagaggcccattaaaaggttggaaagtaatcaccaccagactggtagaacacatgctcacaaatatggacagatgatgtactaaaaatcagaaagcactttaaggactctgtatcttaaagcagctttctccaaaccaggggaaaacttaatgtactcctagggtagtatgtctactgtgtgagtgccctaagactttccaagggacacataaaagtgaagccatttccagaactttaatttccacctagaggcttttctaaaactcatctgcctagggaggtgtctgtggtggaggctcctgcttctgcttttgcatccccctttatgccagttctcatacaccttagaatgcatgagaagcaccggagtrcctgcgaaaacccatactgctgtccccactcccataatctctcattcagtagggtaagg

SEQ ID NO: 551261 - DNA, 1279 bp, Homo sapiens
gtgtatcaacacctcccttaccatgacagctagttttggtccacactaggtgtgtccatttttatgttgaagggtgtcaaaattattacaaagctccattctttcttaccagaccagtcttatgctgctttcttctcccatttctccagtacccctcacctctttctatgtcagccaatctttcctggtttgtttctgttggccctctcctaatggtctctgagtttctgcctctttcctgtatcctgatggtactgcagcatactaccgagatggcctggggtatcttctcagtcatctttgaccacaggccacaagggagccatagaggagagagaaggctcttctatgagaagtggctggtacaggtgaggagatccgtgttacaggtgattgggagtcagaagaccaaagtccttatcccagttttgctgcctccagccatgtgacttttattcaaatgcttaaccttgtgaacctcagtttctccatctgaaaaatgaataaccacgtggaggctcttcataattatgtgaataataataaccatgcctgcctcctgttaccatggagatggacatagacatactgtgtacattttaactgctaaatctatgtatggaaatacacttttggctgtctggtctcacctagcttgaaaggtcttgtgttcctgtcttggctctgcccttaatgatgtcaccttagataagtcactgtcccactttgagcctcagaatcttcaaccacaaaataagagagtggagtgaccttggaggcatgaaataggaccaatattctgggtctatttcacccacttttttatccccaccattgtgtttggtgtgtggtaggcactcaacaaatgtttgctgaatgaatgcatgtgaaacgtgatatttatgaataagccctaaaaatacatgttaagagtggctgaaggaaatctggctaggagcaaggtgccacatacaggaggcttccaatgaaacccagctggccaagggcacatccccctctccctcyacatctccacactgtctgtccacattccctgagaacctggcctgggttgccgcccctacatgagctctgggcagatgctgagcatctctaagccagatcacagtggaagaggcagaagtagaagaagagagatgagatggatatggaaaagatgggagaccctaggaaaagaaggcaggatgcttcaaactttagactctgacagcagaaaaaaaacctttgcaatcaggtgatcaggtaatgaaatttctca

SEQ ID NO: 551262 - DNA, 1279 bp, Homo sapiens
gtgtatcaacacctcccttaccatgacagctagttttggtccacactaggtgtgtccatttttatgttgaagggtgtcaaaattattacaaagctccattctttcttaccagaccagtcttatgctgctttcttctcccatttctccagtacccctcacctctttctatgtcagccaatctttcctggtttgtttctgttggccctctcctaatggtctctgagtttctgcctctttcctgtatcctgatggtactgcagcatactaccgagatggcctggggtatcttctcagtcatctttgaccacaggccacaagggagccatagaggagagagaaggctcttctatgagaagtggctggtacaggtgaggagatccgtgttacaggtgattgggagtcagaagaccaaagtccttatcccagttttgctgcctccagccatgtgacttttattcaaatgcttaaccttgtgaacctcagtttctccatctgaaaaatgaataaccacgtggaggctcttcataattatgtgaataataataaccatgcctgcctcctgttaccatggagatggacatagacatactgtgtacattttaactgctaaatctatgtatggaaatacacttttggctgtctggtctcacctagcttgaaaggtcttgtgttcctgtcttggctctgcccttaatgatgtcaccttagataagtcactgtcccactttgagcctcagaatcttcaaccacaaaataagagagtggagtgaccttggaggcatgaaataggaccaatattctgggtctatttcacccacttttttatccccaccattgtgtttggtgtgtggtaggcactcaacaaatgtttgctgaatgaatgcatgtgaaacgtgatatttatgaataagccctaaaaatacatgttaagagtggctgaaggaaatctggctaggagcaaggtgccacatacaggaggcttccaatgaaacccagctggccaagggcacatccccctctccctccayatctccacactgtctgtccacattccctgagaacctggcctgggttgccgcccctacatgagctctgggcagatgctgagcatctctaagccagatcacagtggaagaggcagaagtagaagaagagagatgagatggatatggaaaagatgggagaccctaggaaaagaaggcaggatgcttcaaactttagactctgacagcagaaaaaaaacctttgcaatcaggtgatcaggtaatgaaatttctca

SEQ ID NO: 551263 - DNA, 1825 bp, Homo sapiens
ggtgtggcaggtaagatgctaccaggagaaccaacgggtaaagctaccggcctctgggaggcagaggggagaatgatgagctaggagcccaaggcagagggtagaggccacagctccctggaaaggggaaatggcagccacaggatggcagacctagctgccgaagtcagggcagacatcaggagagagtgggagaaaggaaccagggactcagaattttgttttcaatggggaaaacttgaagaggaagttccaggactctgttttagtgggtgggtgtgttggtgagtgtgagatgggctagggagagtggaatgggccaaacctctagaagaatgcaggtcaggaagggatcttaccacccacacgagttccgctttcaacctttgtgctcccatgaccctgtttccttctaggcccccatgtggattcagtctcaggtcagcctgactacaaatactgactctcaaataactgtattagggccagggtggatccccagtctgcattcaagttctttgggtgtggctgggacactgtaactaccaccatatccctactgcccccttctaataaaataaaagagtctgccttatctcagatccggattggctggatacacactttggttgcctgtttcactggctcactactttgatagagtagggctttgaggggcttctcatgaacatgaagaagtggggatctgaaatttggggtttcatgctttccatgacaggcatcacccagagcaggaaactaaattacattgttcttcaaagggcagttttcattaaccaactaaccagcctaacaccacttagtaagagggctcactgcatgcccaggaaacaaactgatgactttggaaaataaagatgtaagggaccaggtgtctaccatcaaggcccttcagggtggttgggaagtgaagactcacccatgccaaattagcatgaaagaaagtgaggcattgcggagaggactcccaagtgctgctggagtccagggcagggattgggcaaatgagcctgggccactatcaggaaggaaaatgtgggagtgtagaggaggatactgtggaattgaggctgctgcaagttgggcatcgggggatttctgttccctttatctgtctgattgatagaaatgctttcaaacatggcacctgatctcttgtcttttggcttgcattcattcgtatcaggctcatcaaggaattcaaagcgatcacctagctttgccacaaatcttccaccttgcatatatctatgtgagagtcagacctctgccytcccgatctccaacacccatcccttccccagctgttgcagatcagcacagtgagagaaagaggtcagctctgaatgaatgatgggaaggggttttacagagcttgagtaatcaagtgggcacagtagctactgcttaaaaacaaatacaacccaacttcacaaaactctggtcattttcatatgaagatcagtctcaggccaaaaagtcaccttattttggtcagtgtcccttctctctgcatcatcgagagacagagtaggtacacggtgaggcatgattcaaggtctcactgatctcctgctgtcctgattttttggaatgagagaccagggtggctagttatgaaaacacccacaagactgttccagaaacaccctccaccctggaagagtcaaatattctctagtgtgcttgtcaatacattgcaacactacggcacaaagggtgaacgccatatccagtcacaaacccaacctcttctaatgaaataagcttttccctggaacactgcctggtagtgtaagaccac

SEQ ID NO: 551264 - DNA, 1686 bp, Homo sapiens
ccactggggcgagtgttgcgaggggtgtgtgcctgcccatcggctgaatcctgggcctgtggcctgatcagcaagacagctgtggttcctgccttctggaagtttaggagtcaatgtgaatacatttttagaaaataaatgaacagcagaaatgatttaaacacgggaggtgactaatcgtgcctggggcaatctggaaaggcttctgggaggactcagcatttccctggccctcttcaacccacaacaaccccataaaaagcgggtgctaccattgtccttgtattccagctaaggaacccacagctcagagaggtgaggtgagttgccccaggtcacacagcttctaagggacagagctggggattgacctggtttgatgtgactcccagggcacagcagggcagggcagggcctgtcctgtctacccagacttagatctgctgcctgtgcctcagttatctggggtctttccttctcttggtgactacttgacccaaaccctgagatgctcagtcttttgaattttagcattccaagatcctgcccgctctgaccaccagtttcaggattctcagtgcaaggttcctagcggcgtggagccccacgaggatctttcctgagcagctcagggcggccacacggcgggktctctggagctggagtctgggccccctgcagcctgctcctccacacagcctagatggggcccatatggggtctagatggggcctgggccagaagcagcctggttttagggcgaaagaggcaaacgagcagtctctgacctactctgttaggcaagtgttgagacaaataggacgtggtcactggagacgcctctgtcggagccctgccctggccccacttctgtgggactgttttttggccttccaggaagaggagaggtggaaggtggggcctgggagtgatcccgccgctccgggccttgcttgctaatcagtgtgatggcaccgttagagccagtgaacacaggggtgaggaggaatgaggtcaccagatagtgagaggatgaaatcatccctccgtgggaggggcttccacatatgtcatttttattgttgtataatacatttactgtagcaaatattaaggaggtattatgctacctgccatacacggtgagaaaactcagctcctcccccttctacctgtgtggcctcagctgagacaagatctctcagagcctcgggttttcttttctttcattaaaaaaaatatgtttttttcttagagacagggtcttactctgtcacccaggctggagtgcagtggtgcgatcatagctcactgcagccttgacctgggctcaagccatcctctggcctcagcctcccgagtagctgggactacaggcatcaccagcatacctggctaatttttaatttttttgtagatatgggtctcagtatgttgcccaggctggtcttgaacccctgccttcaagtcatcctcctgccttggcctcccaaagtgctaggagtacaagctcgaggcaccgtgcctggctgagcctcagattttctttctgttagatgggctgatgcctgctcagctgtggcctggctccaggctgctgtgtcttaaagccagtgggatggcagggaccaggctggggtgaccaacaaccccccacccccagtttgcctgggagtgaggggtttc

SEQ ID NO: 551265 - DNA, 1686 bp, Homo sapiens
ccactggggcgagtgttgcgaggggtgtgtgcctgcccatcggctgaatcctgggcctgtggcctgatcagcaagacagctgtggttcctgccttctggaagtttaggagtcaatgtgaatacatttttagaaaataaatgaacagcagaaatgatttaaacacgggaggtgactaatcgtgcctggggcaatctggaaaggcttctgggaggactcagcatttccctggccctcttcaacccacaacaaccccataaaaagcgggtgctaccattgtccttgtattccagctaaggaacccacagctcagagaggtgaggtgagttgccccaggtcacacagcttctaagggacagagctggggattgacctggtttgatgtgactcccagggcacagcagggcagggcagggcctgtcctgtctacccagacttagatctgctgcctgtgcctcagttatctggggtctttccttctcttggtgactacttgacccaaaccctgagatgctcagtcttttgaattttagcattccaagatcctgcccgctctgaccaccagtttcaggattctcagtgcaaggttcctagcggcgtggagccccacgaggatctttcctgagcagctcagggcggccacacggcgggttctctggagctggagtctgggccccctgcagcctgctcctccacacagcctagatggggcccatatrgggtctagatggggcctgggccagaagcagcctggttttagggcgaaagaggcaaacgagcagtctctgacctactctgttaggcaagtgttgagacaaataggacgtggtcactggagacgcctctgtcggagccctgccctggccccacttctgtgggactgttttttggccttccaggaagaggagaggtggaaggtggggcctgggagtgatcccgccgctccgggccttgcttgctaatcagtgtgatggcaccgttagagccagtgaacacaggggtgaggaggaatgaggtcaccagatagtgagaggatgaaatcatccctccgtgggaggggcttccacatatgtcatttttattgttgtataatacatttactgtagcaaatattaaggaggtattatgctacctgccatacacggtgagaaaactcagctcctcccccttctacctgtgtggcctcagctgagacaagatctctcagagcctcgggttttcttttctttcattaaaaaaaatatgtttttttcttagagacagggtcttactctgtcacccaggctggagtgcagtggtgcgatcatagctcactgcagccttgacctgggctcaagccatcctctggcctcagcctcccgagtagctgggactacaggcatcaccagcatacctggctaatttttaatttttttgtagatatgggtctcagtatgttgcccaggctggtcttgaacccctgccttcaagtcatcctcctgccttggcctcccaaagtgctaggagtacaagctcgaggcaccgtgcctggctgagcctcagattttctttctgttagatgggctgatgcctgctcagctgtggcctggctccaggctgctgtgtcttaaagccagtgggatggcagggaccaggctggggtgaccaacaaccccccacccccagtttgcctgggagtgaggggtttc

SEQ ID NO: 551266 - DNA, 1686 bp, Homo sapiens
ccactggggcgagtgttgcgaggggtgtgtgcctgcccatcggctgaatcctgggcctgtggcctgatcagcaagacagctgtggttcctgccttctggaagtttaggagtcaatgtgaatacatttttagaaaataaatgaacagcagaaatgatttaaacacgggaggtgactaatcgtgcctggggcaatctggaaaggcttctgggaggactcagcatttccctggccctcttcaacccacaacaaccccataaaaagcgggtgctaccattgtccttgtattccagctaaggaacccacagctcagagaggtgaggtgagttgccccaggtcacacagcttctaagggacagagctggggattgacctggtttgatgtgactcccagggcacagcagggcagggcagggcctgtcctgtctacccagacttagatctgctgcctgtgcctcagttatctggggtctttccttctcttggtgactacttgacccaaaccctgagatgctcagtcttttgaattttagcattccaagatcctgcccgctctgaccaccagtttcaggattctcagtgcaaggttcctagcggcgtggagccccacgaggatctttcctgagcagctcagggcggccacacggcgggttctctggagctggagtctgggccccctgcagcctgctcctccacacagcctagatggggcccatatggggtctagatggggcctgggccagaagcagcctggttttagggcgaaagaggcaaacgagcagtctctgacctactctgttaggcaagtgttgagacaaataggacgtggtcactggagacgcctctgtcggagccctgccctggccccacttctgtgggactgttttttggccttccaggaagaggagaggtggaaggtggggcctgggagtgatcccgccgctccgggccttgcttgctaatcagtgtgatggcaccgttagagccagtgaacacaggggtgaggaggaatgaggtcaccagatagtgagaggatgaaatcatccctccgtgggaggggcttccacatatgtcatttttattgttgtataatacatttactgtagcaaatattaaggaggtattatgctacctgccatacacggtgagaaaactcagctcctcccccttctacctgtgtggcctcagctgagacaagatctctcagagcctcgggttttcttttctttcattaaaaaaaatatgtttttttcttagagacagggtcttactctgtcacccaggctggagtgcagtggtgcgatcatagctcactgcagccttgacctgggctcaagccatcctctggcctcagcctcccgagtagctgggactacaggcatcaccagcatacctggctaatttttaatttttttgtagatatgggtctcagtatgttgcccaggctggtcttgaaccyctgccttcaagtcatcctcctgccttggcctcccaaagtgctaggagtacaagctcgaggcaccgtgcctggctgagcctcagattttctttctgttagatgggctgatgcctgctcagctgtggcctggctccaggctgctgtgtcttaaagccagtgggatggcagggaccaggctggggtgaccaacaaccccccacccccagtttgcctgggagtgaggggtttc

SEQ ID NO: 551267 - DNA, 875 bp, Homo sapiens
atattattcagctgtgaaaaaaacaaagtactgataaatgctacaacataaatgaaccttgaaaacattatgctaagtgaaagaagccagtcacaaaatgacatctattgtrtaagtccgtttacatgcaatgtccggaataggcaaacccatgaagacagaaagtagatttgttggttgccaggaactgagaggagggaggaatgaggagtgactgctagtgggcatgaggtttggtttttgttttgttttgttttgttttgtttttgcatgatgaaaatattccggaattagatcatggtgatggttacacaaccttgtgaatggactaaaaaccagtgaattacacaccttaaaagggtgagttttatggtatgtgaattatatctcaatgaaaaacagttgggctgccaaatgctttgtgtagaaagaatataaggctaaatttaaagagtaggttgttttttaacaaggatgccaagataattcaaaggggaaaaatgatctctttaacacatggtgctgggaaaactagatatccacgtgcaaaagaaatgaatttggactactacctcatactttatacaaaaattctgtaatagatatgtgtgaatatatgcattgaaacatctaaaagacaagttaggatcggattttaactggacttttaaaattcttctgtgttaacctgtatttcctaataagcataatttacttgtttaataataattttttaaaactttccaatgagttaagggatattgattaaaaactccctgtgtgcagggccctctgccgagacaggcaattgggatgccctggagacatttctgtccttgagtgctctgacatgggcaccgtgcaggaagtgctca

SEQ ID NO: 551268 - DNA, 908 bp, Homo sapiens
aacacaagaaaccatttatgactagttattgctgacctaaagaatgctctactgggatgaataatgtccagttcttccaaaattcatatccaactggaacctcagaacataaccttatttggaataaggtcttcatagatgtaatcagttaagatgtggtcatatgggatgagagtgggccctagagctaatgactggtgtccttaagaagacaatgtgaagccacagagacttagagagaagaacgctgtgtgacaagggaggcgaagattggagagctgcatcttcaagccaaagaaagccaaggattgctggcaggtgccagaagataggagaggggcatggaagggtcatcccagagccttcaaaaataagcaaacccaccaacactgattttggacatctaacctcaagaacgttgagacaataaacttctgttgttttaagccatcaagttagtggttatttgtcatggcagccctagaaaacgagygcagatgtcaacaaaggttgtcccacttatcaagataaaaatataacagccataattatctggccctcatttatttctaagaaatggtgtttgaaagtattactaaataagccatgagaatcaagctcccaccactgatgggagagatggacggctgaagaactggcccagtttctgatgaatgagggaaaatactgtatgaataacagccacaggcgtcagcttcagttttcttgatgccctccctctgcttgtgcaataatgctatgagacctggtagatgtcttgactttcccccaaacaagctcccccagggaggatccaacttaaccaagccatagaccaggagagtcaataatgttgccaacatctcaaattcctccaaagaaagaacatctggacctcagagtatcct

SEQ ID NO: 551269 - DNA, 908 bp, Homo sapiens
aacacaagaaaccatttatgactagttattgctgacctaaagaatgctctactgggatgaataatgtccagttcttccaaaattcatatccaactggaacctcagaacataaccttatttggaataaggtcttcatagatgtaatcagttaagatgtggtcatatgggatgagagtgggccctagagctaatgactggtgtccttaagaagacaatgtgaagccacagagacttagagagaagaacgctgtgtgacaagggaggcgaagattggagagctgcatcttcaagccaaagaaagccaaggattgctggcaggtgccagaagataggagaggggcatggaagggtcatcccagagccttcaaaaataagcaaacccaccaacactgattttggacatctaacctcaagaacgttgagacaataaacttctgttgttttaagccatcaagttagtggttatttgtcatggcagccctagaaaacgagcgcagatgtcaacaaaggttgtcccacttatcaagataaaaatataacagccataattatctggccctcatttatttctaagaaatggtgtttgaaagtattactaaataagccatgagaatcaagctcccaccactgatgggagagatggacggctgaagaactggcccagtttctgatgaatgagggaaaatactgtatgaataacagccacaggcgtcagcttcagttttcttgatgccctccctctgcttgtgcaataatgctatgagacctggtagatgtcttgactttcccccaaacaagctcccccagggaggatccaacttaaccaagccatrgaccaggagagtcaataatgttgccaacatctcaaattcctccaaagaaagaacatctggacctcagagtatcct

SEQ ID NO: 551270 - DNA, 634 bp, Homo sapiens
ctcccacctcagcctcctgagtagctggcacatgccaccactccaccgctttattattattcttttaattaaaaaaatttttatagagatggagtctcactatgttgtccagcctggccttgaactcctgggctcaagagatcctctggccatggcctcccaaagtcctgagactataggcaagagccactgcacccgcccccttcatattttaaaagcagtaaaatgttgcccacactaataacatctacatgggaacctcctatgcttgggagaactttgaaatcccttccaacttggtaactcgtccacggctgagggtggcccgtcagtggacatggcgcaaggtggcaagaacttggggctggggacactttgctgagggacccgggacaagccacactccctatctgggcctcactatctttaggacctcgggtaaaggcatgggatttgggcaccggagggttctaagatccaggtctttgccagcatggggctcggaagctccctgtccaaatggcgtttgtttgtggatggccacatcrtggttctgcccatctcctgactctgtgtactctgaaagccaggcatgcttcttaattccctctaatgatttcccagagagcctgct

SEQ ID NO: 551271 - DNA, 2078 bp, Homo sapiens
ccccaagaaaaaataaaggagaatgaaagcctgctcaaaggacgcatttacattcttaaggatttctagcttttttgatgaaataaattacaatgaatgaatcagaaactttatcagaccttcatttcaggagagccacatgaaaaggaagctgaagttctttacttatccaatagtcagttataaggctatgaatattctataatattttatgtcttctaatgtaaatggtaatataattgaagaacaattatattaactatcagttataaattggaaaaattttaaaaatagaaaataaaaaatctgaatataattgtttagctctaatacacaattatttgatttgtttttggatccttgaattttaaaacatgtttgtgttaccctcttgattctcttatgcagattacagctgcattttcttctgtctgttggctgtagaaatgatacaatagaaagcgctttttctttatagactggttgcatgtctctgctttgcttaatccctaaaactctttcagggatttaaaactgcatgtaaaaatgtttccatcatgcttgctgagttgaactaggttaatgaggttgggggactatccaggagagtacatggattgctcaagagggtcatttaactttgttttcagagggggtcatgagagtcttggatgttctgaacttaaacatgcattttaggtgttttattccttttcttcattattaatttaggctttatttctcctgaatcttttgaattaattatattttttagaggtatagcctcttgatggtagagaattctacaaaaatattgctttttacatgaaatagcaattctcactgctaaaatacctttcagaattttaaaggtggtattctcattttaatatctaaggatttgactttcattcatacaaaattgtgtacagttttaaagacttccattaggtgctctctcagccttcatctttcctaactaaagatttctagtcttgtcatcctgacaactcaaggctcagtgaccttccctagaatagtggatattcattagtttttggcttatcaaaatctaattcattcccaattcccagttgttcaatggggatccaccacttgccactctcactatatatacacacactatacaccaggaaatctattttatatatatatattaaaaatatatatagcatattatatataatatagagtgtatatataatatatagtgtatatataatatatataatagtgtataatagtatttgtgtatatatatacatatatgtatacatatatacatatatttgtatatacatatatacacatatacaaatgtatatacaaatgtatatacaaatatatgtgtgtrtatatatatatacacacacagtgtagctgtcatcaaccctggcctagggatggtatctaagtcatgtgtggccacacaaggtctcatatttccctgtctgtagtgatttgtttagaggcagacttgtgaccaaatcagtgccattgagatgctatgaaatatttcttagaactcttggataagagaatggcatgctttggggggatatatttaaacacgagacaatgcgcgttctgaggctgttgtagatatctatcacaaggggacatttttttgaggatgaaactcattgtaattaaacagtagccttttacaaccctaggagaaagtgaagcctgagaccttaatatgttattaatgttctgtaataatcaattctcagtctctgaaggatgatgttaatgatttgaaatatctgagggccccaaaaataaaataaatacacaatgggaaaaccccaagttttgagggctgtggagccaagtcccatcattggctatacaaatgaattatagttaggggaagaaaagcagatgcatgggttagctgaggtttcatggggccacagggcacaatggttcattcaataattaaactaattttccccacattcaattaacaaaacaatacatggttataacatattacataccaaagttgaacagtagtcaagtaaaacatgataggattttcatagatcaaa

SEQ ID NO: 551272 - DNA, 692 bp, Homo sapiens
ttttcattcatcttcaaaatattcagctgttccccaatattttcatcttctttattctctttcttaagtttctttcatcctaacatgtttggtaacgcattatgtgagtgagaaaagtaatggacagcctctcaaaatagctcaatcataaggaggggttggttgcagattatggaaatgacacctggacctccacawaaagctggatttttctgccaaagttcatccatggtggaccaattgctttccacaccaacatatccatctttgtagatgatcttagaactgaagatgtcctgcccctgtgccaggcagggttgttatttaaacactcatttcatctgccccacaggaatctctggcttaagcaaagtctgaaacaccttttttttttttctagtcttttaagtttcttgtatattatctcaataatggcttaatatttgaaagtattttgcttcagaatcttggaatcttttcaaattccttcatttgtacatttttttcagagacaagtgttttagagatgttttatgactgatgaggaaatttacattaaacagtttccacaactcttgaaagtcacagagagaaaaagtcatatttattttatactcttttaaggaaggcaggatatttacctcagatttaagtcacaatgtttatgagaggataaagccataatatatact

SEQ ID NO: 551273 - DNA, 765 bp, Homo sapiens
cacaacaaacccacgtgcgcacagccccggggaacacggatttctccacggcaccgtcagtatggggtggggtggcgkgggggcattgcgccttgcagagtctgggtttacggatcgacaaattgaggcccgcggcagcggagggggcacaggcaccataacaaacgcacgtgcgccctgcccggagagctggacgcactgcatacccttaggggccgccctgcggtgccgggccattgtctcagcctcgggggagggagtggctctagaggcgccacttgctggaagagggcgagagagacatttaaaaggtaccgcttgggcatcagactaaactgccagacttaaaaagggaaaccaaaacaagaaagcagctacaaaaaggttactccaggctgagtcggtccccggccgtggcgcattcttttgggtgaagtggaccacccctcaccttcacctcctggaggtctcttagagatgtgggttgggttaagggtctaagggtgcccctcaaaaaaagagagtgctgggtgcactattgtccccgcactccggcgattgcctctgtggggatattttggtcgcctcctcagcctgcgggaagaatgtacgagtcgcccagtgcggtcttgctctttgcctctgaggcccgtgtccgtgtgcccagacaccccagatgtcactagccccttttggcttgttaatgcattttcgcaagcaaggccagccgagacctcgtattctagctggggacgtacaattttc

SEQ ID NO: 551274 - DNA, 765 bp, Homo sapiens
cacaacaaacccacgtgcgcacagccccggggaacacggatttctccacggcaccgtcagtatggggtggggtggcgtgggggcattgcgccttgcagagtctgggtttacggatcgacaaattgaggcccgcggcagcggagggggcacaggcaccataacaaacgcacgtgcgccctgcccggagagctggacgcactgcatacccttaggggccgccctgcggtgccrggccattgtctcagcctcgggggagggagtggctctagaggcgccacttgctggaagagggcgagagagacatttaaaaggtaccgcttgggcatcagactaaactgccagacttaaaaagggaaaccaaaacaagaaagcagctacaaaaaggttactccaggctgagtcggtccccggccgtggcgcattcttttgggtgaagtggaccacccctcaccttcacctcctggaggtctcttagagatgtgggttgggttaagggtctaagggtgcccctcaaaaaaagagagtgctgggtgcactattgtccccgcactccggcgattgcctctgtggggatattttggtcgcctcctcagcctgcgggaagaatgtacgagtcgcccagtgcggtcttgctctttgcctctgaggcccgtgtccgtgtgcccagacaccccagatgtcactagccccttttggcttgttaatgcattttcgcaagcaaggccagccgagacctcgtattctagctggggacgtacaattttc

SEQ ID NO: 551275 - DNA, 621 bp, Homo sapiens
ccatcaggaatattgtttatttggakagtaagattaatcaacattcatgtgtcaaaagctgtataaattattgtgatgttcttaactaagtaaaaaccagaaatatgaaagctgtagccaaccacagtatccctcctcagttacagagttttaccttaacagctaaagcggctgtcttcctaggcacatctcatagtaaaataaatattactatgacaaaatctcattgtgaatacaagtttcattaagaatgtggtatgagttatacactctctattccaaagagtatgtagtgaacactagaaagaattagaatgttgacaattcaaaatgagcatgagaggggaagagaaagggacaatccaaagggttgcctcagtaagtcttttagtgttcaacttacactgttttctataataccactcataaagcaaataaacatattaatttaaatttatatatttaaaatgttttatttatcaattaaaaattaatttttaaaattaataaaacaatttatttcaattaagacaaataagtaagctaaaggatatgaggcctagtatacaaggaaacaacctcaaagaagtcctgtccttgggaccaaggataggtcagtgg

SEQ ID NO: 551276 - DNA, 621 bp, Homo sapiens
ccatcaggaatattgtttatttggatagtaagattaatcaacatkcatgtgtcaaaagctgtataaattattgtgatgttcttaactaagtaaaaaccagaaatatgaaagctgtagccaaccacagtatccctcctcagttacagagttttaccttaacagctaaagcggctgtcttcctaggcacatctcatagtaaaataaatattactatgacaaaatctcattgtgaatacaagtttcattaagaatgtggtatgagttatacactctctattccaaagagtatgtagtgaacactagaaagaattagaatgttgacaattcaaaatgagcatgagaggggaagagaaagggacaatccaaagggttgcctcagtaagtcttttagtgttcaacttacactgttttctataataccactcataaagcaaataaacatattaatttaaatttatatatttaaaatgttttatttatcaattaaaaattaatttttaaaattaataaaacaatttatttcaattaagacaaataagtaagctaaaggatatgaggcctagtatacaaggaaacaacctcaaagaagtcctgtccttgggaccaaggataggtcagtgg

SEQ ID NO: 551277 - DNA, 621 bp, Homo sapiens
ccatcaggaatattgtttatttggatagtaagattaatcaacattcatgtgtcaaaagctgtataaattattgtgatgttcttaactaagtaaaaaccagaaatatgaaagctgtagccaaccacagtatccctcctcagttacagrgttttaccttaacagctaaagcggctgtcttcctaggcacatctcatagtaaaataaatattactatgacaaaatctcattgtgaatacaagtttcattaagaatgtggtatgagttatacactctctattccaaagagtatgtagtgaacactagaaagaattagaatgttgacaattcaaaatgagcatgagaggggaagagaaagggacaatccaaagggttgcctcagtaagtcttttagtgttcaacttacactgttttctataataccactcataaagcaaataaacatattaatttaaatttatatatttaaaatgttttatttatcaattaaaaattaatttttaaaattaataaaacaatttatttcaattaagacaaataagtaagctaaaggatatgaggcctagtatacaaggaaacaacctcaaagaagtcctgtccttgggaccaaggataggtcagtgg

SEQ ID NO: 551278 - DNA, 664 bp, Homo sapiens
ctgctcagagaagcacttgagctttctatttcacaaaaaaaatggggactttcattacttagtgctagatgacagagaaagcacaaatgtataagcacttatcaatgttctgcttaagtcctgtttgctaataattgcattaggaaaggtaagttgttgggccaagcccagatgaaaggaattgataaatagattatacttcttgatgagaaaaattatgaagcccaacaaaatggaaacatgaatacatggatggaaagaatgtgtatccttctttygcaatttgtcatacatatatcaatacattgttttatggcccatattcattctttcactagatgttttccaacacttatttttgtatcagacactatattgggcaattaagatttaattatatatcctagtctctgataaaacagactttaaactaacaaagatcaaaagagacaaagaaggccattacataatggtaaagggatcaatccaacaagaagagctaactatactaaatatatatgcacccaatacaggagcacccagattcataaagcaagtcttagagacctaaaaagagacttagactctcacacaataataatgggagactttaacaccccacagtcaacattaggcagatcaacaagacagacagttaacaaga

SEQ ID NO: 551279 - DNA, 713 bp, Homo sapiens
tcccagttcaaacaccaagagacttaaagtaagtaatacctgaaaatttgtccatgtccttgaaaggcaagctatacacaagttgttggtcattctgttgtaataaagtagctccaggtatatgttgtttaaccagtgaagaaagagattctgtggcacaatatttgtctatgtacatgctagagaataccaaaaatcacaattaatgattatacaataaacagccaaaagtaaattatgaaggctttaaattaaatttagtaccataaatgatggtcaaagcatataacagcaagcctccaacataataacagtatagcaagagtataatayagaataatgtcaataaaaatgaatgatacctcaggcggtagccgatcccccatttacttttgaggaacattgaagaaccaacacatttcagcattccttgtgatatcacagctttcctatctgcagataaatatttacatttcaatttctaaagtatcaacagcattaataattggcatttacattttatggtttctcatatgagagtcatccacattatgatatcattaatcatcacaaaaagtcttatgaggatggtactagattatcatcaactatttttcagatatgaatactaaggtaaaaagaaaatacattccttatatatgtttcatacagctattaagtaacaaagccaggaactctactcaaggagtctg

SEQ ID NO: 551280 - DNA, 816 bp, Homo sapiens
ggctaggctggaccttagatccaggcagccagcgccgagcctctgttgtttccccagctgtttgcactgttggtggctgcaagcccaggacagagcgctaagtgctgacccggaggaccagtccttatgggagctcatggggctggggaaccccgccggtctttggaggagctcgcctgtgtacggctgggccgaggaaggccgcagtggggaggccaaaatttatcctcaggatctgctctcaggctgtgtgtgtgtgtatgtgtgtgtgygtgtgtgtgtgcgcgcgcgtttgctctgtctcaggctgtgtgtgtgtgtttctaggtttgtgtttctgggtgtgtgtttcccaagatggccacaagggggcgccctccaccctttggaaccaaccacaggagccttgagatcccaccgctgctcagtggcttcttatcttcctcttcccagccaggaattagggagtttgggaaggttctgagatttattcattcattgagccaacatttatggagttcatactgtgccaggcacactgcctgacgctagttaatgtttattatgctagacatggtctaagcactgtggatagattcttacagcctaacaggcgggcattcttattatcgtccctcttcacagatgagaaaagatggcctgaggctcagagatgtgaagtgaaactgcccagggccacccagcttgttaacaagtggaatagagttgaatgcagggcgcccggccacgcagcctggggtcctgtgcagtgaaccagacaggtggaggctctgcccccagaaaggtgggatccac

SEQ ID NO: 551281 - DNA, 816 bp, Homo sapiens
ggctaggctggaccttagatccaggcagccagcgccgagcctctgttgtttccccagctgtttgcactgttggtggctgcaagcccaggacagagcgctaagtgctgacccggaggaccagtccttatgggagctcatggggctggggaaccccgccggtctttggaggagctcgcctgtgtacggctgggccgaggaaggccgcagtggggaggccaaaatttatcctcaggatctgctctcaggctgtgtgtgtgtgtatgtgtgtgtgtgygtgtgtgtgcgcgcgcgtttgctctgtctcaggctgtgtgtgtgtgtttctaggtttgtgtttctgggtgtgtgtttcccaagatggccacaagggggcgccctccaccctttggaaccaaccacaggagccttgagatcccaccgctgctcagtggcttcttatcttcctcttcccagccaggaattagggagtttgggaaggttctgagatttattcattcattgagccaacatttatggagttcatactgtgccaggcacactgcctgacgctagttaatgtttattatgctagacatggtctaagcactgtggatagattcttacagcctaacaggcgggcattcttattatcgtccctcttcacagatgagaaaagatggcctgaggctcagagatgtgaagtgaaactgcccagggccacccagcttgttaacaagtggaatagagttgaatgcagggcgcccggccacgcagcctggggtcctgtgcagtgaaccagacaggtggaggctctgcccccagaaaggtgggatccac

SEQ ID NO: 551282 - DNA, 816 bp, Homo sapiens
ggctaggctggaccttagatccaggcagccagcgccgagcctctgttgtttccccagctgtttgcactgttggtggctgcaagcccaggacagagcgctaagtgctgacccggaggaccagtccttatgggagctcatggggctggggaaccccgccggtctttggaggagctcgcctgtgtacggctgggccgaggaaggccgcagtggggaggccaaaatttatcctcaggatctgctctcaggctgtgtgtgtgtgtatgtgtgtgtgtgtgygtgtgtgcgcgcgcgtttgctctgtctcaggctgtgtgtgtgtgtttctaggtttgtgtttctgggtgtgtgtttcccaagatggccacaagggggcgccctccaccctttggaaccaaccacaggagccttgagatcccaccgctgctcagtggcttcttatcttcctcttcccagccaggaattagggagtttgggaaggttctgagatttattcattcattgagccaacatttatggagttcatactgtgccaggcacactgcctgacgctagttaatgtttattatgctagacatggtctaagcactgtggatagattcttacagcctaacaggcgggcattcttattatcgtccctcttcacagatgagaaaagatggcctgaggctcagagatgtgaagtgaaactgcccagggccacccagcttgttaacaagtggaatagagttgaatgcagggcgcccggccacgcagcctggggtcctgtgcagtgaaccagacaggtggaggctctgcccccagaaaggtgggatccac

SEQ ID NO: 551283 - DNA, 604 bp, Homo sapiens
taagtatgggaagccccagattgtgtagaaaatcccgttaagttccatgcattatattccccttaaacagattttatttcctttaattggttggttacatcagtagagtatattttgaactttrtgttctacatatatgtatatatatacacatagtataatataaacaagcctgaaatagatgccaaaaacagttactaatatacaaacacatacatatttccacaatttagagtacactaatcaatttcagtaattacatagcctgtatcactgcacttatggctaaaaacactggttacccagccaggtgtagagcattgtacaacattttttgtttttttttttcagaatgtattacaaattattattttaaaaaagggctacattttaagtgtgtgcagatgtgagttttggcttacataactgtttttaatattcatctatggtattttcttggcaaagaaaatggacatttgttcccattgcatgactttaacagatcagtagacatcctaggaatactctaaggaagcaaccccgggtcatggaaaatatctcatcaaacatcagtatctttgaatcttatttgtgacaattgctt

SEQ ID NO: 551284 - DNA, 626 bp, Homo sapiens
tcgttaattgtaaagctcaaagctctatatgtaagggatattgtatctttgaaatgttgttacttttaaattttgaaaatagatttgatcagtagcatttttccccatgtttttcctaatcttatttgccagtatagtgagtaccttgtatggaatggtactggtctatcaggtagcatttttattttatttttatttttatttttatttttttggagacagagtctcgctctgtcgcccaggctggagtgcagtggcgcaatctcggctcactgcaagctccgcctcccgggttcacgccattctcctgcgtcagcctcctgagtcgctggggctacaggtgcccgccacaaygcctggctaattttttgtatttttagtagagacagggtttcacagtagtgtcgatctcctgaactcgtgatccgccctccttggcctcccaaagtgctgggattacaggcgtgagccactgcgcccggcggcattttttgattgttgatgttgttagcgtgaattttagaggtatttgtcattgaaatattgtattttgaagatgctgtttcacagataccgttttacttatagattttttggtgttttctggtgtgttgtttttatatttg

SEQ ID NO: 551285 - DNA, 568 bp, Homo sapiens
tgctaaatgatgagttaatgggtgcagcacaccaacatggctcatggatacatatgtaactaacctgcacattgtacacatgtaccctaaaacttaaagtataataattaaaaaaaaaaaaagaaaacagaattgtccacaattttaggaaagccatcgcatgacaacaaaccackacaatgataggagcatcactgagtcaacggagttcaagcagtgagcagatcagtattgaggccccaggaaaatcaaggctcttgggtacattttgcagaacccagaattgagccacataatctatggccaagtgatctttgacaaagttaacaaaaattaaccaacgtatacaccagggaaaggacacctcattcaataaagggtgctggggaaattggatagctatatgcacatgaattaaactggacacccaccctcaacatgtaaataattaacagaaaatagattaaaggtttaaatgtaagacctcaaactgtaaacgtattcaaataaaacaccaggacaactcttctggacactggcctaggtaaataatttacgactaagaact

SEQ ID NO: 551286 - DNA, 568 bp, Homo sapiens
tgctaaatgatgagttaatgggtgcagcacaccaacatggctcatggatacatatgtaactaacctgcacattgtacacatgtaccctaaaacttaaagtataataattaaaaaaaaaaaaagaaaacagaattgtccacaattttaggaaagccatcgcatgacaacaaaccactacaatgataggagcatcactgagtcaacggagttcaagcagtgagcagatcagtattgaggccccaggaaaatcaaggctcttgggtacattttgcagaacccagaattgagccacataatctatggccaagtgatctttgacaaagttaacaaaaattaaccaacgtatacaccagggaaaggwcacctcattcaataaagggtgctggggaaattggatagctatatgcacatgaattaaactggacacccaccctcaacatgtaaataattaacagaaaatagattaaaggtttaaatgtaagacctcaaactgtaaacgtattcaaataaaacaccaggacaactcttctggacactggcctaggtaaataatttacgactaagaact

SEQ ID NO: 551287 - DNA, 568 bp, Homo sapiens
tgctaaatgatgagttaatgggtgcagcacaccaacatggctcatggatacatatgtaactaacctgcacattgtacacatgtaccctaaaacttaaagtataataattaaaaaaaaaaaaagaaaacagaattgtccacaattttaggaaagccatcgcatgacaacaaaccactacaatgataggagcatcactgagtcaacggagttcaagcagtgagcagatcagtattgaggccccaggaaaatcaaggctcttgggtacattttgcagaacccagaattgagccacataatctatggccaagtgatctttgacaaagttaacaaaaattaaccaacgtatacaccagggaaaggacacctcattcaataaagggygctggggaaattggatagctatatgcacatgaattaaactggacacccaccctcaacatgtaaataattaacagaaaatagattaaaggtttaaatgtaagacctcaaactgtaaacgtattcaaataaaacaccaggacaactcttctggacactggcctaggtaaataatttacgactaagaact

SEQ ID NO: 551288 - DNA, 568 bp, Homo sapiens
tgctaaatgatgagttaatgggtgcagcacaccaacatggctcatggatacatatgtaactaacctgcacattgtacacatgtaccctaaaacttaaagtataataattaaaaaaaaaaaaagaaaacagaattgtccacaattttaggaaagccatcgcatgacaacaaaccactacaatgataggagcatcactgagtcaacggagttcaagcagtgagcagatcagtattgaggccccaggaaaatcaaggctcttgggtacattttgcagaacccagaattgagccacataatctatggccaagtgatctttgacaaagttaacaaaaattaaccaacgtatacaccagggaaaggacacctcattcaataaagggtgctggggaaattggatagctatatgcacatgaattaaactggacacccaccctcaacatgtaaataattaacagaaaatagattaaaggtttaaatgtaagacctcaaactgtaaacgtrttcaaataaaacaccaggacaactcttctggacactggcctaggtaaataatttacgactaagaact

SEQ ID NO: 551289 - DNA, 687 bp, Homo sapiens
agtgcaccaattgacactctgtatctagctgctctggtggggccttggagaacctttgtgtggatactctgtatctaactaatctgatggggaggtggagaacctttgtatctagctcagggattgtaaatgcaccaatcagcaccctgtcaaaacagaccactgggctctaccaatcagcaggatgtgggtggggccagataagagaataaaagcaggctgcccgagccaacagtggcaacccactcgggtcctcttccacactgtggaagctttgttctttcactctttgcaataaatcttgctactgctcactctttgggtccacactgcctttatgagctgtaacactcaccacaaaggtctgcagcttcactcctgaagccagcgagaccacgagcccagagcccaccgggaagaacgaacaactccagatgcgccgccttaagagctgtaacactcactaccaaggtctgcagcttcactcctgagccagcgagaccacaaacccaccagaaggaasaaactccgaacatcagaaggaacaaactccagacgcgccaccttaagagctgtaacactcaccgcgagggtccgcagcttcattcttgaagtcagtgagatcaagaacccaccaattccggacacaataatattttgttcttaccagtagtctagcaaaataag

SEQ ID NO: 551290 - DNA, 582 bp, Homo sapiens
tacattaaatttgcaaatccacttgcaaagaaaactcactgttatttaaaaaaaaaacaaaacaagattgtgataattgttatttattttattcctaacagcaatatatgarttttgtaagctcttcccatgatccaagtaggagtatgaaagctagctcatgggattgcagaaaggtggtgacagaattataagcatggctatcaagtaaggaaaaacaagtcatctgggcatggtggctcacacctgtaatcccagcactttgggaggccaaggcaggtggatcacctgagatcaggagttcaagagcagcctggccaacatggtgaaatctcgtctctactaaatataaaaaattagccaggcgtgttggcgcatgcctgtaatcccagctacttgggaggctgaggcaggataattgcttgaacctgggaggcagaagttgcagtgagccgagactgagccactgcactccaatctgggtgccagagcgaaactccatactgaaaaaaaacaaaacaacaaaaacaagtcaagaaatgtccagggaactccattgccattttctcttttgttgaacct

SEQ ID NO: 551291 - DNA, 582 bp, Homo sapiens
tacattaaatttgcaaatccacttgcaaagaaaactcactgttatttaaaaaaaaaacaaaacaagattgtgataattgttatttattttattcctaacagcaatatatgaattttgtaagctcttcccatgatccaagtaggagtatgaaagctagctcatgggattgcagaaaggtggtgacagaattataagcatggctatcaagtaaggaaaaacaagtcatctgggcayggtggctcacacctgtaatcccagcactttgggaggccaaggcaggtggatcacctgagatcaggagttcaagagcagcctggccaacatggtgaaatctcgtctctactaaatataaaaaattagccaggcgtgttggcgcatgcctgtaatcccagctacttgggaggctgaggcaggataattgcttgaacctgggaggcagaagttgcagtgagccgagactgagccactgcactccaatctgggtgccagagcgaaactccatactgaaaaaaaacaaaacaacaaaaacaagtcaagaaatgtccagggaactccattgccattttctcttttgttgaacct

SEQ ID NO: 551292 - DNA, 1067 bp, Homo sapiens
aggtcagtgccaaggaagaaaggaagagagatgattacagaggaagacaccagcttgtgaaggctatggtttttctttgttgagcagtttggattttatcccgcaagtgatgggggtggtgtgtgccagatcatctgtggtcttcagagccatttccgctccttycatgctctctcctgtatagcatgagttgaaaatctgggaatccattttctagatcccatgtcagctgtattccagtttaaaggccaccaatttggaatcctgccagattcagaaagaaagagccagcattattcctccaacagtggcaggcagatgcgtgagctccaagagaccttaggtttttctcgttctgctgtgtgtgaaacactcatttttgtgctacaggcaactatgaacatcaccactggttttctgaagtccttaacttgggcaacaatagcctcttcctttatcccagaacgctgctatcacattatagagcaactggcaaacttcagagccactggcaaccttttctgacctacagtcctacagcctttccagggttttgtaagcaccagttagcagttttaaattcattcctgcttaaaatacttcacgtggtttctctttctgtgatccaatctggagcattttagaagatgaccctggcggctttgggaagagagcattgaatagggagaacacagggagatcaatagacagattatctcaataatacaaaggagagatgatgaaactcaaaattctataatgaattttgacaatgccaataaaggaggaagatgaattaaagaaatatttaggacctatgacctatggatgaaggggcaaaataagagacatttaggagtctcttggacttctggtctggatgattgccctgatggtgggaaacagaaagtgaaaacagggagagtgggacaaggagatttggcaggcattatagaggatgagttcaatttaagatgttaagttttaccaggtgtcgtggctcacgcctgtaatcccagcactttgggaggctaagataggtttgagcccaggagttcaaaactagc

SEQ ID NO: 551293 - DNA, 1067 bp, Homo sapiens
aggtcagtgccaaggaagaaaggaagagagatgattacagaggaagacaccagcttgtgaaggctatggtttttctttgttgagcagtttggattttatcccgcaagtgatgggggtggtgtgtgccagatcatctgtggtcttcagagccatttccgctcctttcatgctctctcctgtatagcatgagttgaaaatctgggaatccattttctagatcccatgtcagctgtattccagtttaaaggccaccaatttggaatcctgccagattcagaaagaaagagccagcattattcctccaacagtggcaggcagatgcgtgagctccaagagaccttaggtttttctcgttctgctgtgtgtgaaacactcatttttgtgctacaggcaactatgaacatcaccactggttttctgaagtccttaacttgggcaacaatagcctcttcctttatcccagaacgctgctatcacattatagagcaactggcaaacttcagagccactggcaaccttttctgacctacagtcctacagcctttccagggttttgtaagcaccagttagcagttttaaattcattcctgcttaaaatacttcacgtggtttctctttctgtgatccaatctggagcattttagaagatgaccctggcggctttgggaagagagcattgaatagggagaacacagggagatcaatagacagattatctcaataatacaaaggagagatgatgaaactcaaaattctataatgaattttgacaatgccaataaaggaggaagatgaattaaagaaatatttaggacctatgacctatggatgaaggggcaaaataagagacatttaggagtctcttggacttctgstctggatgattgccctgatggtgggaaacagaaagtgaaaacagggagagtgggacaaggagatttggcaggcattatagaggatgagttcaatttaagatgttaagttttaccaggtgtcgtggctcacgcctgtaatcccagcactttgggaggctaagataggtttgagcccaggagttcaaaactagc

SEQ ID NO: 551294 - DNA, 1181 bp, Homo sapiens
ctttatggaaattagaaaattgaggtccagagtcaacggtttgtacatggtcacagaataaagcaacacaagcagaattaaatataagcttctgactcctaagaccaccacctcctaagaccaccacctctttcattatcatataggcagctactggacagcctggaaaaacctaacatttttaaagacccattacatataagagagaactccggactctgatgctatgtrgatgagcaaatgcacaccactggctgatttagggccatgcattccaagggggctcttgggggcagggcacgggaaaggaaagtactgaaatgagggtcagtggacgtggctgaccacattatgtggctttaggccacatggccaaccttaggactattttcacagtttttaaagggtggttgtcgaggaggacacgtaacctccaaggtgactgtcagcattattgttctattatcctgtgccacacacagagaccacatgcattattgtccctaaattgcacacatttaatgcatttaagattttggggcctactatatttggtaggtaagtcactgcacaaacatatccatccacacacaagtctaatatgcacaggtgtgtggggggtgtgtggatttggatacatatccaatacactaatctcgaatccaaagtacaaactgctatggcatctgtgtgaccagactacggcccctagaaggtgggaggattagttaagaatgtcggccattttcacagagaacaattagctatgggaaaaagaatgagcgtcctcacctgagcttcaggcttctgagactctcttctcccttcctgtaaccatgtagtgcttttattcagccattgtttttaagtcccccctcttaaaaagaaacaagatctgatttcctaagaaattctatgtggttgaagccctgagtgggtctatataaagattaatgggaactttaagcttgacatttctttctaaagaaagaaattttcagtctgagtgaggcagtgaggaaagacacagaggatggcgtgtagacagcatagtttgccgttggtgagttgagtgagcagttcagagggttaattcattgaaactttaattgtcttaatctaggaagctcctctactacagactttacgctccccatcaagctgggctccaaggagggcca

SEQ ID NO: 551295 - DNA, 1181 bp, Homo sapiens
ctttatggaaattagaaaattgaggtccagagtcaacggtttgtacatggtcacagaataaagcaacacaagcagaattaaatataagcttctgactcctaagaccaccacctcctaagaccaccacctctttcattatcatataggcagctactggacagcctggaaaaacctaacatttttaaagacccattacatataagagagaactccggactctgatgctatgtagatgagcaaatgcacaccactggctgatttagggccatgcattccaagggggctcttgggggcagggcacgggaaaggaaagtactgaaatgagggtcagtggacgtggctgaccacattatgtggctttaggccacatggccaaccttaggactattttcacagtttttaaagggtggttgtcgaggaggacacgtaacctccaaggtgactgtcagcattattgytctattatcctgtgccacacacagagaccacatgcattattgtccctaaattgcacacatttaatgcatttaagattttggggcctactatatttggtaggtaagtcactgcacaaacatatccatccacacacaagtctaatatgcacaggtgtgtggggggtgtgtggatttggatacatatccaatacactaatctcgaatccaaagtacaaactgctatggcatctgtgtgaccagactacggcccctagaaggtgggaggattagttaagaatgtcggccattttcacagagaacaattagctatgggaaaaagaatgagcgtcctcacctgagcttcaggcttctgagactctcttctcccttcctgtaaccatgtagtgcttttattcagccattgtttttaagtcccccctcttaaaaagaaacaagatctgatttcctaagaaattctatgtggttgaagccctgagtgggtctatataaagattaatgggaactttaagcttgacatttctttctaaagaaagaaattttcagtctgagtgaggcagtgaggaaagacacagaggatggcgtgtagacagcatagtttgccgttggtgagttgagtgagcagttcagagggttaattcattgaaactttaattgtcttaatctaggaagctcctctactacagactttacgctccccatcaagctgggctccaaggagggcca

SEQ ID NO: 551296 - DNA, 1181 bp, Homo sapiens
ctttatggaaattagaaaattgaggtccagagtcaacggtttgtacatggtcacagaataaagcaacacaagcagaattaaatataagcttctgactcctaagaccaccacctcctaagaccaccacctctttcattatcatataggcagctactggacagcctggaaaaacctaacatttttaaagacccattacatataagagagaactccggactctgatgctatgtagatgagcaaatgcacaccactggctgatttagggccatgcattccaagggggctcttgggggcagggcacgggaaaggaaagtactgaaatgagggtcagtggacgtggctgaccacattatgtggctttaggccacatggccaaccttaggactattttcacagtttttaaagggtggttgtcgaggaggacacgtaacctccaaggtgactgtcagcattattgttctattatcctgtgccacacacakagaccacatgcattattgtccctaaattgcacacatttaatgcatttaagattttggggcctactatatttggtaggtaagtcactgcacaaacatatccatccacacacaagtctaatatgcacaggtgtgtggggggtgtgtggatttggatacatatccaatacactaatctcgaatccaaagtacaaactgctatggcatctgtgtgaccagactacggcccctagaaggtgggaggattagttaagaatgtcggccattttcacagagaacaattagctatgggaaaaagaatgagcgtcctcacctgagcttcaggcttctgagactctcttctcccttcctgtaaccatgtagtgcttttattcagccattgtttttaagtcccccctcttaaaaagaaacaagatctgatttcctaagaaattctatgtggttgaagccctgagtgggtctatataaagattaatgggaactttaagcttgacatttctttctaaagaaagaaattttcagtctgagtgaggcagtgaggaaagacacagaggatggcgtgtagacagcatagtttgccgttggtgagttgagtgagcagttcagagggttaattcattgaaactttaattgtcttaatctaggaagctcctctactacagactttacgctccccatcaagctgggctccaaggagggcca

SEQ ID NO: 551297 - DNA, 1074 bp, Homo sapiens
taatattgtctgggccaggagggtggggcaagtagaccttttaatattggttcagttttatctattattgaactagtcaggcttttctaattcttgagtcacttttgatcacttatacttttgcagaattttcccattttatctaggttcttgaaagtggtgctataaagttgaatatagtagtgtctcataatttaataaaatctcttacgttatagttatgtcttctttttcattccaaatattgctactggttcttcttcttcctctccctcctcctccttccccttctctctctctctgtctcatactctgccaaaggattgcctattttattagatttttcaacaatattaacaaccaaaaggacttttgcttttaaccaaaactgtccagttttttgttttgttttgagtgctagttgataatctctgcccttatctttattactgccctctctggcttcacttagatttcgtttgtgtcccttttttagcttcttgagttggaggcttcattcatttttgttttcatctaccttgttttctaagaaatttatttaaggctgcaaagtgtcctttaagcattgctctaaccaaattgtaatctactacattgatatttaaaatcttcatatttacattttttttaaacatggagttacttaagaatgcayggatctttttcttaattttcatattgctgccaatgaaatttcctgggatacagattctgagatggagattgtcatgcagaagtgttaatgagttttattagggagtacgcttgggatcacccttcgtggaagggaaaggacagaaatggaacttggtgaagggagaagttggactgagatggtcctgcagagttgctcccagttggggtgagatgaccaggcttttataccgtaccactgtgtatcatccagtcactgggtgtgggctgcccaagaaggggacatgaccttggacaaggcagctttttagagttaaggcaattcctgaaaagaattgacaggtgagagctgtctgccagcaccactcccaagtatctgggagatctgattggcacagt

SEQ ID NO: 551298 - DNA, 648 bp, Homo sapiens
ctgggatatgccctggttattggcagcggacacatagtgatggaaaccaagaactgagatgcacttcctcagaaaggggatgtagaatgtgaggaaagggggagtgggactagagcccttaggaagatgagcattcaggggtagagaagacaaagagaagccagggaagaaacgaagaagaaagcatccaagagctagcagaataaaggcagaatggtgtygtgagagccaagaaaaggagagaagaaaagagtgagtaataatgaccaactacaggaattgggaatggctcgggcagttggcggcctggagagcacttctacccacttctgaagggtagttttgagatgacaacctaattgtagtgggttgagaaatggatagaagttgaggaaaacctattccccgccctcaaggagaggagagcttggtggcagctacggataattaaacaagcaattacaaaaggcatggtctttgacttggattcatgagtgtgtccccaaaagttccaaaaaaatcatggaccaagctatatgcacctcatctggatgtgcattaatctgggaagagatgtatagctttcataaaatccaattgcctaacatgaggaaacaagaaaacaggatactaaatagagacaggtca

SEQ ID NO: 551299 - DNA, 613 bp, Homo sapiens
gagccccagagtggttgtagctgatatcacatcagactagatgttctttaaacatctagaaaattctgaaattctctgttagtgtcaaaacatctcccccttcactggcatacctttagatgctttcttcctttatactttgagtttattttgttttatattttaggtatgttcatatctgccttatttaaattttactgccttgggaaagtggggcaatagatgaaataattttgaaattattcaaacataaatccactagataaataaggtttccttgattattcttgattgtttaaaaaatattagcctataagtgaaagtaccctttaaaacacagaaatgacacatatraaagtgattataccctcactgtaacatatatacatacatacatatatgtatgaatatatgtggaatatatatgtgtaaatatattctaagtgattagattgaagatttcatctttatgtaaatggagagatgctgcactgatttgtgtctttttcaggaggagtcatctaaggctttgggaaagaacaaaaaagtaagaaaagacaagaagaggaatgaacattaatacctgaaactataggaaaggttaatttgccta

SEQ ID NO: 551300 - DNA, 531 bp, Homo sapiens
ttgttccagtttctcctgaagtagcacagtcaatatttttcctgtattttttaaaattattattattattattttttatttttaggacgcagaattgcaataggaagaaactgttgtttctaccattggggagwgactaagtataaattctgcattttctgtgttggtcccatgaattgttcataaaaatattataatacaagttaatgcaatttcgtatgattgtaaaattttcatgtaaattacacataattaagaaagaaatatacttttatatcatattttactgtttttatttaaaaaatgactactggaggccgggcgcagtggctcacacatgtaagcccagcactttggtaagccaagggcagatcacctggggttgggagttcaaaaccagcctggtcaacatggcaaaaccctgtctctactgaaaatataaaaattagccaggtgtggtggtgcctgtagtcccagctactcaggaggctgaggcaggagaatcacttgaacattggaggcagaggttgc

SEQ ID NO: 551301 - DNA, 1066 bp, Homo sapiens
caaacaagcaaaaacttttatacaatcaagttgtctataatttaagggaaattataatgatttatctagagattgaatttgatattaaaaaaacacttgtacactaaaaaattggttagaacaatgaaattttctgaactagccagccattgggtggaagtttgactatatttgatctccttccaccctaatggggctgcaatttatccttactgaaactgataaatatttcagacatagttttgtcttcttcctagagtgattctgccagtaccactgtctgaaggctaacagatggcctctaaaccagtatgacatccttcagtgagatgtctggtttcattgcaaagaaggtgtgacaataggcatatgaacaaacaacccacggctatttccatacagtgaatcattcagatgcagctagccacatagtataataatagggccttggctaagtggccagctcaggaatgacagcctgtgggtactgtcttccagaatgtagtatatgtactaaacctatagttgatataaacagggctaggcaccatatagttacaatgcacaggatttgtagtcgatgatagaaataggattggaactctcactatcacccttagccacaccaccaatgtgtgaaatttaatgcatgctgtctgtgcacttttacatcgtgagagtttagaggtttgggtttattaagaggagcatgcttctgcttagggaaactgtgaagactgttccccttcctaatagcacccaattcacaacagactccagcgaatctctccagagaatgtctcccgagaatcactcagctaaagccacatcctgtaacaagaccatcttagctccttgcagaggcaccatccagtttcatggctaggtattctctcatcctgcagcaaatgaataaatctaactttgttttatttcatgtgtgttgttaatggtttacatctatggaaattagcagtatattttagatcwtcactggaaattgaaagctgttaaggcatagggccatgttgtctagatggtcctcgggaattgttgaattacacca

SEQ ID NO: 551302 - DNA, 2089 bp, Homo sapiens
ttggtgtttgcctattgtaatggaactgtttcttcctaaccactacttttcacacaggcagatagaggcctacttctctccattgctcctgtcagtgatgatgcctgaatgccttgttctatacctaaattattattaaaaagcacagataccaacactgtgaactccagttaaaaggttatagagctccactctctcaccctgccataatcattatattgtagagtatattagacattaagaaagcctcctgcaaaaatcaattcccagttgtcaaagcctgcctttcgagaaaatttataagcaaaatctaagccctagtaataactcactaaagcaaaaagccaacttcccagtacagataagatcacatagaaggagaacaaagaaccccagctgtagcaagaccaatctcagtcacaacaactcaaggccaatctcttagtcacaacaactaagggttatgatgcaaagagaaacaggaaactacttaaatatctttgataatttgttatacagataaatatgcacagtaatctcggtactgttcttattacacacagtagttccagtcattttcaacaaatcctattgttgtccatagcaagttcataggtaaagaatattgtctcagggtgttgaatcagggagaaactacttctctgttacagactaggcaaaactttttataccacatgtcttgcaaaaggcagtagtcacctgtgagatacaaatatatgtcaagtgtttttaacctgaatatcagaaacttttttttaaaatctctaaacctcttgaaattactgtacatgcaaaattcatgtgtatattaatttttctgtaaagaaatttttggctttcatcagtttctcaaaagtatctatgacatcagaaatggataaggactactatagtattatatgtaaggaaaacatgcatataccactttaaaagataacattgtaaagcaaagatcctctcacctgtcatctggggtaaagaaaaaataatggcaaaacaagtattcattgggggagaaagcaaaaaatacaaataaaaaagtaatactccaggaataatagtcatagagaaatgattctttcacttctctacaatgtctaaagcccaaattatattattctcagattttctcgatgctatttaaagggaaataattcacctaaaatttggagacaataaacaagcagcaatgatgggtgtgggtttgttgcaacttgtttttatttaaaaatgtattatgaatatctttttctttcagcataaaggtaaacagattgtcatctcttaatttttatggaaagataaagaagcaatagctgattaaagcacacatataatagaaaggtcaaagaataaagatctatgggctcactccaaaattcaaaaaaataaaataaataaaacagagataaaggaagaaaaaaaagaactgagagaaggttaggcatttacattgcagagctaatctaaatataattaggcctaactcagcctttctcccagagttcataaacctacacaaagaagctctctgtggagcaatatagccaaatgtgtcttcctttaatgatccatttaaatggccagtcttgtcctacctgctctcaatttttctgtttatgccgtctactgctttttttttaaagtacttgactatttgcctgtgtctaagctgtttattagtgcaacttgaaaccaaagcaaaaagaacytttactataatgtctattctgtccatttcggcccagttacacctaatttcccattttatttaactatggacagttacatgaaactcacataactccgtgactcaactcagagagaaaaactagaaatgtaagaaaatgccattttaaaaatgtttaactagaaaatcgagtcttattaatgatgagatttttaaaaaattaatgaatcattgcataaagaaaaaaatctaaacttccaagtcaggcagattcaggtttaaatcccagcctcagacttagggtttcaacgttcacatgaaagagcttaggaaatgtcattctcatccttacaaaaagaaataaacagcaacaacaac

SEQ ID NO: 551303 - DNA, 2089 bp, Homo sapiens
ttggtgtttgcctattgtaatggaactgtttcttcctaaccactacttttcacacaggcagatagaggcctacttctctccattgctcctgtcagtgatgatgcctgaatgccttgttctatacctaaattattattaaaaagcacagataccaacactgtgaactccagttaaaaggttatagagctccactctctcaccctgccataatcattatattgtagagtatattagacattaagaaagcctcctgcaaaaatcaattcccagttgtcaaagcctgcctttcgagaaaatttataagcaaaatctaagccctagtaataactcactaaagcaaaaagccaacttcccagtacagataagatcacatagaaggagaacaaagaaccccagctgtagcaagaccaatctcagtcacaacaactcaaggccaatctcttagtcacaacaactaagggttatgatgcaaagagaaacaggaaactacttaaatatctttgataatttgttatacagataaatatgcacagtaatctcggtactgttcttattacacacagtagttccagtcattttcaacaaatcctattgttgtccatagcaagttcataggtaaagaatattgtctcagggtgttgaatcagggagaaactacttctctgttacagactaggcaaaactttttataccacatgtcttgcaaaaggcagtagtcacctgtgagatacaaatatatgtcaagtgtttttaacctgaatatcagaaacttttttttaaaatctctaaacctcttgaaattactgtacatgcaaaattcatgtgtatattaatttttctgtaaagaaatttttggctttcatcagtttctcaaaagtatctatgacatcagaaatggataaggactactatagtattatatgtaaggaaaacatgcatataccactttaaaagataacattgtaaagcaaagatcctctcacctgtcatctggggtaaagaaaaaataatggcaaaacaagtattcattgggggagaaagcaaaaaatacaaataaaaaagtaatactccaggaataatagtcatagagaaatgattctttcacttctctacaatgtctaaagcccaaattatattattctcagattttctcgatgctatttaaagggaaataattcacctaaaatttggagacaataaacaagcagcaatgatgggtgtgggtttgttgcaacttgtttttatttaaaaatgtattatgaatatctttttctttcagcataaaggtaaacagattgtcatctcttaatttttatggaaagataaagaagcaatagctgattaaagcacacatataatagaaaggtcaaagaataaagatctatgggctcactccaaaattcaaaaaaataaaataaataaaacagagataaaggaagaaaaaaaagaactgagagaaggttaggcatttacattgcagagctaatctaaatataattaggcctaactcagcctttctcccagagttcataaacctacacaaagaagctctctgtggagcaatatagccaaatgtgtcttcctttaatgatccatttaaatggccagtcttgtcctacctgctctcaatttttctgtttatgccgtctactgctttttttttaaagtacttgactatttgcctgtgtctaagctgtttattagtgcaacttgaaaccaaagcaaaaagaacctttactataatgtctattctgtccatttcggcccagttacacctaatttcccattttatttaactatggacagttacatgaaactcacataactccgtgactcaactcagagagaaaaactagaaatgtaagaaaatgccattttaaaaatgtttaactagaaaatcgagtcttattaatgatgagatttttaaaaaattaatgaatcattgcataaagaaaaaaatctaaacttccaagtcaggcagattcaggtttaaatcccagcctcagacttagggtttcaacgktcacatgaaagagcttaggaaatgtcattctcatccttacaaaaagaaataaacagcaacaacaac

SEQ ID NO: 551304 - DNA, 1614 bp, Homo sapiens
atataaacatgagtaggaggtaaaattaaactgaaaagtagcatccagccatgatactggagaggtaggctggggttatattgtaagtgctttctatgccatgatttatttttattttttattttttgagacagggtctcactctgttgcacaggctggagtgcagtggtgtgatctcggctcactggagccttgacctcttggcctcaatcaattctctcacctcagcctcccaagtagctgggaccacaggtgtgcaccaccacacttggctaatttttgtattttttgtggaggcagggtttcaccatgctgcccaggctgatcttgaactcctgggctcaagccatctgcctgcctaggcctcccaaagtgctggaattacaggcatgagccactgtgcctggcctcatgatttttaaattttttggaatgtaatacattttatgtatcaaatcaattaatgagtttcaatttttcaagaatttctacaagaatcctaattatatctaatagaaatagtggtattattacattttacataaaagaaaattaatgtaattaaatatgttgattgattgtaaccactgaaattaatgtgtccatgatggtattagctccagatgctcctttaatacaaaatatgcacatactatacatatctttttaggagattgttctctttactgtaatatctaattaaaatatgcaaaaaaagatttttgtgtgaaatactgggcagcttattatcagcttctattgtttttatttgctcaaatgttagattttaaagctcagtttaatagagaaagctatgaaacattttctgaaatcttaagttcggctgcttacattttttttagttatctactcttctgactaacaggtggggagttaataggcatacaaatcattaaagcaatgtcacagtgataaaattgtgataaaaggactaaaaacttcccctgaatttggcagctctttaagagtatgctgaaatatagattggaataaatgttataatcagttattatagaaggagagtatgtgacaagcatgcttgatatacatgttgaaggccattatttagatttaaagtaattccttggaaaccacaggggattgcttccaggacccctcacaaataccaaaacccatggatgctcaagtaccttatataaaatggtgcagtatttgcatataatctatgcatctatgcacatcatcccttataccatcctttttttttctgaatatttccaatccatagttggttgaatccacagatgtggaacccacggatatagaaggcyggctgtatctgtacgtgtgcgtgtgtttgtgtatgaaataataggtactatcagttcttataaaaaagaatacgtgttaaatgtccagaatgtgaactgtgcaggatttcactagatccaaagttaagtgaaaaagggatgtgacaggtcctggtggctgaatgatgtccactcactgggaggtgaccaatcaaaccaagacttgtcacagtggaaaacagcccttagagagtcctttataaaagagaacgtcactgggctgggccaaataggagcagccatgtgataagtacttggggaa

SEQ ID NO: 551305 - DNA, 1159 bp, Homo sapiens
atttgtctgggtatgtagtcttatgtttgaatttgtttgctctcacttaacaaagaacaccaccaaattctcttggttggtccctaatatccattgggtttggctaacaatttacatccaaaaattcacatggtagaaaaatactagactgttctgttatcacttggccaggaatgtactggagtgggggacaggaaagctagttattttaaaaagagtggtctgtgctagtacaaaggtaagattccattcctagaatagttatgccaaatctgctcaggattatattatttactattctcatgcttgaaaatgagcaggggcaagggggtatgaaaaaaggatcatgaaatccatctcttgtcaccttctgttcagcactagtgcaagatttggtacctgaaaattagcaattaacctaaagaatgatttttctttttttctttctttcctctgatagctggaaaggcaacccccagctatcagacggtctggtgtatgaagggttctgggaagacccaaaggagtttgcagggggcagtgcaggccaaagcagcgtctttcagtgctttgacgtcctgctgggcatccagcagactgctggtggaggtgagtggaaaataacaagaaataattatctcttatgtgaatacaatagtatttggatatctacaaagcaccttcccatcagcatcttatctgagcttatctgatagttttagcagaatcaggcaagtagggatttggttgccatgatcccattttaaaaatgaagatgcagaaacttaatgagagtcagtgacaggttccttgtgaaccagctagaaagtggcagagctggccaggtgcggtgactcaagcctgtaatcctagcacttcgggagacctaggcaggtggatcacctgaggtcaggagtttgagaccagcctgaccaacatggtgaaacccggtctctactaaaaatacaaaaactagctgagtgtggtggtgggtgcctctaatcccagctactcgggagactgaggcaggagaatcgcctgaaccccacaggcagaggttgcagtgagccaagatcgtgctactgtactccagcctgggcaaaagagcaaaactccatctcaaaataaaaataaaaaataaaargccaggtgcagtcgc

SEQ ID NO: 551306 - DNA, 523 bp, Homo sapiens
cctatctcaaaaaaaaaaaaaaaaaaaaaaaaaaagagactaatatactgactcagagatataytgattgtccgggacagtctctccaaaaatccagaactttgccaacatatcgccttcaagaacactccatagacaattccttattctctactcctgactctgagctgttccctgcatctctctgatttttgtaccatatattgtttggtatccaaataacataccatatattgtttggatctgatttgtaccatatattttaaacttattatgactacataacatcataaaagattcctcagttgttctatttctccaatcatacaacaacatggtggacaataatcaattctttaaagaacttaaatgatatttaaaaggcttgtttatagaaatgattctcagtaaactatcgcaagaagaaaaaaccaaacaccgcatattctcactcataggtgggaattgaacaatgagatcacatggacacaggaaggggaatatcacactctggggactgttg

SEQ ID NO: 551307 - DNA, 523 bp, Homo sapiens
cctatctcaaaaaaaaaaaaaaaaaaaaaaaaaaagagactaatatactgactcagagatatattgattgtccgggacagtctctccaaaaatccagaactttgccaacatatcgccttcaagaacactccatagacaattccttattctctactcctgactctgagctgttccctgcatctctctgatttttgtaccatatattgtttggtatccaaataacataccatatattgtttggatctgatttgtaccatatwttttaaacttattatgactacataacatcataaaagattcctcagttgttctatttctccaatcatacaacaacatggtggacaataatcaattctttaaagaacttaaatgatatttaaaaggcttgtttatagaaatgattctcagtaaactatcgcaagaagaaaaaaccaaacaccgcatattctcactcataggtgggaattgaacaatgagatcacatggacacaggaaggggaatatcacactctggggactgttg

SEQ ID NO: 551308 - DNA, 1854 bp, Homo sapiens
cagctctctgctcaaagcatgggaagggaaaacacattatacaaatactaactaaccatggttcgggtagacaaataggggttgggttagtatttgaataatgtgtcctgcagcctgggaccctacgcaggcctctcacctccagcctctgcctctgcctctgcctccagttcaagtgctgtggaagcaacagctcagccgactggcagcacagcacgtacatcctgttgcgggaggccgagggccgccaggtgcccgacagctgctgcaagacagtggtggtgcgctgcggccagcgggcccacccctccaacatctataaggtggaggtgagcacccaagctcaagttgggggtgaggagagggccctggcctggccgttcaggagccccagaaaggctgggtcaggcaggtgggtgtgggaaaagcaggacacatgtgctccttggccacgagcccacagtgtctggggctttccagagtctctacaaagccctgggacaagcagctcataccggagagtataggacaccatggcatgcccctggggccactcaagtagcctgtgagcaattcaaggttgggtccagcctgtgagtcctctggccwgtcctcagcctctgctgcagtgacagcccgccctccgtccccacccatgcctgctcctgggccatggccgcatcacctgcccttctcttacagggaggctgcctcaccaagctggagcagttcctggccgaccacctgctgcttatgggggcagtgggcatcggggtggcctgcctgcaggtgagttgcagtgcggggactggtgggggtggaagggctctgaacccctctcccattgacacaggtcttcagtaaccacctgggctgaaataactgaccctttgcacacccgcaccctaccctgctctcttcttctctccccttccctctgcaaccaaggctgaatcccacggtcagtctctcccccagagaacatgaaggaaaatagctggggacaacatgaacttgtcaggaacagggacctgggcggagtgtgagtgtgggctcaggtatgtgcatgcaccccatgtgtgtgcacgtgggggtgagcgtgcaagccatctgtggtacgtgtgtctgcatgcttctgggtccatgtggttggggttgtatgcacgtatatgtgtttaggggtgcttgtgcatgtgtgtgtgagtgtgcacgtatctgcattcattcctttgtgtgtgcatgtgtgtttgtgtgtgtgtatagtcagtcctccatgtccgtgggttctgcatccgtgaattcaaccaactgtagatgaaaaatattccaaaaaatggatgattgcatctgtactgaacaaccttgtcatcattccctgggtaatgcgatatatcgactgtttacgtagcatttacactgtatgaggtagtataagtagtctagagatgagttaaggtattatataggggagaatgtgcataggttatatgcaaatattgcaccattttatatcaggaattgagcatccatggattttggtgtccagggcagtgactgtgtgtgtgtgtgccctcatccagctgtctccctgaggatgagcaatgcctttagctcccatttctccctgtaccctctcccctagctgccacccaggaagtcagggtgacactcttgggttactctagtcaagggtccgaaggaggggagccaggaaggcctcctcagcggcaagggcccctgcagtccccagctcacgaacacgcctgcttccgctcagcaggagctgagtgtgggctgtccttctaggagtcttgctgtcctgcacagcccttcccactccagggctaagcacca

SEQ ID NO: 551309 - DNA, 551 bp, Homo sapiens
ggctgtttatgaatctgattgaggagctcatagctaaggaatatgagtttctgggataccttggctttatttgcataacactgcccaggatagagaacagaacatgtgtcagccacctcactggctagatatgttgggtgccagggctccattgctcatccytgagccacagaaagggccaagttcaggaattgcctggggcctgggatcactaccagtcccttccccttggcgtcagagtcatagctatgccagagattccatcttggagctgtccttggctctgaagttgcccgaggtaggacacttatggtgggtcactgacttcgccatggggaatagagctgaagagagaaagccaacttggtaaagagaggaaggaaaggtagtttgattaagttttgtctcaaagtgtctgtttttgggtttgtccctgcattgatctgcaagggaatgaggcaagtaatggcccctcagggactttcaggactttgctctcaatgtcagccgtcattttcaatcaccctctccctcccagccattaattttgg

SEQ ID NO: 551310 - DNA, 511 bp, Homo sapiens
ctcaccctgcttctcctttatacaatatatgaagtatttcatgctttccctcttaccatccaagcccaaactcctattttgcagtgattttagttggttttcaggtggtttttttaattatgttaatttgcaggaagttgaatctcttccaaargaaggtgttcatattttaaaataatagcttttaacctcaattgtttttttaaatggaggatgagtaagggaattatacctccatctggtcttttggaggagaaaagacagagccaatgctccagtctccttttatacccctcccagcttcctagaacactttcttccctgttcctcaagtgtcctccctgtagggcattttggcttgtatttaacctacaagagtttgccaattacagctctcttaccctggaaaatctccctgagaggcactgttccagttagccaaagatataaagagacctcaaggagggtgaaaaaataaagtattaatgggtgaaaggacactatattaaca

SEQ ID NO: 551311 - DNA, 2969 bp, Homo sapiens
tgaggtatgtaataaatactgcaggtttgtaaacagattcctgctcttgagagaacggaagccttacttcatttggtaattctgccgtttggtattttcaagagaagtcatccttaaactacagttagtaaagaaaagagtgagcaagaaaatgtccaatgtctttatgggtaagggaatagttacaagatacatgaagatagctgccacctgcccccatcgccaaatcaggacacaggtcagaacatcaagaaacacagaaaaagcataactcagtgccatttaggaatcatatcaaagcaataaaagcacggatacagaaaaggaatacagagctgtgatattcaacactgtgaaaaatttaacatccaatacacgaaaatgaagcaggcgtcattgcacatggtatatcacatagtttatcacatggtaaataatattgctgttcaatgtaatactgaattcactaaacctgaggtccatgcacaataggttgaaaacaagtcacaagaactgtatcagaactgacagttgtgtgacttgccatgaagacaatctggaaagattgctgtaagaatataaggagctcatctgccttacattctcattcaaaacataatgtgcaaaacatgtacttgggattgttaaggactgacagacttgattatgcttaacttttaatttgttgcaggttaaagcaaataccaagggctgtatttcttagcctctttagtaggaaatgagattatgatgtcagttcgataaaattccaacagaccaggcaatgaagtaaatatgttcacaatgaatgccacgtcatcataaagtgatggaattataaccagccctttgcaccttaattgcctatggacttttacgcagtgctctccatatctcacctggacacccataatgacccaagtgataggatgtcaataagttattacggctaacacacaggacaccactcaacaagaactgccctgaaccaactggtttgcaagtaacttgatgaattttcaaaatcacacttagaaaatatgagaacacattctaagcagagttattccccctagctgtccttaaatatgactaattgttgccaagaacatcaatagcattctactcaactgtgctgtcttcttttctaatcactgtccaaaaggccacacagtctgacacagttccttggagaatggcaacaccgtgttgactggataggcccccagagtcttggcagtgagttctccaggaccagaacactccactgctctccacctccaggtccctcaatatctagtcagcataatattgagcttctcagaggctatttggtgatgttaagatcctaggtatttctggccgggtgctgtggctgacgcctgtaatcccagcactttgggaggcaaaggagggaggatctcctgagcacaggagtttgagaccagcctgggcaacgtggcaaaatgctgtttcttaaataaataaataaataaataaataaataaataaataaataaaataaaacaaaattagccagacatggtggaatgtgcctccagtcccagctactcaggaggttgaggtgggaggatcacttgagcctgggaggtcaaggctgcaatgagccgtgatcatgcactgcactccagcctgggcaacaagtaagaccctgtctcaaaaaaaaaaaaaaaagaacctaggcatttctgccgacctagatgaggaaagcgggtctgacaatgtacatttcagaaatatattaatctgggcaagttttcaggatacaagcaaactttaaatctgtaatcgcagtcctattcattctttgggatcttaacrtgcagcctaggcaggcaaactgaaacaaaacacgtttctcctttttcactgcagtagcaaacatacctaaagctgccctgctactccacagaaaacttggttcacagtctcttcataaggttgtatatgcattccagctgataataataatgctgccataacacacaggaggtagaggccacacgtgataacaaagaacacaaaggagaaaacagaatctggatactttgtcccagaagccctaataccctgctaaatccaaatgcacagggggctcccacctgtcgtgagggatgcttccctttgaatttcctggtaagctattaagagagaagagtcagaaagaatgggacttgcagatggattccagagcccattctcaccaataacactgagaaaaatgtctaacacctaaatggcccaaatccttccaattcaacgtggaaataccatatttcaatagttgtcaaaagcaaaagctcgaattcattaacttcatttttggaattcaaagcaaactaatactctacacatatccaaataattggaggttagtgtctagggcaagaaaaccagtacacaacatacataaccagagagagttttaacagaggttataatccaagtctaaattgcacccaaaaacaacagatttctaaaattatctttaaatgcccaataaaagaacccgggaaaccactgcttacactgcaatttcgttcacctggctaatttcagtgatactaaaaaccccaagtgatcactcttactcttctcttacacagaacttttgagtataaaccatgtcgatcatttcaaaattacaaccccagttgtttcccttcctcgttggatagaacctcacttggacagcagtagtgttcttatctgcttcctttaatttagtcatttttctctatatcccaaattcaaaaccgttttcttttttaccatgaaatttcaactgtcacagtttgaagcacaaacaaaatacagaactgaaaggcatacagcacaaaattaatcaattcttcttcttgattgcttcactggtgcatttcagacaaaaggcaaactggggatgaaaagtgacattttggagaaacagtcgcttaaattttcaaaaa

SEQ ID NO: 551312 - DNA, 652 bp, Homo sapiens
gggctctgctcatgaatgtcgcctgcttagacaggtcttgaccaccctatctatagaggcaccacctgcccccctccaacaatagaatcacacacacaaaaaataaaatcacacacataaaaaatagaatcacaaaaaaacaatagaatcacaaaatttgcctttaccataamtggcttcttgggctctcttatcgttacctaaaagtatcttgttcctttccttgtttgttgcctgtctctcagcctaagccctgtgagaatggggtcttcatctatcatgttctccactgcatgctcattgcttagggcagcactcagcatgtcatatgccctcaataaatatctgctaattgaatgcacaaattaaatgagagagtggatgtgaaatgtactctgtaaagtacataaacctccatggacaagaagacctattatttctggagtgtaacttgtgtctcctcccctgaggagtaactgtggcccctcatctcagagcacaaagagtgggcatgctccctgggaggaggttagaggtcaccaggaggagagtctctctttacagtcaggcagggtgagcagagggggcacagtgagggggcgggacatgatgtctggtccacactgagcctcagggagaagtgagtgagttc

SEQ ID NO: 551313 - DNA, 2027 bp, Homo sapiens
ccccaggaatttaagtccccccatcttctcacagaacctttctctaaaaatccaaaaatagtcccatcctaaactaccactctcttatccctaggaataaatcatcagtctcacctctctgttctcatctccagggggcggtgggggaccacgaggccggggaacaggggctcccatgggcaaaactgtaggagtggggcccactgggcccactggagcagctactaagagacgggaaaaagaaatccaatgtcagaagaggcaaaacactcacgtaaaaaattacctctcttgctgaaagggtgatggtaaacctgcaggggaggagggcacgtggcgtggcttttggaatgctggtaatgttttggatcatggtccaggtgctggttgtacaggtgtgttcagtgtgtaaaaaaccattaaactatatatttactatatatgccctttttaaatgtgatagataccttaaaagtctttttaaaaatgtctaaatcaccttccttgcccttcccctcggttccagggtctcacctcgaggacccagaggagtgcgcacaccaatctggcccatgtcttgtgggggccgagggactggggtgcccatcttggcaatctcctgctgtcgttcctgctccagtaacacagctgcctacgggagggaagtgggagtagatactgcctgaaaacgcatttggcaggcagcccctggcaaatgcattctttcagccgggtaatgggcccaaggagaacaatcacgaaccacttgggtgctgacatcccctccacccccacacttccaggctactaatccaaacggaggagccctctcatcacaacggaaaatccctagaaataacaccaaggaaaaccccaggaaacttytggttcctagcagagaatttcatattgagccaaacagtgccttctacttttcagagagttttcttccccaaaagattaaattatacagaagaaacttttgagctcttttcttatatccacccctcaagatccagcacaatctgggcaaagacagtactttacccacaggtccagacttgtggcttttttttttttttttttttttgagacagagtctggctctgttgcctaggctggagtacagtggcatgatctcagctcactgcaacctcggcctccccagctcaagccatcctcccacctcagcctcccaagtagctgggactacaggcatgcgccgccacacctggctaatttttgtatttctgagagacagggtttcattatgttggccaggctggtctcgaactcctgagctcaagcgatccacccacctcagcctcccaaagtgctaggattacaggtgtgagccacggcacccagctcatacttgttgctttttaacagttactttttaatactcctgagtaacccactgggtaatgactgatgcaatgcacctctggggccaaacatcttatataacattcccagacttacagtcctattctgtctaaatccaatacaaataactcaattacccagagtcctatctagaatgatgtcatgtaaggcgagcagaggtcagcaggctctttttataataggtcagaaggtaaatattttaggctttatgggttgctgtacagactctggtacatatttttggtttgggttttcttataacccttaaaaaattttaaagttatttttagctcataggccatacacatgcaggccacaggtcatagtttgtcaattcctgaacttcaagaaaaattgaaagctttggaagatactagaacttagttgagaacaaagtagcctccagggaaaacttgaatggtgcactctaagcactataaatgacagccaactgactggaccacgaggtcaaaggttagggggaggggtattacccgcttctgctgctccaagagctcatgttccttcagcgaatgatctccctgcttaaaaaagaaaacaagttcataccagcaccaatacccaacacgccaatctgccacaactcttgcttcttg

SEQ ID NO: 551314 - DNA, 635 bp, Homo sapiens
ccatatgctacccacataagccagcagtgattaaactcattccacaggtaactgaattggggttcaggaaggagaaatgaactgcccaaggtcacacaggaagtggcaaagccaggactcaatcaaggtcacccaacttcacatttaaggtttgttcaatcctaccatgattcctttcacctaaacattaggatgtgcgagaagaagcacacttgggtatcaatgcaycatttccaaagtgcacagtgactaagatcctagggccggaggtcaaactgcctgggtttcaacctcagttctgccattaccatggctgtgccatttacttaaccttactgtgtttcagttttcttacctgtaaaatggaaagaatgataataaattccatacttctttattatgaaaattaaaagatgatgtgagaaagcatttagatggatgtcctgctcagacctcaaaaaatattagctcacagtattttttaattataaaagtcataataaaacagttgtatcaaagtaataagaaataaaaagttgttataaaaaataaaaacttgaggccaggtgcgctggctcacacctgtaatcccagtagtttgggaggccaaggcaggcggatcatctgaggtcagg

SEQ ID NO: 551315 - DNA, 635 bp, Homo sapiens
ccatatgctacccacataagccagcagtgattaaactcattccacaggtaactgaattggggttcaggaaggagaaatgaactgcccaaggtcacacaggaagtggcaaagccaggactcaatcaaggtcacccaacttcacatttaaggtttgttcaatcctaccatgattcctttcacctaaacattaggatgtgcgagaagaagcacacttgggtatcaatgcatcatttccaaagtgcacagtgactaagatcctagggccggaggtcaaamtgcctgggtttcaacctcagttctgccattaccatggctgtgccatttacttaaccttactgtgtttcagttttcttacctgtaaaatggaaagaatgataataaattccatacttctttattatgaaaattaaaagatgatgtgagaaagcatttagatggatgtcctgctcagacctcaaaaaatattagctcacagtattttttaattataaaagtcataataaaacagttgtatcaaagtaataagaaataaaaagttgttataaaaaataaaaacttgaggccaggtgcgctggctcacacctgtaatcccagtagtttgggaggccaaggcaggcggatcatctgaggtcagg

SEQ ID NO: 551316 - DNA, 1294 bp, Homo sapiens
ttgaaaatttatatttttttctttgtgaaatgccagtttatgtccttgctcatatttttttttatttggtcctgagattattcttgggaacagcatgccaaggcccgacataaagtttctctcatcctaaccaacatacaaactcttcccaagcaacagtctacacagagacccgttcttctcacatcctggctctctctctctccctctgcgagtcctcctcttcttttgacaccactcacataagcagttcacacttgtgcctgcttctccatgaggatttccactctctaaggaggtagaggagtgcagagatttatttgctggggtcacatgcagagggcgtcggagaaggcagccaggacaacggccaatgtcattgttcagccgtcattgggactgacattggagacagcgtcttgggctctggaaggaagggagcgttgacaactgtcattatttctagtctccccagggcatgcagaacattacatgcaccttgctaatggcctgcaatgatargatatgtatcagtgtgaataatcttgcttagtgagagtaatgggctgggtgacggggtctgtctgtctcatttctattggcataaatagatctgggcactatgacttccacagaggagtggaattacagagtcactgagggcctaactttagttttggaaagagcagaactctggagacaaggctgagctcaggagtgttgtgtatgtttgtgtttctagctgtcatagtctgaatgctgggtcccccaagtttatctgttgaaatccaaatccccgaggtgctgatactaggaccaggggctttgggaggtgattacgccctgagaatggagccccgatgagtgggattggaggccaagggagctttttggcctgtcccccttaagaagtaagaaggtgtcttccgtgaaccaggaagcaatccccgcccccgcccccacccacccctcaccagacaccgaatccctcagggctttgatcttgcacttccagcctccagaactgtgagaaatcaatgcatgcacaagtcacccaggttatggctgaatgttacagcaatgaatggactaagacagtgcccatgtgatgcctgactttactgcagacacctgtactctctcctgcagcgtcctcactggcaccatccccccaaggtggagtggaggaacgttgtcaccatctggcacagacattgtcactgtcatggatgggcagtcggccaccaaagtgtctggtgccagcagttgcacccctaaactcccctgatgatgg

SEQ ID NO: 551317 - DNA, 1914 bp, Homo sapiens
ccttgtaggcccaggtatcctcaacctgttgttaaaataaatgtgtcagctgggtgcggtgtctcacgcctgtaatcccagctctttgggagactgaggtgggcggatcacgaggtcaggagatcgagaccatcctggctaacatggtgaaaccccatctctactacaaaatacaaaaaattagctggtcatggtggtgggtgcctgtagtcccagctacttgggaggctgaggcaggagaatggtgtgaacctgggagatggagcttgcagtgagccgagatagcgccactgcactcccacctgggcgacaaagccagactccattcaaaaaataaaaaaataaaaaaaaaatgtgtcccaatgaaataattttttttgtaatcctatgtatttcatacatttaaaaacattctgagaaaaagtccaaagatttcacctgactgataaaggagccccatggccacaaaaaggttaagaattcctacatcggtctcaattttaccctctatactactgtgtagttgaagagaaaatagttcttaaaaatgttatttagtttcttggaccttgacttccccacaccccctatttcttttaaaaatgtgaccggtttgtattttgtggtttttagtgtgtttttacactcttgtttgtctgattattacgggtatgatgtcctgttyggtttgctttgtttgcataaactatattgttttttgtatttatagagtgggaatgtagctaaaaatacagctccaccttctaagagagatacgtttcatcagatgatgtccctatttcaaggaagttgtgaaccagtaaatttgagctgtacctacccattttgtgttttaagtttatgctttatatattccgaaaaagaatacttacttttaatttcctttatagtacgcacagggtgaaattcaggaaaataacctagagaaatttgggaagagcagttagattgtgtcaaagtaattttagtaattacagttttatggaggagtagataagttcttattaaaattaagtctcaatatgttccaatcccaaatatgttttaggtgtatctttgcttagttctattgatagatattcagtagctcaaagttagcaagcacctaatttctcatatgccagttgtacagttgtagccctcttaagcaaaagtctatttaagagagttttgaatgtagaaggccaggcgaggtggctcacccctgtaatcccagcactttgggaggccgaggtgggcggatcacttgaggttaggagtttgagaccagctcaactgacacggtgaaaccccatctctactaaaaatagaaaaattaggcaggtgtggtggtgtgtgccagtagtcccggttactggggaggctgaggcaggagaatcgcttgaaccggggaggcagaggttgcaatgagccgagattgtgccactgcactccagcctgtgcgacagagtgagattctgtctcaaaaaagaagaaaaacaaagttttgaatatgtatttgtgacacctcacattttataatttcagtttgttgatttttaaagaatttgttcgtattttgtgctttcggtttgtggctttttttgcttctgctcgtcttactttaaaaccagagttcctgactctgcctctaaaactttcaaagttttgtaaaatcgagtaccttttctagatatcagagattcatttttatgcgctattgcttttcaggagaccattatatttagttggggccaaagtaatcaatgtaatctgctgggttaaaaaaaactattctaggatatttacttagtatacatttttagatttataaaggtggctgcctgtacaagtatttagctctacttgattttagcaagtgtgtaattggaatacattcatatacgtggagat

SEQ ID NO: 551318 - DNA, 662 bp, Homo sapiens
cttctgggtgcacgtggttacactctgataccaacctgggctacaaagaatcagcggattccctcaccttatttactgagttttcaaataaaccaaatcttgaatctctatgaggcattcaagatgctacaggagagacagaacctggcccaggaccccattcctcagcagttgagccccattcaattttcctggagaatgagagcccctgaaagcatccagcaccctagagaaacattcgcctgaagtaatttttaaaatgagaacagagtctaaaaatataaatgagaattaagagctcgagctaagamgactcaggaaaggggattctggagaatcctctgagaagtagactgtttccttacttcctctaaaagctgtgtgtcccaactgaacagcaccacaccacctttatcaagctaacaggtctatcaccagcaccaaaggccagcctagtatgagagcgaagagaaggcatgcagacgggcatccctcctcatacctagagacatgcaggtggcaatctgtacattaatcttgcttgtttacaaatgctcaatttttcagctggactttctctacttccactcacttacttttggtgcaatttatcatcattaatctaggagagcaatagattaatggtctgagtggtagattga

SEQ ID NO: 551319 - DNA, 673 bp, Homo sapiens
agacaaaaagcaaaattataatacagagcgtaacttcaaccaaaagttggttctttgatagggctattaaaattaattaaaaatatatatagggaaaataagaaaagagggagaggggacaaaaaccaaagaatattaaagtgaaaatggtaacagaactacatatgctaaagagatttttggaaaaacaatgtattaagaggacattatgaatagctttgtgctagtaaaagtgaaaaccttgataaggagagaatgagaatgcaaaaaagtcctaaaaaaagttatatgaaattcagaccatgcaggaaaatcataatataacaaaatatgcttattccaggaatttgtttagtttaatattagaaaatctattgattatatgaatgtgtggatatattaargagaaaaattaattttctgaatgcacagagaaatgtaatcaattaaaaattaaatccttttatgaataaaaattgttatcttgataagaagtaatttcaacatatgtagagtaagaattattttcatggtaaataattttaaaaatacataacaaatacataagaaacatttttaaatattaggtgtaataaaaatgcttactgtccccatggttaatagtgtactaaaagttgtactcagaaaaataaagataaaaaggcaataaaaa

SEQ ID NO: 551320 - DNA, 1116 bp, Homo sapiens
tatatatatatatgttcaattaaatccctaagatccagggatttgcaataagcatgtaaataaatcccaaatattatgctgaaagtttaaaagaaatgctaattgataattagagaaatacaacttttccttagctttctagtaatctagaaacaaagaatgtttctaatatttagacagacactacaaagtaccttacaaggagagacktgtaaggatggcgtgactcaccagcagccctgggcttgtccacagtacccccatgatgaacagtaactccactgtgtaaatgctcatgaacaaactattacaggacttttccagtttagacacactgtattttctttcagacaattcttcaacttgtttacatagatcagcaataagattattccatttctctgaaaattgaccaaaagttgattctcaatacatccctatgtcaaagcagcaataacatataatgacttattttctatattttacatcctaacagatcatatcattttactgcttttgaaaaaatttttcccctttttggtggttcttagaattactttaaagggagactataagagaagttttaaagtttagtacctctttttagtcttttaattctgaaaagcagaagggcagagaagatcaatcaaattaaacacaacagcagggaggccacaatgaggtctccaggggtcttttagcaaacttcctaaaacatgtctcagctgtgtggaaataagattttacagtggtggtggtgcaggcctgtaatcctagccctttggaagcagaggcagggcagatcctttgagctaaggtcaacacagcagaaaccccccctcccctccccgaccccccagtcccatccccgtctccaccaaaaatacaaaagttagccaggtgtggtggcagacagctgcagtcccagctacttgggaggctgaggcagaattgcttgaacccaggaggcagatgttacagtgggccgagacggtgccactgccagcctggatgacagagcaatactccgtctcaaaaaacaaaaacaaaaacaccaggttaagagagaccccagaccttacagatacaagtttaacagggaccccaaagcaaaaa

SEQ ID NO: 551321 - DNA, 1116 bp, Homo sapiens
tatatatatatatgttcaattaaatccctaagatccagggatttgcaataagcatgtaaataaatcccaaatattatgctgaaagtttaaaagaaatgctaattgataattagagaaatacaacttttccttagctttctagtaatctagaaacaaagaatgtttctaatatttagacagacactacaaagtaccttacaaggagagacgtgtaaggatggcgtgactcaccagcagccctgggcttgtccacagtacccccatgatgaacagtaactccactgtgtaaatgctcatgaacaaactattacaggacttttccagtttagacacactgtattttctttcagacaattcttcaacttgtttacatagatcagcaataagattattccatttctctgaaaattgaccaaaagttgattctcaatacatccctatgtcaaagcagcaataacatataatgacttattttctatattttacatcctaacagatcatatcattttactgcttttgaaaaaatttttcccctttttggtggttcttagaattactttaaagggagactataagagaagttttaaagtttagtacctctttttagtcttttaattctgaaaagcagaagggcagagaagatcaatcaaattaaacacaacagcagggaggccacaatgaggtctccaggggtcttttagcaaacttcctaaaacatgtctcagctgtgtggaaataagattttacagtggtggtggtgcaggcctgtaatcctagccctttggaagcagaggcagggcagatcctttgagctaaggtcaacacagcagaaaccccccctcccctccccgaccccccagtcccayccccgtctccaccaaaaatacaaaagttagccaggtgtggtggcagacagctgcagtcccagctacttgggaggctgaggcagaattgcttgaacccaggaggcagatgttacagtgggccgagacggtgccactgccagcctggatgacagagcaatactccgtctcaaaaaacaaaaacaaaaacaccaggttaagagagaccccagaccttacagatacaagtttaacagggaccccaaagcaaaaa

SEQ ID NO: 551322 - DNA, 1913 bp, Homo sapiens
tgagtcccaggtttccggactccacacctggtggccgacgcagctagctacctagtccacagccattctccccttcctctccctcaaagccaaaggtggttacacaacacagtacagcccatgacaggcatcttcagagtggggcttccaggacagctactgctttcctgttgggcctggtggctcttcactgtacctttccccttccctatattcctccctggggcacaaagttctgcctgaaggtgtagcagcaggtatttgtgaccctgaggatgaaggcacctggtgaggatgtcaacayagggagctggaaggaccctggtcccctatagcctcaccacagccccagcagtgggaccatcatggatcctgacctttgggcttctcattactcaaggaatagaaaaaccccaaaccgtgtttgcttaagaccctcttgtcaggtttctaagtctttattatttgcaattataactgataatttcctatgtcctctgggaatttgggtcatgggtggagttttctggcgagaagaagggctcagggactctctaatttcatcattttgcccagggtccagtttcctctgaagtttgcaaggacacatggaaggtcagcagaaacttggccatctcagtgtcctggtgggtgatttttacgaggatttctcatcacagaggatgggaacccaaaggagaatggccgccattggagcctttcctgtccctccactgctcaaaacaactgaactctgtgtcagttgggctgcaagtaaagaaaactcaactaatggaggcctcattgaacaggagttcattttactcacgtaacaaacctatgtggtcccaggattgtctcacggcccagtaaaggcaaagcatggcgttagcaagtctgagatgttcttgaatttccccccattgctgcaagatggcccctacagctccaaacatcacatcctcaatggtgaataaagctgatctccaactgggaagaacctctgtctcctggtgtggtgaaggctgttggagcatctgcaggagcatccaaaccctgtgctattggggtagtccatgcccttcaagccagtcatggctttcctgtttcctctgtcaaatactggctaaggataggtctgtgatgcaattctggccagtgagacatgatggaagagctgctgggtgaaattctgggaaaagttcccttactctttagaagatggatccaggagaagagagtctcttttgctgagtgttgtcatatctggaggtgatgcctggaactgtggcagctgacttgtgattatgagggaagctggcctgaaaacagactggcccactgaagaggagggcagcatggaatgtggaataaacctgggtccctgttggcttcctgcggccctgatctaaccagccctgagctgtcctacctctgcactgcttggcacaggagacacatcttgattgtttaagcccctttgagttgggttttctgttccttgcagctgacagcactctaaccaatccacacatttccctctgctcgatttcctgctccagagagacaggcacagaccagtaccgggcagccccactctggggaaaaacaacagtgcttattgtttgccggcacagtgggagctctgcctcctggcacagtgggagctctgcctcctgtggcaggctggccattccaaaaccacactgcctgccactgccataaagaggccaggactgtgttcaaaaccccaggcagcaggaggagtggtttgtgggaggtgttgtggtagtgcataaaggaaggtcatttcctgaccctcagaacccacactgccctcagccccacacagccctacccagcccagcatcgcccccagtgcccctggagacaataatggcagccacccactg

SEQ ID NO: 551323 - DNA, 575 bp, Homo sapiens
aaaatagtctaaaacagaagctcaggtattgcaaatgatgaaagaaaaattcctcttacctaggaccaccttactgcattcatccaggagtataagagatcggtgattcatggcagctagtacttcaaacatgtgttggctattcaaaacagaaaatctgtctaattccctcaaggctttcatctaaagaaaaaacaaattttaatttaatttactatctgtgacaaaataaattaaacttttatttttattgagacagggtcttgtgctgtcacccaggttggagcctcaacctcccaggctcaagtgatcctcctgcctcagccgcccatgtagctgggattacaggcatgcaccacctacaggcatgtaccaccacgcctggctaattcyttgattttttttttttttttttttttttttgcagagacagggtcttgctcagtcacccaggctggtctcaaactcctgggatcaagagatctccctgcccttgacatcccaaagtgctgggattacaggtgtgagccaccatgtctggcctaaacatttatttttaaacaaaaaggatgaag

SEQ ID NO: 551324 - DNA, 1721 bp, Homo sapiens
gactgtttcttaattattagtcgtgggtttcccaatcattaaaatactggtttctagaaacccaaaggccacataacaggcttttgtagcatatagaaattaatccagtttttaaatrgagggctttgaaagaattttaaaattctgtttctggaatcttaaccagaatctccataacattttttagaactgaactgacgtggagtttcggttaaatgcaaaaattaagaaatgtcaagaaagatatttaagttaggtaacaaaatataaaaaagggagcttaagttaaaagtaaagtgaaaaataagagacagacaatattcaggacatgaatgagaaaccagaaataagatataaaacatttcaggtagtagtttaactaagtaggtaggtaacaagagaagcttaaacaaaaccaggaacctttacaccaagcttgtccaacccatggtccatgggctgcatgaggccctggacagctttgaatgtggctcaacaaattcataaactttcttaaaacattatgaaaattttttgcctgtttttcttttttttcttttttcttttttctctcttttttttttttttttagctcatcagctatcattagtgttagtgtattttatgtgtgatccaagataatttttcttccagcgtggcccagggaagccaaaagattggacactcctgctttagacaggtatatacatccacaagcagttgtaaaatagcagatttgtatctacctacatttatataacattttaaatataacaatataacaatactaaatttaacaatattaaatttaacagtactacaacattttaatatttcttttaggaaactgttttattaaagtatgatatagtaaagtgcagcttaaggagcttctatatgtatacgcacgctgataaccacaaaattaagatataagacattgcaaaatgttctctcttgcccatctcagcgaatatcctcctcacccatggtaaccctgattctctcttacctattacagtcattctgccatttcttgaacctcatatatacaaaattatacagtatgtatttttgtgtacccgtcttctttttcttgtctttatatctgttataaatatcacatcttatttatccatgctattgagtgtaacagtagttcattatttatttctaagtagcgtgctattgtttaggtccaccacaaattacttatataagcatgctaatggtaaggggcggtgcaaacctctcattcccactacacaggttattcaagcatgtcctccagtctcttttgccacctctgatctccaaaggacaaaaaacagtggtgagaccaaaagcagaagattcccaacttttatgcagtagaatatattacctcttttttcttcacattttttcttcacatttcaatgacttttttcttcacatccaatgatgaataaattaaaccaatgacctcagatatcaaaacctacagagaaccactcttttccacccttaacgtaatagcaggattcaacaacagatatacatacatcacctctgacagctgtggacaaaagaataggaagagagaagggactctctggtaatggagatattttagccattcttcaggtggcaggacacatgcatttgggaacacgcaagcaggcagtcacatattgatggatgtgacttgaaaaggatgtctctaagggtgttatttgatc

SEQ ID NO: 551325 - DNA, 1721 bp, Homo sapiens
gactgtttcttaattattagtcgtgggtttcccaatcattaaaatactggtttctagaaacccaaaggccacataacaggcttttgtagcatatagaaattaatccagtttttaaatagagggctttgaaagaattttaaaattctgtttctggaatcttaaccagaatctccataacattttttagaactgaactgacgtggagtttcggttaaatgcaaaaattaagaaatgtcaagaaagatatttaagttaggtaacaaaatataaaaaagggagcttaagttaaaagtaaagtgaaaaataagagacagacaatattcaggacatgaatgagaaaccagaaataagatataaaacatttcaggtagtagtttaactaagtaggtaggtaacamgagaagcttaaacaaaaccaggaacctttacaccaagcttgtccaacccatggtccatgggctgcatgaggccctggacagctttgaatgtggctcaacaaattcataaactttcttaaaacattatgaaaattttttgcctgtttttcttttttttcttttttcttttttctctcttttttttttttttttagctcatcagctatcattagtgttagtgtattttatgtgtgatccaagataatttttcttccagcgtggcccagggaagccaaaagattggacactcctgctttagacaggtatatacatccacaagcagttgtaaaatagcagatttgtatctacctacatttatataacattttaaatataacaatataacaatactaaatttaacaatattaaatttaacagtactacaacattttaatatttcttttaggaaactgttttattaaagtatgatatagtaaagtgcagcttaaggagcttctatatgtatacgcacgctgataaccacaaaattaagatataagacattgcaaaatgttctctcttgcccatctcagcgaatatcctcctcacccatggtaaccctgattctctcttacctattacagtcattctgccatttcttgaacctcatatatacaaaattatacagtatgtatttttgtgtacccgtcttctttttcttgtctttatatctgttataaatatcacatcttatttatccatgctattgagtgtaacagtagttcattatttatttctaagtagcgtgctattgtttaggtccaccacaaattacttatataagcatgctaatggtaaggggcggtgcaaacctctcattcccactacacaggttattcaagcatgtcctccagtctcttttgccacctctgatctccaaaggacaaaaaacagtggtgagaccaaaagcagaagattcccaacttttatgcagtagaatatattacctcttttttcttcacattttttcttcacatttcaatgacttttttcttcacatccaatgatgaataaattaaaccaatgacctcagatatcaaaacctacagagaaccactcttttccacccttaacgtaatagcaggattcaacaacagatatacatacatcacctctgacagctgtggacaaaagaataggaagagagaagggactctctggtaatggagatattttagccattcttcaggtggcaggacacatgcatttgggaacacgcaagcaggcagtcacatattgatggatgtgacttgaaaaggatgtctctaagggtgttatttgatc

SEQ ID NO: 551326 - DNA, 1721 bp, Homo sapiens
gactgtttcttaattattagtcgtgggtttcccaatcattaaaatactggtttctagaaacccaaaggccacataacaggcttttgtagcatatagaaattaatccagtttttaaatagagggctttgaaagaattttaaaattctgtttctggaatcttaaccagaatctccataacattttttagaactgaactgacgtggagtttcggttaaatgcaaaaattaagaaatgtcaagaaagatatttaagttaggtaacaaaatataaaaaagggagcttaagttaaaagtaaagtgaaaaataagagacagacaatattcaggacatgaatgagaaaccagaaataagatataaaacatttcaggtagtagtttaactaagtaggtaggtaacaagagaagcttaaacaaaaccaggaacctttacaccaagcttgtccaacccatggtccatgggctgcatgaggccctggacagctttgaatgtggctcaacaaattcataaactttcttaaaacattatgaaaattttttgcctgtttttcttttttttcttttttcttttttctctcttttttttttttttttagctcatcagctatcattagtgttagtgtattttatgtgtgatccaagataatttttcttccagcgtggcccagggaagccaaaagattggacactcctgctttagacaggtatatacatccacaagcagttgtaaaatagcagatttgtatctacctacatttatataacattttaaatataacaatataacaatactaaatttaacaatattaaatttaacagtactacaacattttaatatttcttttaggaaactgttttattaaagtatgatatagtaaagtgcagcttaaggagcttctatatgtatacgcacgctgataaccacaaaattaagrtataagacattgcaaaatgttctctcttgcccatctcagcgaatatcctcctcacccatggtaaccctgattctctcttacctattacagtcattctgccatttcttgaacctcatatatacaaaattatacagtatgtatttttgtgtacccgtcttctttttcttgtctttatatctgttataaatatcacatcttatttatccatgctattgagtgtaacagtagttcattatttatttctaagtagcgtgctattgtttaggtccaccacaaattacttatataagcatgctaatggtaaggggcggtgcaaacctctcattcccactacacaggttattcaagcatgtcctccagtctcttttgccacctctgatctccaaaggacaaaaaacagtggtgagaccaaaagcagaagattcccaacttttatgcagtagaatatattacctcttttttcttcacattttttcttcacatttcaatgacttttttcttcacatccaatgatgaataaattaaaccaatgacctcagatatcaaaacctacagagaaccactcttttccacccttaacgtaatagcaggattcaacaacagatatacatacatcacctctgacagctgtggacaaaagaataggaagagagaagggactctctggtaatggagatattttagccattcttcaggtggcaggacacatgcatttgggaacacgcaagcaggcagtcacatattgatggatgtgacttgaaaaggatgtctctaagggtgttatttgatc

SEQ ID NO: 551327 - DNA, 1721 bp, Homo sapiens
gactgtttcttaattattagtcgtgggtttcccaatcattaaaatactggtttctagaaacccaaaggccacataacaggcttttgtagcatatagaaattaatccagtttttaaatagagggctttgaaagaattttaaaattctgtttctggaatcttaaccagaatctccataacattttttagaactgaactgacgtggagtttcggttaaatgcaaaaattaagaaatgtcaagaaagatatttaagttaggtaacaaaatataaaaaagggagcttaagttaaaagtaaagtgaaaaataagagacagacaatattcaggacatgaatgagaaaccagaaataagatataaaacatttcaggtagtagtttaactaagtaggtaggtaacaagagaagcttaaacaaaaccaggaacctttacaccaagcttgtccaacccatggtccatgggctgcatgaggccctggacagctttgaatgtggctcaacaaattcataaactttcttaaaacattatgaaaattttttgcctgtttttcttttttttcttttttcttttttctctcttttttttttttttttagctcatcagctatcattagtgttagtgtattttatgtgtgatccaagataatttttcttccagcgtggcccagggaagccaaaagattggacactcctgctttagacaggtatatacatccacaagcagttgtaaaatagcagatttgtatctacctacatttatataacattttaaatataacaatataacaatactaaatttaacaatattaaatttaacagtactacaacattttaatatttcttttaggaaactgttttattaaagtatgatatagtaaagtgcagcttaaggagcttctatatgtatacgcacgctgataaccacaaaattaagatataagacattgcaaaatgttctctcttgcccatctcagygaatatcctcctcacccatggtaaccctgattctctcttacctattacagtcattctgccatttcttgaacctcatatatacaaaattatacagtatgtatttttgtgtacccgtcttctttttcttgtctttatatctgttataaatatcacatcttatttatccatgctattgagtgtaacagtagttcattatttatttctaagtagcgtgctattgtttaggtccaccacaaattacttatataagcatgctaatggtaaggggcggtgcaaacctctcattcccactacacaggttattcaagcatgtcctccagtctcttttgccacctctgatctccaaaggacaaaaaacagtggtgagaccaaaagcagaagattcccaacttttatgcagtagaatatattacctcttttttcttcacattttttcttcacatttcaatgacttttttcttcacatccaatgatgaataaattaaaccaatgacctcagatatcaaaacctacagagaaccactcttttccacccttaacgtaatagcaggattcaacaacagatatacatacatcacctctgacagctgtggacaaaagaataggaagagagaagggactctctggtaatggagatattttagccattcttcaggtggcaggacacatgcatttgggaacacgcaagcaggcagtcacatattgatggatgtgacttgaaaaggatgtctctaagggtgttatttgatc

SEQ ID NO: 551328 - DNA, 509 bp, Homo sapiens
attccttctctatgatgactgatttccctcacaggcccaggtacccaggagataatggtttggctgtgtccccaccaaaatctcaccttgaattgtaataatccccacatgtcaaaggcgggccaggtggagataactgaatcatgggggcggttttccccatactgttttcctggtggtgaatggaagttcctctgcacaagctctcttgcctgccaccatataagacatgactttgcttctaatttaccttccaccataatgacaaggcctcctcagccatgtggaactatgagtcatttaaacctttttcctttataaattactcagtctcaggtatgtctttattagcagtgtgagaacagamtaatagactagggaagcagctctgtggttccatgtatggaggatgaaaagctaataaattgttggacctgcccagacactaatccatagaaaaatgtggcaagagaggaacttcctgccaggatggtttaaagatccaagag

SEQ ID NO: 551329 - DNA, 642 bp, Homo sapiens
caacaaaatatacaacaaacctggctggagagacgaccaaaggggactgggctatccttttccctgtattgcctactcaggtcagaaaattaaataattggccaataggattgggcaacattataggccaatgtgagcaccatggccccaccagctattcagcgggagagggcaggggctcaggaagccacaggaattaggcgtatgatgaaatgtctttatctgcaatgtcaacacacaaaaagggaatgttgaaatggatgctcccctctgaagctgcatggattttatgttcaaagactcaagaggaaacggacagggatgaaatgtttgcacttgtttcgtctggagaaaagctccaagccaccaccctctgcagtcacacagtcacactatgggcaggctcctcacctttttgagttcgtgtcatgttttagttactagaatatctggctgtgtgtttggagggattaaactgtgcacatagaatgcaattcccctactctcctatcacccctgggtccctgcttgagtagaactggaagaggactgcactgacctctttctcttacatacccatgaaccaaatattcacactatctggcaaatgtgtgktgtttctctgtcactgcttgtattttg

SEQ ID NO: 551330 - DNA, 513 bp, Homo sapiens
tctactgcttactactagaggtaataaatctattctggtttaatagtctctacatttcttggtaatattatttcgaaagttttaaacaggtgrtgtgtttcccctttagggttgttattttgcttgagataattttctacttagtattttcaattagtagcttaaaaaaacgcattttagaaatagtctaccataaaattctgaatgtcatcccccgctgagtttgcttccctagtctataaaactaaaggacgtttccatttttaaccgattttaccttctgaacacttttttaaaagaatgctgcaaagatcacacttcaaaatacatttacaacaattacaaaggtaagatatgagggaaaaaaaatcaagatacagaacaatgtgcacagcctacttacatctgtctaaaaaatagttatataagtatgtacagccatcaactatctctggatggatacaaatgggaaacactgacttattattatatactattttcaacacttgagtt

SEQ ID NO: 551331 - DNA, 1308 bp, Homo sapiens
tgccttagccctgttccaaggcaaaggctgcaattccgccttgggaaagggaccccaacactggcattgcactcctgacctgggctgtcatcccagctgattccaccctcagccccacagagctgtgaactcaaggcctggcctcaggcgctgccacaaaaaaaaaaaaagaaaaaaaawatatatatatatatcctgcccagtgtcaaggtacacaagataaaaataaaagcaataatattcttttcaaaaatagaaaaaattttgagcagggcgtggtggctcacacctgtaatcccagcactttgggaggctgaggcgggtggatcacctgaggtcaggagctcgagaccagcctggacaacatggtgaaaccccgtctccacaaaaacacacaatttagctgggtgtgttggtgcgtgcctgtaatcccagctactcgagaggctgaggcaggagaatcacttgaactgaagattaactgaatcaacatgccagacaaaaatggtttccaaactctggtgaataaacatggtgatgtgttagaagcctttgttgttattgtcctttttcatatcactagtactgaagccctctttttcttttttttttttttttaattctggcaggtatgtatctttttttaaaaaacaaaaaaatgtggaaagaggaacaaatattataagaagttacccccaagccccttccccactaaaaagaaaccagcaaaactagtaattgtgaaactctcaccacccaaggacatacaatgctagctgcagttttcttgcctgctctcaagccctgagcttgatcaatatttaaatacgtacttggctttcaacttctctaggttcaaatattaagcaaagtgtttgcttcagcaaccttaaaagaagccgtgactatctgaggcaggaagctatcagttgtgtaaataaccctttgcacctgattgatttcactgctccagatataggtcactcaggacattgctggcactaagcttggctgggacagcatttgttttgaattcaaagactatatattctctacagacaagggacattcagccagcaagaaaccaggctggccattcagttagggaaattctaactgcctagtgagtattatgccaatgtcctagctcagctctgtcttttctagagattcaatccccattcatccttacatacttcactccagatagacctcctccataaatccttacattgtcctggtttctgctaccctctgaattttggcaaagcataatggccttactacacagtgtagcacctgattata

SEQ ID NO: 551332 - DNA, 1308 bp, Homo sapiens
tgccttagccctgttccaaggcaaaggctgcaattccgccttgggaaagggaccccaacactggcattgcactcctgacctgggctgtcatcccagctgattccaccctcagccccacagagctgtgaactcaaggcctggcctcaggcgctgccacaaaaaaaaaaaaagaaaaaaaaaatatatatatatatcctgcccagtgtcaaggtacacaagataaaaataaaagcaataatattcttttcaaaaatagaaaaaattttgagcagggcgtggtggctcacacctgtaatcccagcactttgggaggctgaggcgggtggatcacctgaggtcaggagctcgagaccagcctggacaacatggtgaaaccccgtctccacaaaaacacacaatttagctgggtgtgttggtgcgtgcctgtaatcccagctactcgagaggctgaggcaggagaatcacttgaactgaagattaactgaatcaacatgccagacaaaaatggtttccaaactctggtgaataaacatggtgatgtgttagaagcctttgttgttattgtcctttttcatatcactagtactgaagccctctttttcttttttttttttttttaattctggcaggtatgtatctttttttaaaaaacaaaaaaatgtggaaagaggaacaaatattataagaagttacccccaagccccttccccactaaaaagaaaccagcaaaactagtaattgtgaaactctcaccacccaaggacatacaatgctagctgcagttttcttgcctgctctcaagccctgarcttgatcaatatttaaatacgtacttggctttcaacttctctaggttcaaatattaagcaaagtgtttgcttcagcaaccttaaaagaagccgtgactatctgaggcaggaagctatcagttgtgtaaataaccctttgcacctgattgatttcactgctccagatataggtcactcaggacattgctggcactaagcttggctgggacagcatttgttttgaattcaaagactatatattctctacagacaagggacattcagccagcaagaaaccaggctggccattcagttagggaaattctaactgcctagtgagtattatgccaatgtcctagctcagctctgtcttttctagagattcaatccccattcatccttacatacttcactccagatagacctcctccataaatccttacattgtcctggtttctgctaccctctgaattttggcaaagcataatggccttactacacagtgtagcacctgattata

SEQ ID NO: 551333 - DNA, 1308 bp, Homo sapiens
tgccttagccctgttccaaggcaaaggctgcaattccgccttgggaaagggaccccaacactggcattgcactcctgacctgggctgtcatcccagctgattccaccctcagccccacagagctgtgaactcaaggcctggcctcaggcgctgccacaaaaaaaaaaaaagaaaaaaaaaatatatatatatatcctgcccagtgtcaaggtacacaagataaaaataaaagcaataatattcttttcaaaaatagaaaaaattttgagcagggcgtggtggctcacacctgtaatcccagcactttgggaggctgaggcgggtggatcacctgaggtcaggagctcgagaccagcctggacaacatggtgaaaccccgtctccacaaaaacacacaatttagctgggtgtgttggtgcgtgcctgtaatcccagctactcgagaggctgaggcaggagaatcacttgaactgaagattaactgaatcaacatgccagacaaaaatggtttccaaactctggtgaataaacatggtgatgtgttagaagcctttgttgttattgtcctttttcatatcactagtactgaagccctctttttcttttttttttttttttaattctggcaggtatgtatctttttttaaaaaacaaaaaaatgtggaaagaggaacaaatattataagaagttacccccaagccccttccccactaaaaagaaaccagcaaaactagtaattgtgaaactctcaccacccaaggacatacaatgctagctgcagttttcttgcctgctctcaagccctgagcttgatcaatatttaaatacgtacttggctttcaacttctctaggttcaaatattaagcaaagtgtttgcttcagcaaccttaaaagaagccgtgactatctgaggcaggaagctatcagttgtgtaaataaccctttgcacctgattgatttcactgctccagatataggtcactcaggacattgctggcactaagcttggctgggacagcatttgttttgaattcaaagactatatattctctacagacaagggacattcagccagcaagaaaccaggctggccattcagttagggaaattctaactgcctagtgagtattatgccaatgtcctagctcagctctgtcttttctagagattcaatccccattcatccttacatacttcactccagatagacctcctccataaatccttacattgtcctggtttctgctaccctctgaaytttggcaaagcataatggccttactacacagtgtagcacctgattata

SEQ ID NO: 551334 - DNA, 610 bp, Homo sapiens
cccattactcatgcctgggccccacccctggagatattgattcagccgatccagggtgaatcccagacaatgctccccaggtaattctgttagactcctccctgactctgcccttgggaaataacagcataacttgaattgccttctgaagagctactcttggcaatggcttctagggagccactttctcattggccactggtcttagtcacccagtcctgcgaggaattgtactatgcatcacaatctcagaatcacaataatggcaaccagtacttatgcttaacatattccaggcacacttctaagctctaacataattcctttaatcctcataacaacactgttagatactagaggtgtctcctttttgtcaaggaagaaactaayaggtgctaaagcctagattcaaacccagcccatattctttttatttatttatttatttgagacatgttctggctctatcacccaggctggagagtggtggcccccatctcaggatcactgtaaaacacacacgataccaaagctcacagtagatacctcccacctcagcctactgagtagctgggactacaggcacgtaccaccacacccggctaatttt

SEQ ID NO: 551335 - DNA, 650 bp, Homo sapiens
acttgaaaatcttaaaaacgctcaaccttcaccgcaaaataatgcacactcactcatattccccaaattgtggatttattttcagggggctcttggctacctcaaagccagtcacttgcatttcctggtagcaatagcatacataagtttagtgaccacttaattcttattattaatgggatgatttgtcttgattcaattgtatcacatgacctaagattaagagatgattgtgttctgaagtagaagtcagtaataaacccctattatttatttatatatwtattttttttttttttgagactgagtctcactctgtcaccgaagctggagtgcagtggcacgatcttggctcattgcaacctctgcctcccaagttcaagagattctcctgcctcagcctcctgagtagctaggattaaaggcactcgccaccacgcccagctaatttttgcatttttagtagagacagggtttcaccatgttggccaggtggtctcaaactcctgacctcaaatgatccaccatcctcagcccctcaaagtgctgggattacaggcatgagccactgcgcccagcctaaaaccctaattttagaaaggagctttacagatccttctcctcctgacccaatttgtccatagcatttc

SEQ ID NO: 551336 - DNA, 650 bp, Homo sapiens
acttgaaaatcttaaaaacgctcaaccttcaccgcaaaataatgcacactcactcatattccccaaattgtggatttattttcagggggctcttggctacctcaaagccagtcacttgcatttcctggtagcaatagcatacataagtttagtgaccacttaattcttattattaatgggatgatttgtcttgattcaattgtatcacatgacctaagattaagagatgattgtgttctgaagtagaagtcagtaataaacccctattatttatttatatatatatttwttttttttttgagactgagtctcactctgtcaccgaagctggagtgcagtggcacgatcttggctcattgcaacctctgcctcccaagttcaagagattctcctgcctcagcctcctgagtagctaggattaaaggcactcgccaccacgcccagctaatttttgcatttttagtagagacagggtttcaccatgttggccaggtggtctcaaactcctgacctcaaatgatccaccatcctcagcccctcaaagtgctgggattacaggcatgagccactgcgcccagcctaaaaccctaattttagaaaggagctttacagatccttctcctcctgacccaatttgtccatagcatttc

SEQ ID NO: 551337 - DNA, 650 bp, Homo sapiens
acttgaaaatcttaaaaacgctcaaccttcaccgcaaaataatgcacactcactcatattccccaaattgtggatttattttcagggggctcttggctacctcaaagccagtcacttgcatttcctggtagcaatagcatacataagtttagtgaccacttaattcttattattaatgggatgatttgtcttgattcaattgtatcacatgacctaagattaagagatgattgtgttctgaagtagaagtcagtaataaacccctattatttatttatatatatattttttttttttttgagactgagtctcactctgtcaccgaagctggagtgcagtggcacgatcttggctcattgcaacctctgcctcccaagttcaagagattctcctgcctcagcctcctgagtagctaggattaaaggcactcgccaccacgcccagctamtttttgcatttttagtagagacagggtttcaccatgttggccaggtggtctcaaactcctgacctcaaatgatccaccatcctcagcccctcaaagtgctgggattacaggcatgagccactgcgcccagcctaaaaccctaattttagaaaggagctttacagatccttctcctcctgacccaatttgtccatagcatttc

SEQ ID NO: 551338 - DNA, 646 bp, Homo sapiens
ccatgcattggcatggtatctatcactaatagattgtcatcacagtgactgatataagaagacaaacattaacagtcggtgaataaatatctgactttctcatagttggtacatttttctagggctttcttaatgacactgacacttttagaaatccctcttaggattttgcttttcctttcccaatgtgaatttgtggaatatttagcttttttctactacatagagagaaaggatagacagattcttgcccaacacactgtagwgcatgtagacctagaccttcctttcaattccttgcccaagcccttcccccatatgaggatacttttcgttttctactcaaactcattcaagcttcaccatgctccctccccctaggtaaagctttctgaaagaatgggtttcacactgacagtgatttctgagcctctcatttggatggagttttgttcactaaaatgtgtctagtaaaaacagcatagagaagctttagtgaatgctgaaaccagagtacttggggggatttagtcttatttggaatatttgttccgcttgattaaattctacctgtgttcttgcctctattttttctttctgttcttaataatattgagttatttttccactgcattctatctttcct

SEQ ID NO: 551339 - DNA, 923 bp, Homo sapiens
taaaaatgaaaaaagagccaccccgagtacaccatggtaacttagttcaactaaaaggaaaaaggacatattaaaaaagtgcccaggcagaaagactatattgtataatatagaacaaacgctagactgacttagacaggaagactatgaagttttgaaatcattttatactcaaagttatctttcatatgtgaaggtagtagagagacattttcagatatgaaaacacttataccacaggcacacttcccatatttttaaaaagaaattttaaaaatttcttgatgaggtcagttcagctgactgatagatgaattaaaattagcaattaaaaatgaagaattaaaaaggcattggaaacaattagacgtagtgaaatctaaatcattattgtcaattttattgtcaaactaaaggtagaagtgtccatttagttttgatagaatttaacagcaccatggatctgcagcttcaggttatattaatgcctgaaataggtggagaggcaggagcatataggagatcctaaataatagtttttcttcaagaagatttaaaaaataccaacttctggtgagagtgatatttcgtattccattgccttcacttactatcagtgtactgttaactcctcaaacatctgtctctgctgagaaaagtctcctaagttctagacccactggccaagtggatagctctcttgggatggcccattagcagctccatttcaccgtgtttaaaacggaactcctcttccctgcttgaacctgttctgtggtcccaagctctttcaattttagagtgaccagatatgacagttttttcactattagcctctttcactctcaaaattagtttggacaataaattatgggsctaccctgatcatcttgtcttttttactttcaactcgtatccaaaca

SEQ ID NO: 551340 - DNA, 617 bp, Homo sapiens
atgcaaaaatatctattcatatgatgataatacattcctttgaagttccatctcttcctactgcaggagagtaatgttgtaagtatttaaacagtataaagggatgaacttaaaatatttttatttttaataactttcagaaaaccatgttctgggacttatctcttatgacttattgcaaaaaatgacatgccagcacacaagtgactcatgtagttctttgtaacatccattctgcccagaaaattatctagcttggaatttagattaaatcctgatgtgtaacagaagagagaaatagtttgcaaatatttggccaaggagtatttttaaaaaatacacctactgaactatgggattttaaattctgtaatgttacagagtctttttgtgtgtgtgtgtatgtgaaattggtttggagacagggcctgggactcacagtgtagggttgaggcttaagtgattaaatcccattatgtagggttcagtatgaagcctgggcaatgatggcagcttakgtatacacagcacattagagttcacgaaatacttctatctgctctacttcactaatcttcgcagcatctctatgatataggtagaaaatgctgcactac

SEQ ID NO: 551341 - DNA, 617 bp, Homo sapiens
atgcaaaaatatctattcatatgatgataatacattcctttgaagttccatctcttcctactgcaggagagtaatgttgtaagtatttaaacagtataaagggatgaacttaaaatatttttatttttaataactttcagaaaaccatgttctgggacttatctcttatgacttattgcaaaaaatgacatgccagcacacaagtgactcatgtagttctttgtaacatccattctgcccagaaaattatctagcttggaatttagattaaatcctgatgtgtaacagaagagagaaatagtttgcaaatatttggccaaggagtatttttaaaaaatacacctactgaactatgggattttaaattctgtaatgttacagagtctttttgtgtgtgtgtgtatgtgaaattggtttggagacagggcctgggactcacagtgtagggttgaggcttaagtgattaaatcccattatgtagggttcagtatgaagcctgggcaatgatggcagcttatgtatacacagcacattagagttcacgaaatacttctatctgctctayttcactaatcttcgcagcatctctatgatataggtagaaaatgctgcactac

SEQ ID NO: 551342 - DNA, 598 bp, Homo sapiens
aaggcattaatttagctaaatctaaattgagaattcagaaaatgagaatccatccactgagcactgattaagttcaacacaagcctttggtgccttcactaaagaatatccagaagaaagaatgaagacccctttcttggtcaggtcagtatttagaaactgttttttcttcgtatttaccatttctctgtgttggtatcatttcaagtcctcgcttcccgttagtatgaaatacacaaagtactgttgctgagtatagtcaccctattttgcaatcaaacatagaagaaacttatttcctctgtttaatgtttgtgcccattttacgggtaccccacaygtttgtacccattgtgctactctttattcccacaactttccttccttcccagtctctcatatctatcattctactcttcatgtctttgacatcaaattttttagctcccacatataagtgagaacatgtgatatttgtctttctgcacttggcttatttcacttaagataatggcctctagttcctcccatgatgctgcaaatgacatgatttcattctttttttatggctgaatactattccgtagtgtacatataa

SEQ ID NO: 551343 - DNA, 811 bp, Homo sapiens
atatatacgtatgtatacacatatatgtatatatgacatataagtacatatatgtatgtatgacatatatgtatgttacatataagtacatatgtgtatgtatatgatacgtgtatgtatatatgacatataaatacatatacgcacatatgtaatatatattatatatatacacacacacatacactcatatagtttgagtatctcaaattcagaatgctccaaaatctgagactttgtcaacgtgatggtcaaaggaagtgttctttggagcttttgggatttcagattttcagatttggggtgcttagctagtaatgcagatattccaaaatcccaaaaaccctaaatccaaaacacttctggtctcaagcatttcgaataagggatacttgacatatatatgtatatatatatagttcagagtatattctatatgtagttttgtattctcctttttcctctaaagctcatatcgcacatttctgtgggatccaggtaaaaaatctccacccaaccatagcacaacacagatttatatcagaaaagtagctaatttttgactgccaggattaagctgcttttgacaaagttatatgtttagcccatgtgttcctgatggttagcttcctcwttatgatcatgcactacaaatggagggggattctcttttgtattttctcttaggtagttcgaggacactacaaaggtcagcaaattggcaaggtagtccaggtgtacagaaagaaatatgtcatctacatcgagcgggtgcagcgtgagaaggccaacggcacaactgtccacgtgg

SEQ ID NO: 551344 - DNA, 1986 bp, Homo sapiens
aacagaatcactataggcccaacacaaatgactcctgaaagtcttcctaagacactaagaacagaggtcacacacatacatatttatactgccagattaatactctgtattttgaaaaacatggccttgtgttgggatgcattgcttccaactcttttgtagagtagcattttctttaaaaagtaacagacaatgacataagttgtcatgttgacaatatgcttcaggaacgagaaatatccttgttgtttgggagattgaaaggtaaactgtcaagactaattctgaaataacactttttttctggaaagctttcatgtcaaacaactaatgtgctgtattttcaagagggaaataataataacaattcattaatacagcccaggcattaatgaatgtgtcaaacatttgtacactgagaatgctttttgccatagactttttagcagacacattttattaaatcaagaactttccctaatctatttatttgcaatgaaaattttaaatcatgaatgactctatcagattctatgaaattatatctcttttcatattaagataatcatgcaggtttcttttttaattaattaatacaaaaccatcacccaaccaacccgagaactgtgacatcgacaatacctatgttaaccctgtttagcctgtcctttacttctccccaccaagtatactcaatcctaaattgtttattgtgcccttgctttttaaaatataattttataattatgaatgtactcctaaataataatatttagtcttgtcataaaatttataaagaatttcatacaggaatcttctggaacttgtttctaaaactcaatattatattactaaggttcaactaaatgtttgtttataaagttactttatttttactgcaccataacattccatatatgcataaatgacaatatatttatctcttctcctgtcattagtatttgattgtttccagtttttggcttttaaaatcagtgtgaggaacgttcttatacttatcgcttggtaaagatactcaaaatttttacttgaaaatatatctaggagtaagatgtttttggttgatgagtatacgaatgtttaactttacaagataagaacaattttcaaatatggttttgccaatttgtgctaccaccatcaagatatctacatccttcagctttaatttcctaacttggtgattaccattagaagatttttttcaagtgaaaacattttatgcatttctgaaataaattttcctttactagaaaacatatttaaatgttgatgtattctatttgctaatattctattaaagacttctacatcattgttcacaaggaagattctcaatcaattttttttcttgtactctctttatccacttttggtgccaggaagtcatggtttaacaaaagaatttgcgaagcttcactctctgtcttctgtggagtagtttgtgtaacacagagaatatatgttttctgaaagctataaagtctaattcaatatctttaattataagtctattcaagattccttttctttttcccttgctttttctcttgaacatatatatgggttttcaacttctctgagtaagttttggtaatgtttcttttactataacaatttttactacattttaaatgcattggcataaagatgtttatattaaattttttctacttagtccatatttcagcctactttttcatagtgaatattttttctttctttattctcttggataattttgtcaacattttaaccatttcattagttttcttcaaagaaccaccttctaaacctagaaataaaaggcgatttcttttaatgartaacagatttcctattcacttttacagcaaaattaaatgcagggtgaaattctggaagaatctccttcaaatcagatagcaggtatcatgttccaacaacctcttgtcttaaacgctatactgaagactttatataaaa

SEQ ID NO: 551345 - DNA, 513 bp, Homo sapiens
tttattcatctgtaaaatgagagaactgaaaatctctgtatgacaatccctgccaacaagtcaccctatttacacactatgatgttcatatttaaaattactatttaattgggtatggcctcatcagcatatttgggagctacagctattttaatccagcatgagaaaaattactaaaagtcagcactaaaaggagtttagcagtggttttcaaatatttcttatcctctgaacctttcgaattaaatcacaaaaagaacraagtatttaaaataaatcagggttattcttacatagctcagaaaaaatacacacatccctcaaacatatatgtatggggatataaatatatatgtacattacggtggctcacgcctataatcccagcactttgagaggccgaggtgggcagatcacctgaggtcaggaattcgagaccagcctgacaacgtggtgaaaccctgtctctactaaaaatacaaaaattcgccaggtgtggtggtacacatctgt

SEQ ID NO: 551346 - DNA, 900 bp, Homo sapiens
ttttttttcttttgagaaggattcttgctctgtcacccaggctggagtgtagcacgatctcggctcactgcagcctctgcctcctgggttcaagtgattctcctgcctcagcctcctgagtagtggggattacagatgcatgccaccacgcccatctaatttttgcatttttaatagagacagggtttcaccgtgttggccaagctgattttgaactcctgacctcaagtgatccgcccacctcagcctcccaaagtgctgggattacaggcatgagccaccgttcctggccgaaacttttctttaggtgaaaaaaattgatttaatgcctttcactgcttctactattgtgaarttttgttgatttagttacccagaaattaatgacctatgaaaacattttggtctgaatttggagatggagaattgaggcacatgcaaattctttaatgatttttaatgattatatacattattattattttttaaagttaggtagagatagggtctcactatgttgcccaggctggccttgaactcctgaggtcaaggatcctcctgcctgggcctcccaaagtgttgggattacaggcatgagccaccgctcccagcccattatgttgttttgatggtagttttttcagtgtttccacttgtaagacaaattcttataaaatacgtttttgtagagagaggaggatataagaagagctaacatttaggtgccagattctgagcttcgagaatcatggacatggccctgtctagtctagtctgtgtccctaaaaggattgggattcttattgtccccattttatagttggggaaactgggcgtgggagaggttaggcgacgtgtcgaagatcacagtgctggcagcagagctgagttccaattttg

SEQ ID NO: 551347 - DNA, 542 bp, Homo sapiens
cgccctctattgataggaaaatctagagcacccgtgtacttatggaacaggatatagggggaggggagtaaaaaatcatagaaagtcacgagtggaaagacccaaaccaaacagaaattattgatccttaactattgagtatatgctttgaagtatgatcaataaagtgagatgctgcttttataggggtcgaattaaatcttgggttaagagaaaaaaatgtagtctttgttagccaaatactttgaaaatcagtattatgtttgattacttttttaagatgcttcttagtatgtcatgaactgtatctaattatatgaagtaattgcaagatagtaaatttttgctctaataatacttagtccgcagcattatctaaaaatgtcatataacttcctccccaaaagtcatttctccaggcaactgtgaagctattattaagcrtattatggatatacacaggcttggattatattgtggatagtgaaaggtgtgtttaccccttaagtcatcatagtatgtaacaagtaagtaatgaaaag

SEQ ID NO: 551348 - DNA, 1161 bp, Homo sapiens
tcgtggattttctacttgctttgaattaataaacaattttttcttcccataccacagtggattctatttctgtgtattccttttctcattyatttacaacagcagtccccgcttatccacaagtgatatgtttcaagaacctcagtagattcctgaaacgtctgatagaactaaacctgattgccatcaagcggaatgtgtttctgttcatgtctgctactctcaagtttagtatcttttgcatcttaactgagcacttaagattcactgtggcttaacttttctgcagtttgtggcaaaaatagcaccaatttatttttccttcacaatttcatggacagaagattcatttttaccatacatctcaccaacctcaggatacaatttttttcttttctttttaaatcaataatttttaccttttcacttaaaggaaacactttacagcttctctttggcatatctgaattgccagcaccactcctctcactttgggtccattattaagtaaaataaggcttatttgaatacaggcactgtgacactgttaaagtgggtctcatgaccaagatggctcctaagcgactaacagctgggtcactcagacagtctagatacactggacaaaggaatgattcacatcctgagcaggaagatgtgagatttcatcacattactcagaatggggtggaatttaaaacttacgaactgtttattgctataattttccatttaaaatttgtgaactgtggctgaccatgagtaatggaaacctcagaaagtgaaactagacaaggggggactatttattacttcaatcattcaagaggtgttgactgtctattgtatttataaatcattatggtatatataaatgactaaagtccatgtccaacattcagaacaatgcctggaacacaatgggcactgaacaaatatttatagaataaatgagtgaatcagttaatggatcaaaaaatagtcttagttcagcaactacaacaaactgaaacttaaaacaggagacacggtcaacacttgaatctatccacatccatactcgagtgtggcctacagtgtttggaagggaatcatatgggaaatagaccttcagttgagattcaaaggatgggcatgatgagttttaaaagattcaaaaca

SEQ ID NO: 551349 - DNA, 895 bp, Homo sapiens
ctaattagcatactaagcaggaatgatttacaaggctagctagcaaatactttggaccatgaagtagaggaatagagaaggtgaatttctgtgcaatgctgtgggaatcagggagcagagggttgagtaaagcaggtacatggcagagataagcttttgttggtgaggagaaacaaattgaataaataaatacgaccatctgctttagatggcaatccatctgagctgcgggaatagtctaaaagtgaggagagagtcctggaatgaaggataaacttgcccatgttgctttttttttatctgaggcaagccctgcttagtttaatttgacaatttcctggcacgtatgttatgtaacattacctaaatcacctttggagtttggagaaaatgttaatgtcttgttaaaattataattattgtgtgtttagcatgcctttctatagagactgcttttaattaggatggtgttycagtttgtcaaacagacatttaaaatatcctgctattacaatatttacatttctgtttgaaatggtatcaaatgtcaacttcatttcccaggaaatcagaaaatttaaaatttttattttaaaatggaatagtattttagaacacgttatccatcgtaaactgtagatggagttctgtttgcttttgtcagagtaggtaatttcctttctttgggggaatgtaggggtgaggaaaagggagaaagagagagaggcaggagatagctctgtgtctctcacaatgtaatttcctttctttgggggaatgtgggggtgagaaaaagggagaaggagatagaggaaggaaatagctctgagtctctcaccatgtatctgctccttgctttccacactcagcttcattattttttaccttttcctca

SEQ ID NO: 551350 - DNA, 533 bp, Homo sapiens
aagtatttactctcttcacatatgcaaaaaaaaattgtatgaccccaatctctcctgtcttctaaaagacttaagtgcgtattttcactagatcctacatagacccactatataaaatgggcattgatatttttatttttaagacctagtaggtgctatgtaaccaaattctcctaaattgtaagatggagttgacacaccaaggcagaagcacctgtggacawtacgcccataggagtcaacttgggtgggtacatggttgctgcgctggttggaccatttctgctctaagtcacaccagatgaggttgagaaggttaggagttgacttagcagctgttagttactaccaaatgctgtgtgagcactagatctcaaaaaactttgaaatatatatgtgtgtatatatacatgtatgtatatagttgtgtgtatatgtatatgtatatatacagtgtatatatacatatttgcacacaaaataaaccaggtagacagtgtacatctcttaaaggaattacaacagcacttcac

SEQ ID NO: 551351 - DNA, 2370 bp, Homo sapiens
ggctcttttccagggctctacactttcagaatttccactgtctcaactccaggttgcccatattatctagccttgtcttgtatcaagttaaacatatagttcagctcccctctttgagtttgcttaaatgaatccactttcacagacacacacacaaaaaacatgagtgagtcatggggtctctattaaggatactctaaggatgacaaagtgggagagagatgctagcatgccccatggtaaataatttaataatgataaaaatttaataacctaaaattagtaattttgtctacaaaactctccctatccccaaaatttctccctctcatcccaggctgtgccttatcttgttggtccatttattcaggtctccccgaccaatataatttcagccataattggagagagagtaattcagtgctcccaagtcctgccccaacctgccaaaccaaatccatctggccgtggggctcaggtgaggccttctctttaagagcagtgggagttctacagtgcaacgtatttgctttttagtgttaatacctgtgattacttagtctgtgaagggtttactgattttgactttctacttcctaaatttccacccaaattcctatttgcttttcaataatatttttaaatatgagatttttatatacacatattaaagcaatataccagatttatctttccatttcagcaacggtataccagagctgtaatcctgactgctttattatttagatcgtgaactgcggaaatcaagtactgtatcattttgttactttgatatccttaatctctaattctaacaaggaagccttggctcaggacacccagatcaatccatatagaaaaaaatatttatgcagccatatgaagaagatacttgaaaaataagggttaggagagaaaactagcccttgctagagaaaatgtaatagaaagcataaatccacataaagtataagtataaagtataaagctatacttcaagcattttgacaacagtacaggggtagacagaaagataaatgaaatcgagtccagagattaatttaaagttttgtcatgaggtgtttcaaatagttagtggagattttttcagttaatgatttctgttgaggctaactggtagctgagaagaaatgatttctagaatgatggaaaatggaggctgagatctttgctcagaaacagccgggtgctgacctcacttttctcccctaggtgacaatatggccctgtggatatacagcttacacagtggaacaggatgtttctgtatattttcacaaataaaaatgcctggaagtgtgtatgtgtgtgtgtttcttcttctggagagatcataaaagcagaaagtaaaaaagggctgtggattgataataactaagtattcctgatctagctgatcctactgttaagaaaaataaatcactcccagatgtttgacatcattcaagatgtaaagactaagggaagctactgtgagaagcactatgttactttctgtcttggtggccagctctttttggaaaatattgtgtggggattttgtgtatgtgctgtctctagtcattaatctgtgctcgttcctaaaagctgcagaatctatctatagataagtactttagttctcaacttcattccttccataaaataaatatgagtaaaatcaaagttttaaatataaagaaagaaaatctttaaaatgtcagagaccttttccttaatattgtcagtgctgggaagctttcataaatatggctcataaaccactgaaaatactgattgaaaaactcaagtacatgaatgtgaacagatttgtgaaactattgattaccctggggatgaaaatattctcctgagagctatggtgatagtttccatttaaattgagaatggcaactagccattctcaatttaaaaacacttcatttgtatctttactggtaaattaactgagttaacacatgcatattcagtgactggaactatcccatcatttaaatattactgtataaattacaggtggttattggtagacactcagaaatcaaattattgtttggtacaagctttaaagaaacatttcmccttatttagtagccatctttttatcaaaaactgagtgatcaattccctgttccctattccctgttccctatatagtccctctgctggaaaaggaatcataaatgaatagtagttcagtaagtaaggtaaaggaatggggtgtggatttatgtttttttaatcttcttatataaattaacatttctaactttataagtatatattgcttttactttttaattgaaggtatgctaaaagtggcttttgggcaaggatattatataatcc

SEQ ID NO: 551352 - DNA, 537 bp, Homo sapiens
catggctcactgcagccttcacttcctggctcaagtgattctcccgcctcagcctcccaagcacctggggctacaggtgaacattatcatgcccagctaagtttttgattttttgtagaaatggggtctccctatgttgcctaggctaatctcaaacttctggggtcaagcaaccctccctgcctcagcctcccaaagtgctgggattacaagcatgagccactgtccctgccaacccttttttttcttaaagctaaatatgcattaaaatatttatgtttgtcacactttatcctggcttgaccttaagcaattctatttcttttctgtttttcttatcagtggttttcaagcagggtcacctgtgctgtgggaaggatcagtggcaggactgcagacccctgccctctcctctgctttaaacagggcagttcttcctgtgtcctgctccatgayagaccagctgtgtgaccctggcaagtacttcatctctttatgcctgtttctacacctgtaaaaaggggacagtggtaatgc

SEQ ID NO: 551353 - DNA, 429 bp, Homo sapiens
acaggcatgagccaccactttttcatagggtgactatagttagcaaaaatgtattgtatattttaaagtagctagaagagagtacttgaaatgttcccaacacacacacacacwctctctctctctctctctcacacacacacacacacacacacacacacacagttttctccctataaaatatgatttccaggcccaatcctctcacaagcatcctagagcagtaaagatttcacatagtgacatcagacttgagtttgattccacctttactattcattcaccatgagactggacaaattagttaacctcagagtctcagtttcctcatctgtgcattgaatatagaaacagtattcaataaaaagggctgtggggagcattaaagaaaatacttcatgtaaagaacatagaacagcatctactaat

SEQ ID NO: 551354 - DNA, 429 bp, Homo sapiens
acaggcatgagccaccactttttcatagggtgactatagttagcaaaaatgtattgtatattttaaagtagctagaagagagtacttgaaatgttcccaacacacacacacactcwctctctctctctctctcacacacacacacacacacacacacacacacagttttctccctataaaatatgatttccaggcccaatcctctcacaagcatcctagagcagtaaagatttcacatagtgacatcagacttgagtttgattccacctttactattcattcaccatgagactggacaaattagttaacctcagagtctcagtttcctcatctgtgcattgaatatagaaacagtattcaataaaaagggctgtggggagcattaaagaaaatacttcatgtaaagaacatagaacagcatctactaat

SEQ ID NO: 551355 - DNA, 651 bp, Homo sapiens
ttggtgcctttcacctggggacaggtgcagctgctgggagctggtagagtaaaggctggtggcatcaccatcgcctggggtagtttgcttatcacctgggtattgagatccaaggccgcttcaggcagtatctccgcaggtgtctggtataaatggggagaaaactggcaggtggtaggtgatagatggtagatggtgtgtttatgagtcaggtggaacaaactcaagacctctagaaatcattcgtgagatgggatgaagccagagaaacagttttgtaaaagtttttttgtgtatttgaaactttaaagctgacattttctgaggaacacccattacttcgatgagaaaattgagggttcagtaagttattaattcacccatttagtcattcgttcagaaaatactgagggcatattatgtaccgggcactgtattgggcatagagtgaatgaaacaaacaaaaacactcatggggycatatgtgaacccaagtcagtctgcctctcaacatagagttctttccactgtctcaaactgccttctattaaacatttgataaatctcatttttccaaaacttgacatgaaggactcgctcctctgccatttcctggaaccatgggctgcttttgcaccttttcttctagat

SEQ ID NO: 551356 - DNA, 651 bp, Homo sapiens
ttggtgcctttcacctggggacaggtgcagctgctgggagctggtagagtaaaggctggtggcatcaccatcgcctggggtagtttgcttatcacctgggtattgagatccaaggccgcttcaggcagtatctccgcaggtgtctggtataaatggggagaaaactggcaggtggtaggtgatagatggtagatggtgtgtttatgagtcaggtggaacaaactcaagacctctagaaatcattcgtgagatgggatgaagccagagaaacagttttgtaaaagtttttttgtgtatttgaaactttaaagctgacattttctgaggaacacccattacttcgatgagaaaattgagggttcagtaagttattaattcacccatttagtcattcgttcagaaaatactgagggcatattatgtaccgggcactgtattgggcatagagtgaatgaaacaaacaaaaacactcatggggccatatgtgaacccaagtcagtctgcctctcaacatagagttctttccactgtctcaaactgycttctattaaacatttgataaatctcatttttccaaaacttgacatgaaggactcgctcctctgccatttcctggaaccatgggctgcttttgcaccttttcttctagat

SEQ ID NO: 551357 - DNA, 651 bp, Homo sapiens
ttggtgcctttcacctggggacaggtgcagctgctgggagctggtagagtaaaggctggtggcatcaccatcgcctggggtagtttgcttatcacctgggtattgagatccaaggccgcttcaggcagtatctccgcaggtgtctggtataaatggggagaaaactggcaggtggtaggtgatagatggtagatggtgtgtttatgagtcaggtggaacaaactcaagacctctagaaatcattcgtgagatgggatgaagccagagaaacagttttgtaaaagtttttttgtgtatttgaaactttaaagctgacattttctgaggaacacccattacttcgatgagaaaattgagggttcagtaagttattaattcacccatttagtcattcgttcagaaaatactgagggcatattatgtaccgggcactgtattgggcatagagtgaatgaaacaaacaaaaacactcatggggccatatgtgaacccaagtcagtctgcctctcaacatagagttctttccactgtctcaaactgccttctattaaacatttgataaatctcatttttccaaaacttgacatgaaggactcrctcctctgccatttcctggaaccatgggctgcttttgcaccttttcttctagat

SEQ ID NO: 551358 - DNA, 1216 bp, Homo sapiens
gctaatatttgctgaacactatgtgcctggaagggtgcagggcataccccccattgttctcatcttctcaataacccaaagaggtaggggaagggtcagccacatctcacagatcagaaacaccttgtccaaggtcacacagactctaaatagcagagccaggactggactgcactatcctgattctgaaacctatgttatttatattgctaccctccaaggatcatgggaatagaactagagatttaaaaggaatgttgatgcctctatttaatgttctgccacacaggatctgctccagagtcccaaaagattcatcttctatgtgactcattgtcctgtggagccaacccattttactgatgaaggacataattgttaacggacttttactgaagtgagcattaccttttttcttatgctccatggacatctcatcaaggacccttgaagtgaggttaccattcttagctcccacagcgaagagatctcaggagactggacactgaagaatctcatcttgtataaagacagaccaaggtatgatggttttcctttcaaacctataatccttatgggattcattccattcttttcctgctgccaggatatttaacaagtatttccctgacaaaggaagacattcattgcagagcagatgagaggactccaaggtgacttatttaggccatgcaggggtgaaaggcctatgttaggtcaggccaaaggtgctcactccctgagatgggcaaacagcttggctaagacaccaagagatcacagccttctcattaaggctctgtgcagatggtggtacccacccttcctgcatgtggtgtttgtctgcagaggctgagaacatgctagggcaaaagccagatgcctgggatttcccaggctgtctgtccagtgagtaatagtccgttctcaggggctgctgggtgctgcagaggatgtttctggtgaagagaggctaaagggaggagacccgggtttttgttctttgtcctaatttattctgttatcttggtccagaccttcctctctggcctttagtttcattttccctaagaaggagatttcagtactagctctttcagaccctgaaaaaaagaaacacacactaygtctccatccttcattggctacttacaatgtgcagccatggggtaagcacaggagctgcatgccctccgctggagtgaaaagcatcgtc

SEQ ID NO: 551359 - DNA, 513 bp, Homo sapiens
ggggaaacggtctgtggcctgttaggaaccagccacacagcaggtcggatcagcgggggcattagattctcataggagcatgaaccctactgtgaactgtgcatgcaagggatctagggtgcacactccttatgagaatctaactaatgcctgatgatctgaggtggaacagtttcatctcatcccccctcccccgaccacctgtccatggttggggaccactgcactagcacacactatacttggttttatttcagtacctttgctcttatttttcccaagcccagaatcctccaaacctccrtccttattccaaatccactgattctttaaccttaactggctgctcatctgggaaagtcagggcccaaaggaaaggaggagctgcttggtccagagttaagctggcagactgagaataggctgtaggcctttccaccccaaattccttagaaatgaccccaaattccttagagatataagaatgggtgctttcagtacaccaaaaactgt

SEQ ID NO: 551360 - DNA, 1429 bp, Homo sapiens
gaactgataaaacattcaattagcagtctgattgatcaacttcaacttaactgattttattaaccgagtactaactagtacctcagcatgctgatccccaacctctagtaagcttgactccattacacctgtgcactccatttgattctatacttaccaaccatcatagtatttgttttcaaatctgcttatgccaattgtacatagtatagcaattatgtaacataattaaatgttaagtaaaccaatgaaatgtgaaggcaaaaccagtgcttattcttgtgaaaactgtgtgggagtcttgataaaggtaggcaagtaaaaatgctgtcataaattaggtgtgtgtaagacagagaggattatcagataatggtacaaaataataaaactctagtctttttttaggttttaaagacagggtctcactctgtctctcaagctagagtgcattggtgcagtcatggctcactgcagcctctacctgctgggctcaagtgatcctcctgcctcagcctcctgagttgctagtactgacatgcaccaccatgcctggttaggttttattttattttattttttgtagagacagtgtctcagtatataacccaggctgctcttgaactcctggccttaagcaatcctttcacataggcctcccaaagtgctcggattacaggcatgagccatcacagccagtcctctagaagaaatttttaaataaaatcatttctcaagagttaagttcttattctcctttaaacaaatcaaaattggacatgacagaccattcccaatgggtgattccaatcagcagacccaaaaaatcaaaggcaaggctttggccctatgaaaaattggaaaataagtgaatgtttatttaatgttcattaaatgatgtaaaaatacttaaggtatatatcatttattataatttcttggtttatgtatttttttctcaaattaactgagtaatcaaattgaacaggaggtctttgtataaagaaatccagagggaagctgctatgcttagatctactcatgtgttagtactcagtggtatggacccatattgaatttaaggagacaccccaattatttgcctgtcaaaatataagagttgcaaagaatctgaagagtcatctaggtcacatcttcttttcacaaattgaaaattgaggcccagaaaggcgaagtgattatgctgagtcatgcagtggttyctgacagagctgtgactatgacctgggtctccttaacgtatgagctcatcctgcagcacagcaatttggttcaaaggtttttatccatttatttattcctctgcagacataggtttaatagaacaaagaaattcttataataaaacaatgtgaaataaattctaaggccattttaggaatagtatccagtcaaacaatatgaagct

SEQ ID NO: 551361 - DNA, 1289 bp, Homo sapiens
taataataataataaagaacaactactaaaccaaaaaaaaaaattctaaggcataatgtctagaccagttaggaaaatactctccaatcagaccaaatttggagtagttccaatgctacacctggagtgaagctctagggagatcaagatgttgatggatctgggcactaagtctcatgaatggataaaagaactgggataatttactatggagatgaaaatatttaggaagacatgaggtgtctttcagctccttagggccttcaagtagaataaaaagctcatttttggtctccaggcacagattaggacaaatagctaacatttacattatttctcataaaaactctgttagtagttactattaatataagtatctccaatacacagatgagaagattgaggcaaaaatggttaaattgttctctcaaggccacagtgataacaaatgttatcagtggaattcaaacctaggaaatctgactccagagcttgccaactttactatattatttagcattttggttcaacagaaagagttcattgaagatacagactattctatttatcattgcatcttaggctcttagcccaatgcctgacacattatatgggttaaaagattaagtgaataagcaattttctcaaactcctggcctcaagcagtcctcccacctactctttcaggtagctgagattataggcgcaagccacggtgtcttgaaggaatgattttctgaacactcaagatgcctaacaattaaaacaagctgccttatggaggccttaatacctcgtcttcagggctattgygacagaagcaaaaggtgaatgatgatctctcaaagatgtggaataagatttctttatgagtgaaaagttgaagcagaaggtctttacatagtcttttttcagacgctgtgattctatgattcaagatttctcaatagtcatagaaatgaatttccaaaattccctccagctgaaaagtatactcacccatctgtgagacgacagtatctctaaactctgtggacagaaggtattcaagggactgctgttgccttgggaagggtaatgacaatggtggaagggagatatacactgaagacagaggcagaggcaaaggcaaagagaaagggacaggaggcaaatgccactctcttgcgttgaggtgaccatggtggtaaggtggattcaaaagaggtgacctggtaatatcagccaaatccccatactcccattatattcaagcaagagattccatgtcgattattaaattacctttt

SEQ ID NO: 551362 - DNA, 1223 bp, Homo sapiens
tggagggcggagtaggtccccacttctccggggttcacacctgcaggacagctgttgggatatcctgggctggctgctatgtgccagtggaatgggaatctcaagatgcagtgctgcaggaaagggagacccccccggaccttgggcagtgtcaaaggcttatccatgagttgatgctttcccttcaagtcccccattggctccattgctcactgatccagccagactctttttccaacaaagttcaaatgtcaacggtacagacacagaaatacctggaaactccaaactcatcgcgtttgcgcatagaaggacatgctgtccacattcccaggcagctccgtgaacacgatggcccggtcaggtacagctcaccgaacccacccaggaattttatacttggcaataactcttccactatcaccaatcctggcgaacgtgatcgatattgtaagcttgaccacttttaccttggaagcagacaggatccatttcttrttgttgctaatggcaacatccatcacccagtcattatggccctgaagaaatatcaaattttaatgaaaacgtggagaaaataattttgaaagaacaacaaaaacaagctgggtgtagtggctcacacctgtaacctgccttttgggaagccgagtcgggagggtcacctgagcccaggaggtggaagctgcagtgagccatgattgcaccactgcacttcagcctgggcaacagagtgaggtcccatatctaaaaaaacaacaaaaagtcaagaacccagtgttgcttacatttaagagtagctggctgagtgcagtggctcatgcctgtaatctcagtactctgggaggttgaggtggacagattgcttgagtctaggagtttgagaccagcccgggcaacatagtgaaaccccatctctactaaaaatacaaaatattagccgagcatggtggcatgcgcctgtaatcccaactactcaggaggctaaggtgggagagtcaccggagcccggggaggttgaggctgcagtgagtcatgatcatgcactccagcctgggcaacagagtgagactgtctcaaaaaaaaaaaaaaaaggaaagagcagagcagctcattgtacttcctcggtttcatcaacaacatttagggtggaatacaaagtgtaaagacatgtgatatatgtacattctattttttttgttgttgttgttttttggggtttg

SEQ ID NO: 551363 - DNA, 782 bp, Homo sapiens
tgcgaagttctgatggagggtcggtgtggcccrtgactcggagggcagaaaatgaggctgacgcctgggacagaaaccagcatcccggggggccttggatctggggaaggcatgcatcccactttgcctggaataattctggcttgctcccattgttccagcctaattggtagcattccctttgacctgcaaaaaaaatgcccctgcttgttcaacaaatgacacagtcactctacttagagggcagagcaaaaagtatagcttttatatattttagctgcaataggaaggcatttgagtgtttcgagaaagagagtgacagcatcacgccttttcctcattcaccaagtattcactgagtgccgagagctctcctaagccgcagacacagcagtgagccactttttgcaggagttctgccatcgggagcttacattccagtgtcaggaaggctgacatctgacaaaattaaccggttctccacagctcagtgccctggacgtgtcaaggtacccattggaaagacagaaagatgaaggcaaagagaatgttctgctggttctttttctaggtttaataattggaaaatcatgagctacttcccatgaagtcttctcccaaactcacccccgaggacaggcctttgcagggagctacctgactcccattctcacccacgtatccagctcctgtagttggtgagcccagctgtgtgctggttgccctgacaggcccctcaccccacgcaggttctagctctcagtaaccggcttatgcacaca

SEQ ID NO: 551364 - DNA, 642 bp, Homo sapiens
cgcccgccgcgcagacgaggtcgccccgcacggagggcggctccccwtggatgcaccgagcctcacccgacagtggcgtcagcggcccgcgctccggcctagctctggggaccacgccgcgtgccctcgcgaggactctggcccagtccctccttggtggagagcctgacaccgctgctctgggacttcccggctgcgccctcccccagcgccaggaaagcaagctgcgtaaaggctgcggcagtctcggtctcccggagctcttgggagcctggccccgcccctttcccggtgattgatgtgtgctgcctctttctgggtgatttacatgtaatgccccgcccctttcgggatgattacgtgtgcctcgacctttaggtgatttacatgtagtgccccgccccgttcccggtgatttacatgtggtgccccgcccctttcctggtgatttacgagtgccccaccccttttaggtgattttttttttttttttatgtgtgcctctccccttcccaagtgatttacatatgttccccgctcctttcagggtaatttacatgtaatgccccgcccctttccgggtgatttacgagtgcctctccccttctcaagtgatttacatgtgtcccgccccgttccggg

SEQ ID NO: 551365 - DNA, 1450 bp, Homo sapiens
tattttatttattaatattgtttatgatctgcccccccattagaatatatctccatgaagtcatagatgttttttctgcagtgtttcctatagtgtccctgcacctaggacagtccctggcacacaatagatactcaataaatttttttgaatgaatatttgttgagtatctaaaatctctaaacttatgaatgaatagacatatacagtatataggaagtataaggaaggctacaagggcatgattactgagtacaattctagaagccagatctctagcttttaattatggttgtaccagttataagctttgtgactttagagtaagtttattaacctctctgttcctctacttcttcctctgtaaaaaaaatttttcagccgggcaaggtggctcacgcmtgtaatcccagcactttgggaggccgaggcgggcggatcacgaggtcaggagatcgaggccatcctggctaacacggtgaaaccccgtctgtactaaaaatacaaaaaattagccgggcgtggttgcgcaagcctgtagttccagctactcgggaggctgaggcaggacaatggcgtgaacccgggaggtggagcttgtagtgagctgagatcgcgccactgcactccagcctgggcgacagagcaagactccgtctcaaaaaaaaaaaaaaaaaaaaaatacaaagtaattgtacagaactcataaaatttttgtgactattcggtgagttattatgttaaaagtaatcagataggctgaggcaggagaatcgcttgaacccgggaggcagaggttgcagtgagctgagatcacgccactgcactccagcctgggtgacagagcaagactccgtcaaaaaaaaaaaaaaaaaaaaaaaattacgtaacggatacaatgtatgtcactgggttagtggatccctgaaagccctaacttcatcattctggaatctatccatgcaacaaagttacactcgtaccccataaacgtatacaaataaaaaataatcggctgcgcatggtggtttacagctgtaatcccagcactttgggaggctgaggagggcggatcacctgaggtcgggggtttgagaccagcctgaccaacagggagaaaccctgcctctactaaaaatacaaaattagctgggcgtggtagcacatgcctgtaatcccagctactcaggaggctgaggcaggagaatcgcttgaacccgggaggcagaggttgcagtgagcagagatcaaaccattgcactccagcctgggcaacgagagcaaaactccatctcaaaaaataatcataatcataatcataaatataaggcaaaagtaagcatgctttctttaaaaaaagtagtcagactgagcctgtcatctggtaagagctctaacgtttatcgttaatatgattgttattgtcgctgttatattttcattattggtg

SEQ ID NO: 551366 - DNA, 1450 bp, Homo sapiens
tattttatttattaatattgtttatgatctgcccccccattagaatatatctccatgaagtcatagatgttttttctgcagtgtttcctatagtgtccctgcacctaggacagtccctggcacacaatagatactcaataaatttttttgaatgaatatttgttgagtatctaaaatctctaaacttatgaatgaatagacatatacagtatataggaagtataaggaaggctacaagggcatgattactgagtacaattctagaagccagatctctagcttttaattatggttgtaccagttataagctttgtgactttagagtaagtttattaacctctctgttcctctacttcttcctctgtaaaaaaaatttttcagccgggcaaggtggctcacgcctgtaatcccagcactttgggaggccgaggcgggcggatcacgaggtcaggagatcgaggccatcctggctaacacggtgaaaccccgtctgtactaaaaatacaaaaaattagccgggcgtggttgcgcaagcctgtagttccagctactcgggaggctgaggcaggacaatggcgtgaacccgggaggtggagcttgtagtgagctgagatcgcgccactgcactccagcctgggcgacagagcaagactccgtctcaaaaaaaaaaaaaaaaaaaaaatacaaagtaattgtacagaactcataaaatttttgtgactattcggtgagttattatgttaaaagtaatcagataggctgaggcaggagaatcgcttgaacccgggaggcagaggttgcagtgagctgagatcacgccactgcactccagcctgggtgacagagcaagactccgtcaaaaaaaaaaaaaaaaaaaaaaaattacgtaacggatacaatgtatgtcactgggttagtggatccctgaaagccctaacttcatcattctggaatctatccatgcaacaaagttacactcgtaccccataaacgtatacaaataaaaaataatcggctgcgcatggtggtttacagctgtaatcccagcactttgggaggctgaggagggcggatcacctgaggtcgggggtttgagaccagcctgaccaacagggagaaaccctgcctytactaaaaatacaaaattagctgggcgtggtagcacatgcctgtaatcccagctactcaggaggctgaggcaggagaatcgcttgaacccgggaggcagaggttgcagtgagcagagatcaaaccattgcactccagcctgggcaacgagagcaaaactccatctcaaaaaataatcataatcataatcataaatataaggcaaaagtaagcatgctttctttaaaaaaagtagtcagactgagcctgtcatctggtaagagctctaacgtttatcgttaatatgattgttattgtcgctgttatattttcattattggtg

SEQ ID NO: 551367 - DNA, 1450 bp, Homo sapiens
tattttatttattaatattgtttatgatctgcccccccattagaatatatctccatgaagtcatagatgttttttctgcagtgtttcctatagtgtccctgcacctaggacagtccctggcacacaatagatactcaataaatttttttgaatgaatatttgttgagtatctaaaatctctaaacttatgaatgaatagacatatacagtatataggaagtataaggaaggctacaagggcatgattactgagtacaattctagaagccagatctctagcttttaattatggttgtaccagttataagctttgtgactttagagtaagtttattaacctctctgttcctctacttcttcctctgtaaaaaaaatttttcagccgggcaaggtggctcacgcctgtaatcccagcactttgggaggccgaggcgggcggatcacgaggtcaggagatcgaggccatcctggctaacacggtgaaaccccgtctgtactaaaaatacaaaaaattagccgggcgtggttgcgcaagcctgtagttccagctactcgggaggctgaggcaggacaatggcgtgaacccgggaggtggagcttgtagtgagctgagatcgcgccactgcactccagcctgggcgacagagcaagactccgtctcaaaaaaaaaaaaaaaaaaaaaatacaaagtaattgtacagaactcataaaatttttgtgactattcggtgagttattatgttaaaagtaatcagataggctgaggcaggagaatcgcttgaacccgggaggcagaggttgcagtgagctgagatcacgccactgcactccagcctgggtgacagagcaagactccgtcaaaaaaaaaaaaaaaaaaaaaaaattacgtaacggatacaatgtatgtcactgggttagtggatccctgaaagccctaacttcatcattctggaatctatccatgcaacaaagttacactcgtaccccataaacgtatacaaataaaaaataatcggctgcgcatggtggtttacagctgtaatcccagcactttgggaggctgaggagggcggatcacctgaggtcgggggtttgagaccagcctgaccaacagggagaaaccctgcctctactaaaaatacaaaattagctgggcgtggtagcacatgcctgtaatcccagctactcaggaggctgaggcaggagaatcgcttgaacccgggaggcagaggttgcagtgagcagagatcaaaccattgcactccagcctgggcaacgagagcaaaactccatctcaaaaaataatcataatcataatcataaatataaggcaaaagtaagcatgctttctttaaaaaaagtagtcagactgagyctgtcatctggtaagagctctaacgtttatcgttaatatgattgttattgtcgctgttatattttcattattggtg

SEQ ID NO: 551368 - DNA, 1450 bp, Homo sapiens
tattttatttattaatattgtttatgatctgcccccccattagaatatatctccatgaagtcatagatgttttttctgcagtgtttcctatagtgtccctgcacctaggacagtccctggcacacaatagatactcaataaatttttttgaatgaatatttgttgagtatctaaaatctctaaacttatgaatgaatagacatatacagtatataggaagtataaggaaggctacaagggcatgattactgagtacaattctagaagccagatctctagcttttaattatggttgtaccagttataagctttgtgactttagagtaagtttattaacctctctgttcctctacttcttcctctgtaaaaaaaatttttcagccgggcaaggtggctcacgcctgtaatcccagcactttgggaggccgaggcgggcggatcacgaggtcaggagatcgaggccatcctggctaacacggtgaaaccccgtctgtactaaaaatacaaaaaattagccgggcgtggttgcgcaagcctgtagttccagctactcgggaggctgaggcaggacaatggcgtgaacccgggaggtggagcttgtagtgagctgagatcgcgccactgcactccagcctgggcgacagagcaagactccgtctcaaaaaaaaaaaaaaaaaaaaaatacaaagtaattgtacagaactcataaaatttttgtgactattcggtgagttattatgttaaaagtaatcagataggctgaggcaggagaatcgcttgaacccgggaggcagaggttgcagtgagctgagatcacgccactgcactccagcctgggtgacagagcaagactccgtcaaaaaaaaaaaaaaaaaaaaaaaattacgtaacggatacaatgtatgtcactgggttagtggatccctgaaagccctaacttcatcattctggaatctatccatgcaacaaagttacactcgtaccccataaacgtatacaaataaaaaataatcggctgcgcatggtggtttacagctgtaatcccagcactttgggaggctgaggagggcggatcacctgaggtcgggggtttgagaccagcctgaccaacagggagaaaccctgcctctactaaaaatacaaaattagctgggcgtggtagcacatgcctgtaatcccagctactcaggaggctgaggcaggagaatcgcttgaacccgggaggcagaggttgcagtgagcagagatcaaaccattgcactccagcctgggcaacgagagcaaaactccatctcaaaaaataatcataatcataatcataaatataaggcaaaagtaagcatgctttctttaaaaaaagtagtcagactgagcctgtcatctggtmagagctctaacgtttatcgttaatatgattgttattgtcgctgttatattttcattattggtg

SEQ ID NO: 551369 - DNA, 2080 bp, Homo sapiens
atgggaacatgcattctctgaggactgtactgctttagcaattcactacctctggtgtgattttgggggtgtcttagttagttcaggctgccataacaaacaactctagactggatggcttataaacaacagaaatgtatttcacatggttctggaggctgggaagtccaagatgaaggcaccagcagatttggtttctggtgagggctcacttcctkgttcatagacagtcatcttttctgtgtcctcatatggtagaaggggcaagggagctctctctcaggccttttttataagggcactaatcctatttgtgagggttccaccctcatgacctaatgacctcccaaaggcctcaccttcaaataccatcatattaggggttaggattttaacatgtgaatttaggtggggacacattgggtctatagcaggaggctagagattgacctaaagtacacctaacaatttaaacaattgcagactattgtcaccctttcttgccatttctttagcaatactcatccccccaaaaactaataggcttttcatatttttgcctctagacaactccattgggtcgtaaccatagtcagaggttttgtttgatcatgtgttttcaacctggaaatttctactttctggccccaaatctctatgcttcacctgtctactagttttcaaattttttggccatgacccataatgagaatgaatttacttcatgacctagtatacaattatgcatgtgcatattggtatgtatttatgtataactaaatcataagttttattatacaacagtatttatggccactacatgggttacatgctaatagtttctattctgttgaaagaggaaggaaggaaagaagggaaggagggaagaaggaaggaaagagggaaggaaagaaggaaaaagaaaagaaaaaacaagccagtaacaatccatcaaattgagtttatagtccactaatgtgtcatacctagagtttgaagcactacctttagttcaggcctagtgtgtggcctcttccttcattttagcctttgctttgtaggaaataaagacaatagccttgggtaggcagattcttatttcttcatgccctcagactgttcccagacacttcacaaagcacatgcatcccccttgcttagacagacaatgttcaccagaacaagccgggagacagcctaggatgaggcaggccaggctttttctgtgttctcatctcatcttctgagaaccctccccattcctgcgtgaataaactgggtttgagatagaaaaatgtggtttttccagccctgcagtacccagggttaggacttttggtcatttaaattacaggccacaggtggaaagaacctctcttagccaaccagagtcctttgacttcttgctggaaaacagagcaccttcagcctgcctcccaaagtgcttcattgaaggctgctggaagaagccaacccactccaacatcctgaattttttctgctaaactaagctttgataggtacatggtctgcatccccaggtacaaaaaatgacagtttcatcctcagcaaaatggaggcctccagcttcccagcctggagtctggcaccctccccagccactcctggccttctccacttgcgattccacaatgtagggagtgtttgttacacatttctggttcaaactctcattcctcctcttgagaactagcctttcttctccaagccctccttgtcctaagaaaatgcctgtgagtgagtaactgtcagcaaatccccattaatgaggtagtcagaattttcaagggacactcccccgccacccacccactcaacccggctctggagtacgtggatttcatctgggagactcttgaaggtaggaacagttttcaagacccaaagggcataagcactaaaggcaggatgaagcagtggaagcagagagcaacatttgttttttttttttttgagacagagtttcgctcttgttgcccaggctggagtacactggcatgatctctgctcaccgcaacctccgcctcctgggttcaagtgattcccctgcctcagcctc

SEQ ID NO: 551370 - DNA, 1359 bp, Homo sapiens
tgtgggaggagctgtggtctccgtggtcctcagtcccttctttctttccaagggcgaccgtttcccctctgagtcttccaaagatgtggttagcagggtctcaaatccaccactgtgttctctcatcctgactcctcctagggctggcagcaaatctcttggtttccagagacttccccaggctaaccttctgyccttaattcacagcaacggtatgaactgtttggcccccaggcgatatttcactagtttgtcatcttgttttcagctagcaatgtatggctttttcttgaaagaattattttgggttcctgaacacggtgggtcattcctgtaattccagcaccttgggaggctaaggcagaggtattgcttaatcttagtagttccagaccagcctgggcaacatggcaagaccttgtctctagtataaatgataataataaaattagctgggcttggtagctggcacctgtagtcgcagctactcctgaggctgaggtgggatgatggctggagcccaggagtttgaagttgcagtgagctatgatcgtgcctctgcatcccagcctaggcaacagaggccgaccctgtctcaaaaaaaaaaaaaaaaaagggtgtccacagctgccaagtctcttggagggtctagtgaatatcatcccctgggtcactcctcccaggggacagcctgagatggggggtgtggccccctggggagcaactggatccactgggatgggaggaatcttctggtatataattcctgtaaaaagctaactcctgggacactcaccttttcttcccaaccctagtttccattccttggagacacatgactgaacagccaatttcatggtcatattccataggaaaaaaaaacagaaatgatttttgccttctggactctctcagacttaaaaggtagaaagttatatctaaggactggagaacctgcccgttgaggtagtgcaagatcctgaaaagcacacaaggcagtgtctcctgggagggtgatgaccagaatagggttaagggatgtcccaggtgataggatgacccaccctgattgttgcattagacttttctgtgttccagtcagcactgctgattcctgagtttgttagcttgaaaagatatgtttactcttttcagcctaaatttttgattaaccttaaaatacatcctatgattagagattgttattgtatactttgaagacaaagtatacccaaagttggaaagagttggacttcagaaaataaattgtataagtaattctagaaagagttggatttcagaatataaatggtatatgtaatcttctattccattttttaaaaacctttatttattttt

SEQ ID NO: 551371 - DNA, 543 bp, Homo sapiens
ttaccatgggacatatcaaaggctgacatcctctgaagctgatggtgagatgtgcctcaatgctgtctttcttgatgccaagatcgcctcagggcagcttatgaatctaggtggatacaggcaatctccattcccctttgtacagggttatctgaggccctgttcataccaatcaccaaacaacaagcatcaaacatcagtcattgaacattatgcatgagctttctctctgcaggtgacagatgtgaaggccaccaaaaactgtatactcagtatcgtcactcagtaatgatagtattaataacagcaactgacatttattgaggactagtatgtcagaagtagctctagtagctttatatatacatgctcacttaattatcataaccatccttcccaacagctatcattacctatatgtatctatgtatctatccatctatctatttattgagacagggtctcaytctgttgcccaggtttaagtacaatgacacaacaacagctctctgtagcctacatttcccgggctcaagtgatcct

SEQ ID NO: 551372 - DNA, 1032 bp, Homo sapiens
tgacctcaggtgatccacctgccttggcctcccaaagtgttgggattacagatgtgagccagggtgtctggcatgcccttcttaagtagaaaggcttgtagctggtaacaactagaaaacaaataacgtccaagaaaataaaaatttaaaaaaacgaaaggcctacagtctacacgtgttcttatttacatacagaaatagacacaccctaaacaactatgttttttccatccaaatgtaatgtgtcaaaaataagcaaaggacaccaaggcaatgccagattctcagatgagacattttttagcaaatatatggaagtcagagccctcttgaaaccaatttaacaccggtgctcaccaagaacactccggaatcgccaggttcctgacgcgggaggatgcggggccagagccaaccttaccagaatggcagaaatccttttcctttcggaaagaaaaaaattcaccaaggttgctttagaagcttttgaagaggggagcacagcggatgaaagcactccagaaaacatcccatggacgcgggataaacacacttcctgacgcggctcctgacgtggaccgactgaacctgcagctgggaactggccacgctgggaggaccaacaacccctggagaagctagtgaaatgagcaggatcmgagaggctcctgggcgagcgcacccaatccttcctttggcatcccccgcctgtctccaggacccccaagcaggggcggaactcaccacagccggggtcgactccaccaagataaaggtgaaacagcactgaccgtgggcagccagcgcgggaaaagatagtggcggcgggctgatgtcacttccgctacgagcttcgggaaggacggggcttctgggatccagtttcagccacgtaggaccaggttgttagaaatgcttgttccccggtgcataaagaaatagcacttgaacataaatttaatttcctcagtaagcccattttacttttggcagaacaggtacactagccagcagttttgccactagagtaca

SEQ ID NO: 551373 - DNA, 944 bp, Homo sapiens
ccaagtgataattagcgaacactgagcaaagacttgttcagtccagactaagccacaaagtggatataattttcctcatctagatgggaaaactgaggctcagagaggttaagtgccttgcccagggccacacagcaggactgcaatttgaacccaggcccatctggcttgtcagagccatcaccacatcaccatcttgctagtgtctgtttgggggtggggtggaggacggatatggaggtgtttgtatagagggaggatttttcctttaaaaggtcagactggctggcaatgtggctcacgcctgtaatcccagcactttgggaggctgaggtaggaggatcgattgagcccaggaattcaagaccagcctggacaacacaacaagaccccatctctatgaaaaaaatttcaaaaactagctggatatggtggctcacacgtgtagtcccagctactggggaggcgggaggattgcttgagcccaggagtttgaggctgcaatgagctatgatcatgccactgcactccagcctgggcaacagagggagactctgtctcaaaaaaaaaaaaaaagaaaagaaaaatcagactgaaattcctcccagattacaggggaaatttccctgcagaggggatgctccttgaggaggaggargtgtttgaccagagccattttctgcaacctcagcctagcctattgtgttcccaaagctccctttccctggaaaccctgcccacacccacaaacaccaccgtctgaggctcccccaacccactgcccctcacagtctggtcctgtctgtttctcctgttacacaagcctgggtggggctgagagggtgggggactatcctcacaggaccgggattttcagggacaaggtcaccacatcctcctcagttcttcctggggaattccagacctctgtccctgggacacaa

SEQ ID NO: 551374 - DNA, 570 bp, Homo sapiens
gaaggcgggtggatcacctgaagtcaggagttcgagaccagcctagcgaatgtggtgaaaccttgtctctacraaaaatacaaaaaaattgccgagcatggtggcgggtgcctgtgatcccagctactcaggaggctgaggcaggagaactgcttgaacccaggaggcagaggctgcagggagctgagattgcaccactgcgctccagcctgggtgacagagtgagactctgtctcaaaaaataaaaataaaaataaaaatcctttgggctccacctactccacagatagattttcaaaattctgttgaaggatttccaaacagattttaaaacaaacttgacaagctcattatttggaatataataaagaggttatactctttagttgggaataaatagcaaagctacaagtggggacagtaacctcttgagatgggaaaacggggacggaatgagctttagttttcactgtagagattgatacgttttggttctgtgtgcacacgtgacttattccacaagtaaatgaaaacctttaaagccagagtagactcaaaaatcatccaaaa

SEQ ID NO: 551375 - DNA, 570 bp, Homo sapiens
gaaggcgggtggatcacctgaagtcaggagttcgagaccagcctagcgaatgtggtgaaaccttgtctctacgaaaaatacaaaaaaattgccgagcatggtggcgggtgcctgtgatcccagctactcaggaggctgaggcaggagaactgcttgaacccaggaggcagaggctgcagggagctgagattgcaccactgcsctccagcctgggtgacagagtgagactctgtctcaaaaaataaaaataaaaataaaaatcctttgggctccacctactccacagatagattttcaaaattctgttgaaggatttccaaacagattttaaaacaaacttgacaagctcattatttggaatataataaagaggttatactctttagttgggaataaatagcaaagctacaagtggggacagtaacctcttgagatgggaaaacggggacggaatgagctttagttttcactgtagagattgatacgttttggttctgtgtgcacacgtgacttattccacaagtaaatgaaaacctttaaagccagagtagactcaaaaatcatccaaaa

SEQ ID NO: 551376 - DNA, 1530 bp, Homo sapiens
aaggagctttctctttggaggaggtcatgcaagctttaatcccttctctctctacttctcctgtgggacaaatggcctatctaactaacraggtggaagaagaaacctagcatatatgccctagcccaatcggggatcttttaaaaagtggctcatgcctaaaatgcacttatttgtctcctgtacatacattggacagctgttttggaaaaagaatttgtaaacccatttaaacatggatccatactttgtgtgtacttttcaatgaactcaatccctcataaaagtgatagtttttatttctatctgtgtgaccctatctctttcttctgtattagatcagaattagggagagaaaattagaggtggattatgttactgccaaccccatctaccctcacgtccaaatctaacataattggagttctggaaatcccatatctttctgttcagctgctctagtttagcctgttcctcatcctttaccacccattacatccttgccttagacccttgtattacctacttctaatcattgtctagtgtctcttcagaaggccatgtagttatactcttgtactctatttctcttaaactcttgaaccaatgaatccatctaggcgtcatctttactacttatttcaataacaaacttcttctagcctactgaccaaatcttttccagcctcctatcctaggtaggggtatgggttttctcttgtcaatggatcctagaactattttgtcagtccttggtgataaaaccttagctctttttgtcccattaacaagaaattttaataatcactgctacaacttgtagttccaactacagctagcaaagtaataatgatatagtattattattaagagagttcatctggccgggtgcagtagttcatacctgtaatcccagcaccttgggaggctgaggtgggtggattacttgaggtcaggagttcgagatcagcctggccaacatactgaaaccccgtttctactaaaactacaaaaattagctgggcatggtggcgtccgcccgtagtcccagctactcgggaggctgaggcacaagaatcgcttgaacccaggaggcggaggttgcagtcagctgagattgcaccactgcactccagcctgggcaacagagcaagactatctaaaaaaaaaaaagagttaatttgcaagtaatatgagaaaaattgattttcaaattagctgtgttttgcacatacgacatatgagcgttactttatggtaactctttccatcaatatgtataaatgtaagagagttttctaagcatatatatcagagacctactcattgcaaaactggtcataatatgggcattttgggtagtggtacaattcaattcctgatttctctgttttgacacatcatcttttctgagacgcttgctctttgagagggtacccgctatctctgtttcccatacttccccttgagaagcctgcactgcttgctgatttgaaggggaggaaaatcatcgggagttttggagtgaat

SEQ ID NO: 551377 - DNA, 882 bp, Homo sapiens
gagctgagtagatgactttgctatgcagaaaagtactgttttctcaaaagtgaaagataatgaatgtcctttattgagaccttataaaccatgccaggaaagtctcaaggataatgggaggaaatgtagcagaaagaccactgaccttaattgggttgggttttagctgtagctctgtcttgattaaaatccatttaggaactagttcttctcatctggaaattaggtttgataacttctaatatctcttccaaatttgaaagttatagttttccagtatgttagggttcttaattcccaaattaaaaaaaaaaaaaacctttaattcactagtgcaggtaatagaatagccacgtgacactttaaattttttttaatttttctatttttccataggttattggggtgcaggtggtgtttggttatataagtaagctctttagyggtgatttgtgagattttggtacactcatcacctgagcagtatacactgcactatatttgtagtcttttatccctcgccctcctcccacacttccccccaagtccccaaagtccattgtatcatttttatgcctttgcaccctcatatcttagctcctacgtatcagtgagaatatatattgtttggttttccattcctgagttacttcacttagaataatagcctccaatctcatctaggtcgctgcaaatgctattaattcattcatttttattgctgagtagtattccatcataaatatatatctcacagtttctttatccactcattgattgatggtggataatcttttttggttccatatgggtatttggattggttccacaattttgcaattacaaattgtgctgctataaacatgcgtgtgcaagtatcct

SEQ ID NO: 551378 - DNA, 865 bp, Homo sapiens
agtgtccacccatgtaacaattagttgtggccaggaagcagggtcatatggtgggagaaaggcttatcagaattctacttctgcagcacagcaatgggggcctcagaggaagggacattgttgtgatctgggaagacaactcagtagctttccactggggagtacagataatatattttgtttgaggcacattattcagctcttaatggttgtaatttaacctgagcttggcgtcagatgcaatcagaacagacagacaccgattgtcttcaaatatttgaagatgcagtagccttggtgataatgtttagttctccactgaaggtgaaagataacatcttttagaaatctggaaatagatggcttccaggaagtttcagtattatgtttcaaaaaaagcaatccatcttcctyctttgcttttctctgagagtgaagaggtactctaccttcctaaaagcatttttaaaaatctgtagcttggaatagcaactgggaaataaatttaagaaacttactttataaactactggtttttactgcagttttttattgtctacacggtcaagagtttatgctgatatcaaaagtttggctagagttgtgtttgcttgaacctctgcaggcttaggttcctaggatcaaaatgaatttatcttaactgagtgcattatttcttttaccctctgatcctgattaagattttcagtagtgtgtgagtttcccacacatggattatttagcttggggactgtttaatattttttaaatcctaggtttatttccctcattctctcagacaaattttgggttgcacccatccagccccttcatccacacctgtgggatatatttcggaaaaaaa

SEQ ID NO: 551379 - DNA, 1133 bp, Homo sapiens
atgagaattgacttgtttagcttaaggaatgtttagaaccagggccctgccagagtttgtgtgcagaacactatcgaaacgtttcctgtatagttagtaaacaataagtcctattgttttgttggagttcaggtggccccaagtttgggggtggggtctctaaatctcttcctagctccttcctattcccgctacgcttagtttcagaaatgctggaacataccctcgaagcaaccactgaagcccttccagcagaggaaccgcagaactcaaaaatcctagctgtaggttgggtccacactactagggagacctccagcccaraaagcagcttggcgataagacggaagaatgaaggagctccagttttgaagcagggttgttttttgtttgtttgtttgtttttatttttatttttttcctccctttagagtagagagattagggctgagcagcttggacattggaccagatggaaaggtgggttttttttgtgtgtgtgtttttttttaagacagagtctcggccctgtcgcccaggctggagtgcagtggcacaatctcagctcactgcaacctctgcgtcccaggttcaagctattcttctgcctcagcctcccaactagctgggactgcaggcatgcgccaccatgcccagctcctttttgtatttttagtagagacggagtttcaccatgttggccaggatgaggtgggcatttttataggattcattccccaatagtataaaacctaaagacagtaaaaacacaaagttgtcagagatttgccatattttcaggtattaaaggaaaagaataaagtgtttaggaaaaatcttgaagcagaaaagaataaatgggatttaagatgaattgtttagcccgtctgccataatttaaagcagtttttcttcaagtgggggtgattttgtccctgaggggacatttggccatgtctggagacatttttagttgtctcagcttggggaaggaggtgtacatgacatctattctatataggccagggatgctactaaacctcttctagtgttgcacagcaaagaatcctcaaattcaaaattcctatagggtcaagtatttccacacattctaacttgctgtttcaagtctt

SEQ ID NO: 551380 - DNA, 647 bp, Homo sapiens
tgtaatctcagcactttggaaggctgagagagaaggatcgcttgagcccaggagttcaagacagtctctctacaaaatataaaaataaattaaaaagccaggtgcaatagtgtgtgcctgcagtcccagttacttgggaggctgagatgagaggatctcctgagcccagaaggtcaaggctgcagtgagccatgaccatgccactgcacttcaacctgagtgaaagagcaagttttagaatttctatcttggaatagaagccaaattgggaaccaagaggcgaatcacttaaagtcacctgacaaatcaaaaaccaaccttaaatcaagtcgtttctctttcttacttgctgcaatgawatttaaaatatatgttgccctggttgagactgtttgtcttggatcaacatcattctaaagaaaaagggtaaatttgacagggatgcttattttacatttcttcctttcgctttttcaagtttttacaactaaaataaatgaatagtgtagcagctggaatagaaatctcttactgattgggccataaaagtgggagctttcagaaacagcctattctccacaaaataaaataacctagacattgtccaaactgttcaatgctagacttgagaactatagttttaaagc

SEQ ID NO: 551381 - DNA, 534 bp, Homo sapiens
cacatgcttgaatgacttggcttgacttttagactctagtgatccgacatgagtagaacatgtcccagacagcaacttatttcagactagaaaggaaaacagaagaaaacataaggggacagaactatatccaacccacagcctggaaaaaaacatccaatcttcagcctgaagcagagccacctggcttaattgactttmgatcagccaaaccccagttgatgcacagatcctggggcataagaaagaacactgtttctgtaagccacttgtttttagagtggttttttatgtagcattattgtggcaatacctgatcaacaaaatgtggatctgacacaaaaatatatactggatcatttacaggacaatagttatccatctctccttttagtacaactgttaagaacataggtttcccaaattcctgaacagaaccaaggtgttttaacccagaaacagaccaagaccaaaactggggagaaaagccaaatcaaaaactactttagtgacaatgaagtgcaaaagagatca

SEQ ID NO: 551382 - DNA, 526 bp, Homo sapiens
cacacacacacacacacatataaaccagtgaaataattgtatagcacacttacttggatggtaagactgtcagagtggcccttgggtaagtcacttaaccactctctgcctccattttctccccttgtaagatgaggagcttggactagaagtctcaggtcccttccaattctggaactgataagtctcatcaaagtgataactttaacctatactggagtcggcaaatcatagcccttgsgtcaaatcttgtccactgcctgcttttgtatggtccatgagctaagaatggtttttacatttaaaaatcaaaaaagtatttcataacatggaaaaaattatattatcatttacatatcatctatgggtgctcttgcaacacaaggctagagttgagaagttgcaacagagacagtatgcctgcaaagcctaaaatatttactatctttacagaaaatgtttgctaaccccagacctaagccatcagaccatttgcatagtaagaaagtctgccgcaacactctca

SEQ ID NO: 551383 - DNA, 539 bp, Homo sapiens
aaagattctcagcttttacagatggtgaaaaatgctaaattaagaaatggctgaaggacagaggtcaaatcctgggcaccatcatgaaaacataatccaaagatgaagctgagatgtgactataaatcctttgttatgacctcagaaagatcaaaagtggtgcctcagagtaccagtttggtcacacaaaggccctctaaagtttttaaggctgtgactcacagattctttcaaaaacagggctcctgagaagcttaagagcatagtttttcagcagaatcacaaggtgggaaagggattatctcaaaaagatttttgggcgtgacttttgtctaatggaatggacccccaaaaattcataggtgattcacaaattttttaaaagaattatattagtagaaacattgccaactagaactcaaagggatagagacartatgaaatgaaaaaaggccttggtactcactttgcccctgtttcactgcaggttaagaaaaaatttcagctgcatacatgtactaactttcatgaaaaagaaa

SEQ ID NO: 551384 - DNA, 563 bp, Homo sapiens
agtatgatctgaattattaatgagaaagattaagatacagattccttccttcaagtgccttagtagtcacagacaggaggttaattataagactaaaagcaatcttgggttgttagaagaacttaaaggaaaacacctttcaacttcttgttatcaatcaatcatttttgtctttagaaatcaagaatttgaacaataacagctgctttcagaaataaaccgcgactttgtgcagcgtgtattacctgacgagctgaaatgcattgttaatgagactygcccgatcattactgctgactgctgtgtgtgttccttttaaaaggccagtcaaagagtcccatccatcatcctcgtaatgcacaatgtaatagccattcatgcccacattaaatttgatccattccacctcttctgggaggatgagcacatctagagtaaataaaataaatcaaagttccatttgctcccctgcctgaagaaagcttttctcatccaagattgggcaaggaaattagagaagagtttaatactgaaaaatttgaaaacatcacttatttctctca

SEQ ID NO: 551385 - DNA, 970 bp, Homo sapiens
aaaacactgcagcttgttaaatcacctcacctcacttcacctgtaacctacagtctatcatgcttttaagtgtgaaacatgttaccttggtgttttgttttacatatcccaactctgcagagacgtgataaaaaaaaatgcactagcgaatataggtggatcattatgtctttttgagatttctttgacaaagagacaaatgatttctttgccaacctcttgcctcccacccctcccattccttcacacacacaaagacatgaaggaccatttaaagacatgtaaaaatacaaaaaataaaattagccgggagtggtggcacacacctgtaatcccagctattccggagggtgaggcatgagaagctgaggcatgagaatcacttgaacccgggaggcggaggttgtgatgaaccaagatcacaccactgcactccagcctgggcgacagagcaagactccatctcaaaaaaaaaaaaaaaaaaaaaaaagacgtggttttgtataagaagtaaaaatagtaaacaaacgaaatgtttcagaakcctacctaggagcaaaagaataataatgaagtttgttttgtttcaacggatactgttttacatttgacttcatagagcctttttgagggaatatgatatcacaatttcacaaccaaaacccattatgtttttatctttaacacccgcctatcctcccacacagaacttcctctttagtttaagaatatgacagtttaagttattatgaagttacgattcattatcaaaggagataatgtgacattatctactatacccatctactgtcttcggaatcattgctctctaccatttaacacttgaaaaccattaatttggagagttaattataatacataataaatagcatgacaggaaaaaaatataagcaccctgaaaaacaaattgcatttgtttaaagaactgacaaacttgataatcaatgaa

SEQ ID NO: 551386 - DNA, 1164 bp, Homo sapiens
ttgaagattttctaatatgtacactccactggattgttttctttggtcatctattttagtcatctctaattaatccagggctggggaaggggaaaaaataaactttgtatgagttgcataaaaacaagatatcctagaaaagctacctggttatgtcatcagctaacagtttcaaaggctcaagtcttgactactccatttacattttttaagataagctcttgagatggtattaaccattttggtattaacaaattttgaggatcgtagaaaaatctagcttttctttcccaaaggcaacatcatattctttttacttttgatctggacataatctgtaagattgaagtaattagtatcttaactttatattaatatgaagtaatagcccatgcaagatgttgtttcttataaaccttatastactagcctgataaacaactctgttgggatattttaaaaggcaatgcattaattaaacaaatcattaaatcatagggtaccaaataaactgctacttccctaagggcttaacttatttgacatgaaaaatttatatactaggacaattgagtttttctggttttctaagctgtaaagactcatttattagatctatgtgtgtatcttttaatatgtgttattcaaaatcatctccagctgtagataattttacagtgcatctagtactggccagctctttactccttccatgttaaatgagtttggtttatgttaatgttgagattactgtattgtctaacctgcttaaaaaaaaaactatgaattatattgttttctagtttgcagagtattggctagaaattgtattgagtatttttccttttcactaaaatttatcatttacatacctgcctagccctcagtgtcacacatatcacattaatggtccaggtttgactttaggcaaaaggttggttaaaaaatctgacttaacactgggagactttcccagagtaagcagatgggataagggttcttctttctccaggcctgttgaatgcacaccagtctttaagttaactaatcatgggggtaccactctggtttatagttctagcatgaggtgaactaataggaatggttctttatcaaatgacacttagctgagtgtcagctgagacctcttggccctttatgaaa

SEQ ID NO: 551387 - DNA, 1164 bp, Homo sapiens
ttgaagattttctaatatgtacactccactggattgttttctttggtcatctattttagtcatctctaattaatccagggctggggaaggggaaaaaataaactttgtatgagttgcataaaaacaagatatcctagaaaagctacctggttatgtcatcagctaacagtttcaaaggctcaagtcttgactactccatttacattttttaagataagctcttgagatggtattaaccattttggtattaacaaattttgaggatcgtagaaaaatctagcttttctttcccaaaggcaacatcatattctttttacttttgatctggacataatctgtaagattgaagtaattagtatcttaactttatattaatatgaagtaatagcccatgcaagatgttgtttcttataaaccttatactactagcctgataaacaactctgttgggatattttaaaaggcaatgcaytaattaaacaaatcattaaatcatagggtaccaaataaactgctacttccctaagggcttaacttatttgacatgaaaaatttatatactaggacaattgagtttttctggttttctaagctgtaaagactcatttattagatctatgtgtgtatcttttaatatgtgttattcaaaatcatctccagctgtagataattttacagtgcatctagtactggccagctctttactccttccatgttaaatgagtttggtttatgttaatgttgagattactgtattgtctaacctgcttaaaaaaaaaactatgaattatattgttttctagtttgcagagtattggctagaaattgtattgagtatttttccttttcactaaaatttatcatttacatacctgcctagccctcagtgtcacacatatcacattaatggtccaggtttgactttaggcaaaaggttggttaaaaaatctgacttaacactgggagactttcccagagtaagcagatgggataagggttcttctttctccaggcctgttgaatgcacaccagtctttaagttaactaatcatgggggtaccactctggtttatagttctagcatgaggtgaactaataggaatggttctttatcaaatgacacttagctgagtgtcagctgagacctcttggccctttatgaaa

SEQ ID NO: 551388 - DNA, 590 bp, Homo sapiens
atgaaaccctcaattctttccctttccacaaaaagcctatagccttgttcagctgaacactactacagtaggtcacttcagttaagcccctaataaactgttgatagtcgagggtagttttttcttcggtctcaatagcccagtgttggacagtgcacttcaaatcattaaggttaatacagatttaaaaaagagattaactctggtggttaaggcctcaatttacaactcccacacatacacatgcattgagcaaggcacaagagtggattgaaatttcagtcaaattgtgggcagcttttcacagcctgagaaagtggcactctggtttgaaaagttggtcagctaaattcttcgtaagggaaaaaatttgagtcactgaaaaatacctctcagtacaacttacttacctttcaastaaccagtgaaaaggttaatgtctctccacaccatcaaagcaagacctagagactgtctggccccgcgttcactggggaacattctctctgcagctagatcaagttttccttaaaactctacacgttgtgaggaaaggccagcggggtggggtggggtgggtggcgggaaaa

SEQ ID NO: 551389 - DNA, 1501 bp, Homo sapiens
ggattgattccagagccaaataccaagactgcagatacaaaacccagtggatgcttaagttccttacataaaatggtatagtgttaatatttaacctatattcttccatacactttatctctagaatactgctaataactaataatatgtaaattctatgtaaatagttgttataaacaatgatttttattattatttttgtggttgtattgttacttttgtggaatatttttaatccccagttggttaaattgtggatgaagaacctactaatatagagggtcaactgtacattctcttgggaagtatattcagagctttcattagagacttaaaaggaacctatgttactcccctgccccacccccaaaaaagttaggaactactgcttggtgggggtaataaactatccttggaacatcagattctttagatacatcatagagaattggcatctaaagaaatattctgtggtaaccagcttccaagatggcctccagtgatctgcactttctggtattcagatttttgggtcatctcctttcaaattgtatcagggttgatctctgtggccaagaaaattcaggaggagttatgatgtgccactttggaggttaggttataaaaactgtggcttctgtcttggttacagtttctctttctccaatcactcactctggaggcagctagctgtcaactcacaaagacactcaagcagcctatggaagaaggccacatggtaaaatatggaggcctccagccaacagtcagcaaggaactgagacaagtcaacaaccatgtgagtgactcgagaagtgcttctctagctccagttgagacttgcagtagcagcagcctcagctggcggcttgactgcaatctcttgagagaccctaagctctcctgaattcttgatccttagaaactgtgtgaggtaagagatatttgttgctttaagatgctacatttggggataattcattacacagaaatagatatctcattcacattatcttgactggtcatgattaaaagaaaagtgaatgtaagaaaataaagtgtttttaatgctgaccttccctgttaatcctagaaaattagagtttgaaataataatgtcatagtcactattcctttaatcttgttggtaaataatgaatgcagcgtggcccattcaccgccagcacttggtcaccattgtgatctacacagcaagaagcagcctaacgacctgtctgttgaaacaaacaagttttcttttaagtgatttctttgtttccatttataaggcaccaactttcaaaggtgttctgggaaacctttcttgtatttcttctaagcaaaatcaattcaacagagagttcacgctttgcctgtgatcaatggggaagtaccagtgtagctttcttttttttcctatagggctgctcatagtccwccgatagactttacagctgttagttttgctgcagtagtgacttgctaaaatggtggctcattt

SEQ ID NO: 551390 - DNA, 446 bp, Homo sapiens
tgggctaggctgttgagcactgcagcttctaggtgtaagaagtgggtgtaataacctttgtcacaggatgtgtgtgttgtttcaatgatgtaagggaagggctttatccactgggtcacctgtctggatgcaacgtgatggttttctccagccaggcgctgtgccttgtggataaacaagaaggctctgaggccagacaggsttgggagaccccaaccctgccacttacaatctgtgtggacttcaatgaggtgcttaaattcaacatctagtaagctgtcaataacagctactcaataaagcgtcctgccagggcggggacttcgctttgccacatttgagcatctcccgccagctttgtactgttttctgtttgcccactagaggtcaggctaaccccaaagttcaaagctcctaaacccagcccaaaacaccatttctaaagt

SEQ ID NO: 551391 - DNA, 556 bp, Homo sapiens
tgcgaatgggataaatggggaacaaaattaataacctggtctgatatgacccaaagttaaaactaggggatgaaagctaggaggatgttatacaaagaaaataagagcctggttttagttgtataaaagaagaatctttggaacaggaattaagattctaaatggttaagagttgtcaaatttatatatgtcaaatccatatttgcaaagagttttagtataaggtagaacacagttgttttatatatatatatatatgtgtatatatatatatgtgtgtatatatatatatatgtatatatatrtgtgtgtgtgtatatatatatatgtatatatatatatatatatggtaacatttaatgaaaagttacattttatttccttgcaaaacaaacacattcctggaagacagtgtatagcacactatgccttctaaaattatgtgtacaaattgtgattgatatgtttctactctgaaattaccattatgtgtgtatagtatagatagtatagtctgtgctgctgttctggagagaattactgcaagcatcagcag

SEQ ID NO: 551392 - DNA, 556 bp, Homo sapiens
tgcgaatgggataaatggggaacaaaattaataacctggtctgatatgacccaaagttaaaactaggggatgaaagctaggaggatgttatacaaagaaaataagagcctggttttagttgtataaaagaagaatctttggaacaggaattaagattctaaatggttaagagttgtcaaatttatatatgtcaaatccatatttgcaaagagttttagtataaggtagaacacagttgttttatatatatatatatatgtgtatatatatatatgtgtgtatatatatatatatgtatatatatatgtgtgtgtrtatatatatatatgtatatatatatatatatatggtaacatttaatgaaaagttacattttatttccttgcaaaacaaacacattcctggaagacagtgtatagcacactatgccttctaaaattatgtgtacaaattgtgattgatatgtttctactctgaaattaccattatgtgtgtatagtatagatagtatagtctgtgctgctgttctggagagaattactgcaagcatcagcag

SEQ ID NO: 551393 - DNA, 977 bp, Homo sapiens
atttcaagggagttggaggaaagaaggttgatataaagagtattaaattaaatttctttctttttgctttgttttccttattttatttcttaagtaaagtaatttaggaacagggacctgctttcatttacctggttttgaatttgtttcaaaccagctttggggttattgtttgttttgcagctgtcattctagcttctattatattccatttcaaaaccaacattttaagtcattatcttttagatgcctgtcatatgggaaagtacctgctataaattgccagagagcaaaattttagttttctatacttactactattctttatattaaatggaaatagtggttagggtaccaaaaaaaattctttttctgttttcttcttaactttttgttctatatgaagctccagaaaaccagtgtttgacagagggattatacacaaaatgcaaaggttagaaagtatgtgaattatccatacatatggtctggggtttgggtattaatgagacttagaaatctggagtatttcgccttgatcctaaagccccatggaatgcttcgggtgtctcgccacatggtgaaggagatgggagaaaactggcagaggctctcccttcccacccagtttaactgattgagacagggcaattttgctggaagagtctgttggcaatctgtaggtctcagcttgctcctctatgccttgctgtgagaaagagctgttggaagagaatcaaggcaagaaacttttgctgctctggtttaaagcttatgaaagcaaatgatctccagggcactaatcctttcaccttagtaaacatgcaacagatctacaygaaagaaaatctgaaagacatcccatttctcctcctgcagcaactcaggctccacactgactaataggtgtctcatgagtctccacaggagaaacgtaagaaaacaaaaaagacagaagttggagggtaaaaaaaaaa

SEQ ID NO: 551394 - DNA, 629 bp, Homo sapiens
cccaggcggaagtacagtggcatgatcatgactcactgcaggcttgacctcccaggctcaagtgatcctcccaccttagcccctgccccaccctctccaccccaccctctcaaccccctgagtatctggaactacagataagcacctccatgcctgtttacttttttatttttattttttatttttggtagagatgggattcactatgtttctcaggctggtcttgaacccctaggctcaagcaatccacccaccatggcctcccaaagtgctgggattacaggcatgagccaccacatcctgcctccctgaaatatttgattccttcggaatttatttttgtatgtggtctaaggtagggttcaggttttgtctcattctagtgcaaactgacaaggcaaataacacctccttttccatgaagttgcaatgcgaccttgaacctatattatgttcttaaataaatcttcctgaatttgttcttggattccctcagtattttcctgagtcaatgctatattgtttttgtatttgtttctactttctctcttgatattttcccgagccaatgttttgttttgktttttttttatttttttttattttagagataggatctcactccatca

SEQ ID NO: 551395 - DNA, 2037 bp, Homo sapiens
gcaatgtttccctccgtttttgctccttttcctcagcaatttttttttttttgagacggagtctcgctctgtcgcccagttgggagtgcagcggtgtgatctcggctcactgcaacctctacattccaggttcaagcaattctcctgcctcggcctcctgaacagctggcactayaagtacgcgccaccacgcccagctactttttgtatttttagtagagatagggtttcgccatgttaattaggctggttttgaactcctcacctcgggtgatccactggccttggcctcccaaagtgctgggattacaggtgtaagccaccacacccaccttaatgactttctgatgccctcaggaaaaaggcaaaactcttttcatatcaagtgcaagatccttcacagtctggttcttatctgtggtctcatttctcctttcctcacactctgaccaagccagactgaacaacctgtaattcgtcaaacatatcaggtgaggtgtgaatgttctattcggctccaggttctgtgcatgctgttccctcctggcaggttcctgccacccctcccgcaaatacaggtaatctcctcaggtcacagcctctttgacatcttatttatttattttttttgagatggagtctcgctctgtcgcccacgctggagtgcagtggtgcgatctcagctcactgcaagctctgcctcctggattgatgccattctcctgcctcagcctcctgagtagctgggactacaggcacccgccaccatgcctggctaatttttttttttaatttttaggagagacggggtttcaccatgttagccaggatggtctcaatctcccgacctcgtgatccgcctgccttggcctcccaaagtgctgggattacaggtatgagccaccgtgcccagccctgtctttgacatcttatctgacaatctccccctccttctccaacacttggttaggtggcttttctatgttctcctataacacactacacttctcccagcacagaacttaccacactgcacaatggtctgtttgccaatcagagaagcaacatgccagcatggcagggaatccaggctttgggggcggacagttctgggtttgaaaatatccccacctctcactagctgtatgactatcagcaagttactaaatctctaggctttgaactcctcatctgtaacacgggctagaaacacctacctcacatggttgctgcaaagactaaatcagacaaggcaggaagaacatggtacaagcacctaagaagcactcagtaagtggtagttattttttattattttttgagacgaggtctgtcatgcaggctggagtacagcggcatgatcatggctcactgcagtctcaaccacccagactcaagcgatcctcccacctcagcctccagagtagctgggaccacagatgtgtaccatcacactcagctaattttaaaattatgaatatttgtagaggtgaggtctcactacgttgcccaggatggtctcgagctcctgacctcaagtgatctgcccacattggcctcccaaagtgctggaattacaggctaagccaccacacccggcctattatttccctattataatggaactaagagcagaaaccttataaattgctcaattttcccagcgttcagcataggtacctaggaaatatatgttgatgcatgaatgagaacagagaacaaagaagatggggggaaaaaatcaaaggtaggacccccagatttgaggagatatctaaatacctgagagaattatttttatttttatttattgtgaaacagagtctcactctgtcgcccaggctgaagtgcagaggcgtgatctcagctcactgcaacctctgccttccaggttcaagtgtttctcccgcctcagcctcccgagtagctgggattacaggcgcacgccactgtgcccgactaattttttgtatttttagtagagatggagtttcaccatgttggccaggctggtctcgaactcctgacctcaggtga

SEQ ID NO: 551396 - DNA, 2037 bp, Homo sapiens
gcaatgtttccctccgtttttgctccttttcctcagcaatttttttttttttgagacggagtctcgctctgtcgcccagttgggagtgcagcggtgtgatctcggctcactgcaacctctacattccaggttcaagcaattctcctgcctcggcctcctgaacagctggcactataagyacgcgccaccacgcccagctactttttgtatttttagtagagatagggtttcgccatgttaattaggctggttttgaactcctcacctcgggtgatccactggccttggcctcccaaagtgctgggattacaggtgtaagccaccacacccaccttaatgactttctgatgccctcaggaaaaaggcaaaactcttttcatatcaagtgcaagatccttcacagtctggttcttatctgtggtctcatttctcctttcctcacactctgaccaagccagactgaacaacctgtaattcgtcaaacatatcaggtgaggtgtgaatgttctattcggctccaggttctgtgcatgctgttccctcctggcaggttcctgccacccctcccgcaaatacaggtaatctcctcaggtcacagcctctttgacatcttatttatttattttttttgagatggagtctcgctctgtcgcccacgctggagtgcagtggtgcgatctcagctcactgcaagctctgcctcctggattgatgccattctcctgcctcagcctcctgagtagctgggactacaggcacccgccaccatgcctggctaatttttttttttaatttttaggagagacggggtttcaccatgttagccaggatggtctcaatctcccgacctcgtgatccgcctgccttggcctcccaaagtgctgggattacaggtatgagccaccgtgcccagccctgtctttgacatcttatctgacaatctccccctccttctccaacacttggttaggtggcttttctatgttctcctataacacactacacttctcccagcacagaacttaccacactgcacaatggtctgtttgccaatcagagaagcaacatgccagcatggcagggaatccaggctttgggggcggacagttctgggtttgaaaatatccccacctctcactagctgtatgactatcagcaagttactaaatctctaggctttgaactcctcatctgtaacacgggctagaaacacctacctcacatggttgctgcaaagactaaatcagacaaggcaggaagaacatggtacaagcacctaagaagcactcagtaagtggtagttattttttattattttttgagacgaggtctgtcatgcaggctggagtacagcggcatgatcatggctcactgcagtctcaaccacccagactcaagcgatcctcccacctcagcctccagagtagctgggaccacagatgtgtaccatcacactcagctaattttaaaattatgaatatttgtagaggtgaggtctcactacgttgcccaggatggtctcgagctcctgacctcaagtgatctgcccacattggcctcccaaagtgctggaattacaggctaagccaccacacccggcctattatttccctattataatggaactaagagcagaaaccttataaattgctcaattttcccagcgttcagcataggtacctaggaaatatatgttgatgcatgaatgagaacagagaacaaagaagatggggggaaaaaatcaaaggtaggacccccagatttgaggagatatctaaatacctgagagaattatttttatttttatttattgtgaaacagagtctcactctgtcgcccaggctgaagtgcagaggcgtgatctcagctcactgcaacctctgccttccaggttcaagtgtttctcccgcctcagcctcccgagtagctgggattacaggcgcacgccactgtgcccgactaattttttgtatttttagtagagatggagtttcaccatgttggccaggctggtctcgaactcctgacctcaggtga

SEQ ID NO: 551397 - DNA, 2037 bp, Homo sapiens
gcaatgtttccctccgtttttgctccttttcctcagcaatttttttttttttgagacggagtctcgctctgtcgcccagttgggagtgcagcggtgtgatctcggctcactgcaacctctacattccaggttcaagcaattctcctgcctcggcctcctgaacagctggcactataagtacgcgccaccacgcccagctactttttgtatttttagtagagatagggtttcgccatgttrattaggctggttttgaactcctcacctcgggtgatccactggccttggcctcccaaagtgctgggattacaggtgtaagccaccacacccaccttaatgactttctgatgccctcaggaaaaaggcaaaactcttttcatatcaagtgcaagatccttcacagtctggttcttatctgtggtctcatttctcctttcctcacactctgaccaagccagactgaacaacctgtaattcgtcaaacatatcaggtgaggtgtgaatgttctattcggctccaggttctgtgcatgctgttccctcctggcaggttcctgccacccctcccgcaaatacaggtaatctcctcaggtcacagcctctttgacatcttatttatttattttttttgagatggagtctcgctctgtcgcccacgctggagtgcagtggtgcgatctcagctcactgcaagctctgcctcctggattgatgccattctcctgcctcagcctcctgagtagctgggactacaggcacccgccaccatgcctggctaatttttttttttaatttttaggagagacggggtttcaccatgttagccaggatggtctcaatctcccgacctcgtgatccgcctgccttggcctcccaaagtgctgggattacaggtatgagccaccgtgcccagccctgtctttgacatcttatctgacaatctccccctccttctccaacacttggttaggtggcttttctatgttctcctataacacactacacttctcccagcacagaacttaccacactgcacaatggtctgtttgccaatcagagaagcaacatgccagcatggcagggaatccaggctttgggggcggacagttctgggtttgaaaatatccccacctctcactagctgtatgactatcagcaagttactaaatctctaggctttgaactcctcatctgtaacacgggctagaaacacctacctcacatggttgctgcaaagactaaatcagacaaggcaggaagaacatggtacaagcacctaagaagcactcagtaagtggtagttattttttattattttttgagacgaggtctgtcatgcaggctggagtacagcggcatgatcatggctcactgcagtctcaaccacccagactcaagcgatcctcccacctcagcctccagagtagctgggaccacagatgtgtaccatcacactcagctaattttaaaattatgaatatttgtagaggtgaggtctcactacgttgcccaggatggtctcgagctcctgacctcaagtgatctgcccacattggcctcccaaagtgctggaattacaggctaagccaccacacccggcctattatttccctattataatggaactaagagcagaaaccttataaattgctcaattttcccagcgttcagcataggtacctaggaaatatatgttgatgcatgaatgagaacagagaacaaagaagatggggggaaaaaatcaaaggtaggacccccagatttgaggagatatctaaatacctgagagaattatttttatttttatttattgtgaaacagagtctcactctgtcgcccaggctgaagtgcagaggcgtgatctcagctcactgcaacctctgccttccaggttcaagtgtttctcccgcctcagcctcccgagtagctgggattacaggcgcacgccactgtgcccgactaattttttgtatttttagtagagatggagtttcaccatgttggccaggctggtctcgaactcctgacctcaggtga

SEQ ID NO: 551398 - DNA, 2037 bp, Homo sapiens
gcaatgtttccctccgtttttgctccttttcctcagcaatttttttttttttgagacggagtctcgctctgtcgcccagttgggagtgcagcggtgtgatctcggctcactgcaacctctacattccaggttcaagcaattctcctgcctcggcctcctgaacagctggcactataagtacgcgccaccacgcccagctactttttgtatttttagtagagatagggtttcgccatgttaattaggctggttttgaactcctcacctcgggtgatccactggccttggcctcccaaagtgctgggattacaggygtaagccaccacacccaccttaatgactttctgatgccctcaggaaaaaggcaaaactcttttcatatcaagtgcaagatccttcacagtctggttcttatctgtggtctcatttctcctttcctcacactctgaccaagccagactgaacaacctgtaattcgtcaaacatatcaggtgaggtgtgaatgttctattcggctccaggttctgtgcatgctgttccctcctggcaggttcctgccacccctcccgcaaatacaggtaatctcctcaggtcacagcctctttgacatcttatttatttattttttttgagatggagtctcgctctgtcgcccacgctggagtgcagtggtgcgatctcagctcactgcaagctctgcctcctggattgatgccattctcctgcctcagcctcctgagtagctgggactacaggcacccgccaccatgcctggctaatttttttttttaatttttaggagagacggggtttcaccatgttagccaggatggtctcaatctcccgacctcgtgatccgcctgccttggcctcccaaagtgctgggattacaggtatgagccaccgtgcccagccctgtctttgacatcttatctgacaatctccccctccttctccaacacttggttaggtggcttttctatgttctcctataacacactacacttctcccagcacagaacttaccacactgcacaatggtctgtttgccaatcagagaagcaacatgccagcatggcagggaatccaggctttgggggcggacagttctgggtttgaaaatatccccacctctcactagctgtatgactatcagcaagttactaaatctctaggctttgaactcctcatctgtaacacgggctagaaacacctacctcacatggttgctgcaaagactaaatcagacaaggcaggaagaacatggtacaagcacctaagaagcactcagtaagtggtagttattttttattattttttgagacgaggtctgtcatgcaggctggagtacagcggcatgatcatggctcactgcagtctcaaccacccagactcaagcgatcctcccacctcagcctccagagtagctgggaccacagatgtgtaccatcacactcagctaattttaaaattatgaatatttgtagaggtgaggtctcactacgttgcccaggatggtctcgagctcctgacctcaagtgatctgcccacattggcctcccaaagtgctggaattacaggctaagccaccacacccggcctattatttccctattataatggaactaagagcagaaaccttataaattgctcaattttcccagcgttcagcataggtacctaggaaatatatgttgatgcatgaatgagaacagagaacaaagaagatggggggaaaaaatcaaaggtaggacccccagatttgaggagatatctaaatacctgagagaattatttttatttttatttattgtgaaacagagtctcactctgtcgcccaggctgaagtgcagaggcgtgatctcagctcactgcaacctctgccttccaggttcaagtgtttctcccgcctcagcctcccgagtagctgggattacaggcgcacgccactgtgcccgactaattttttgtatttttagtagagatggagtttcaccatgttggccaggctggtctcgaactcctgacctcaggtga

SEQ ID NO: 551399 - DNA, 2037 bp, Homo sapiens
gcaatgtttccctccgtttttgctccttttcctcagcaatttttttttttttgagacggagtctcgctctgtcgcccagttgggagtgcagcggtgtgatctcggctcactgcaacctctacattccaggttcaagcaattctcctgcctcggcctcctgaacagctggcactataagtacgcgccaccacgcccagctactttttgtatttttagtagagatagggtttcgccatgttaattaggctggttttgaactcctcacctcgggtgatccactggccttggcctcccaaagtgctgggattacaggtgtaagccaccacacccaccttaatgactttctgatgccctcaggaaaaaggcaaaactcttttcatatcaagtgcaagatccttcacagtctggttcttatctgtggtctcatttctcctttcctcacactctgaccaagccagactgaacaacctgtaattcgtcaaacatatcaggtgaggygtgaatgttctattcggctccaggttctgtgcatgctgttccctcctggcaggttcctgccacccctcccgcaaatacaggtaatctcctcaggtcacagcctctttgacatcttatttatttattttttttgagatggagtctcgctctgtcgcccacgctggagtgcagtggtgcgatctcagctcactgcaagctctgcctcctggattgatgccattctcctgcctcagcctcctgagtagctgggactacaggcacccgccaccatgcctggctaatttttttttttaatttttaggagagacggggtttcaccatgttagccaggatggtctcaatctcccgacctcgtgatccgcctgccttggcctcccaaagtgctgggattacaggtatgagccaccgtgcccagccctgtctttgacatcttatctgacaatctccccctccttctccaacacttggttaggtggcttttctatgttctcctataacacactacacttctcccagcacagaacttaccacactgcacaatggtctgtttgccaatcagagaagcaacatgccagcatggcagggaatccaggctttgggggcggacagttctgggtttgaaaatatccccacctctcactagctgtatgactatcagcaagttactaaatctctaggctttgaactcctcatctgtaacacgggctagaaacacctacctcacatggttgctgcaaagactaaatcagacaaggcaggaagaacatggtacaagcacctaagaagcactcagtaagtggtagttattttttattattttttgagacgaggtctgtcatgcaggctggagtacagcggcatgatcatggctcactgcagtctcaaccacccagactcaagcgatcctcccacctcagcctccagagtagctgggaccacagatgtgtaccatcacactcagctaattttaaaattatgaatatttgtagaggtgaggtctcactacgttgcccaggatggtctcgagctcctgacctcaagtgatctgcccacattggcctcccaaagtgctggaattacaggctaagccaccacacccggcctattatttccctattataatggaactaagagcagaaaccttataaattgctcaattttcccagcgttcagcataggtacctaggaaatatatgttgatgcatgaatgagaacagagaacaaagaagatggggggaaaaaatcaaaggtaggacccccagatttgaggagatatctaaatacctgagagaattatttttatttttatttattgtgaaacagagtctcactctgtcgcccaggctgaagtgcagaggcgtgatctcagctcactgcaacctctgccttccaggttcaagtgtttctcccgcctcagcctcccgagtagctgggattacaggcgcacgccactgtgcccgactaattttttgtatttttagtagagatggagtttcaccatgttggccaggctggtctcgaactcctgacctcaggtga

SEQ ID NO: 551400 - DNA, 525 bp, Homo sapiens
atggggccgttggctggggagagagtgagcagtgaccagggaggcagccgggaagcccaktccagcccctccccaggccttcagggagcagatgcctgggacaggacccaggggagcgccggctgagacagtgtgcggaccacacacctgcccttcatcaagaggcaagccaaggtcccagagggtcaggagcaggctgccggcagaaggaagctacagtgttgagttgagttgtctttaagttggattctggggatttaattgtcaataatttcctgtgggtctctgtctttgctgtcacccattaaaaagcctttctcacccccaagattttctatttctctttctttttttttttgatacatacaaggtctcactctgttgctcaggctggacagcagtggcaagatcatagctcactgcagcctcaaacccctgggctcaaatgatcctctcacctcagcctcctgagtagtttgggactacaggtacacaccaccatacactgctatttaaaaatttttt

SEQ ID NO: 551401 - DNA, 525 bp, Homo sapiens
atggggccgttggctggggagagagtgagcagtgaccagggaggcagccgggaagcccagtccagcccctccccaggccttcagggagcakatgcctgggacaggacccaggggagcgccggctgagacagtgtgcggaccacacacctgcccttcatcaagaggcaagccaaggtcccagagggtcaggagcaggctgccggcagaaggaagctacagtgttgagttgagttgtctttaagttggattctggggatttaattgtcaataatttcctgtgggtctctgtctttgctgtcacccattaaaaagcctttctcacccccaagattttctatttctctttctttttttttttgatacatacaaggtctcactctgttgctcaggctggacagcagtggcaagatcatagctcactgcagcctcaaacccctgggctcaaatgatcctctcacctcagcctcctgagtagtttgggactacaggtacacaccaccatacactgctatttaaaaatttttt

SEQ ID NO: 551402 - DNA, 528 bp, Homo sapiens
taatttattaaaataacttcatattatgaagttgactataattaaaagggaagtatttataatagtccttatagatttgtagagatctggctttcatataaaaatatataaatatactaaagattggttagaatgaaaaattgtcttaaagtattgatttactcaatraaattataagatattttaattttttaacccaaaagtttaactcttactgcgtcttgccagttttattctcttttgagaaggcttgagaggatctcaaatttttcatgagctcatctaacaatttttttcttacagcagttagcctctaacagagttaacttctaacgttgttagcttctaactgctatgattgcctgatgctaaaaatcttttatattaaagttcttaataaaatgttttatttcaatatagtattctgcactcttgggttttttaaaatgtctatatttgtctatgaaaccaaaatcttcacttgtaatccaagacacattcttcctatgtctaattaatcaaatactt

SEQ ID NO: 551403 - DNA, 533 bp, Homo sapiens
tattttattttttgagacagggtctcactctatcgcccagactggaatgcagtggtgcgatcatggctcactgcagccacaacctcctgggctcaagcaatcctaccacctcagtatcccaagtagctgggaccacaggtgcacgccaccacacctggctaactttatttttttagcatttrcatctaagaggataatttttgtattttttgtagagacggtgtctcactatgttacccaggctgatttcaaactcctggcgtcaagcaatcatcctgcctcagacaccaaaagtgttgtgatcacaggcgtgagccaccatgcccagcccatttctcagttgttattaatagttgcaaacaagactaacaataatagatttttttggtataaagtttagtggtttacaaagccctttatcatatataagacttttttttttttttttttttttttttttttttgagatggagtctcgcgctgtcgcccgggctggagtgcaatggcgcaatctcgactcactgcaacctccg

SEQ ID NO: 551404 - DNA, 553 bp, Homo sapiens
agcccaagagtaaggggaaggttaatacaactaataaggagtagcaagacaggtagcccttctgtgaccatgcagctgtcctgtatcatgatggtggtggtggtcacacaaatctgtacgtgtgatcaaatgcgtaggaccacacacacacacacacacacacacayacacacacacacacacagaaaacacacaaaaatgggtggagacttcgtgaggtctggttaatagtattgtgcccacatgaacttcctgctcttggtattgttgcactacagttataggcgatgttactacggaggaagctgagagaagggttcaaggtgcttctggcactatttttgcaacttctgtgagcctgtgatcatggaaaaatggaaaaataaggaaactaagttgcttttctttataagcctgaaatgatgcattctgggatcacatggcctattttactgttaatttggaggggggataccttgtttatgatggaatctactttgcacttgggctcccacagactgtacaggcccagaaccctaattcaaacgcaacc

SEQ ID NO: 551405 - DNA, 553 bp, Homo sapiens
agcccaagagtaaggggaaggttaatacaactaataaggagtagcaagacaggtagcccttctgtgaccatgcagctgtcctgtatcatgatggtggtggtggtcacacaaatctgtacgtgtgatcaaatgcgtaggaccacacacacacacacacacacacacatacacacacacacacacagaaaacacacaaaaatgggtggagacttcgtgaggtctggttaatagtattgtgcccacatgaacttcctgctcttggtattgttgcactacagttataggcgatgttactayggaggaagctgagagaagggttcaaggtgcttctggcactatttttgcaacttctgtgagcctgtgatcatggaaaaatggaaaaataaggaaactaagttgcttttctttataagcctgaaatgatgcattctgggatcacatggcctattttactgttaatttggaggggggataccttgtttatgatggaatctactttgcacttgggctcccacagactgtacaggcccagaaccctaattcaaacgcaacc

SEQ ID NO: 551406 - DNA, 553 bp, Homo sapiens
agcccaagagtaaggggaaggttaatacaactaataaggagtagcaagacaggtagcccttctgtgaccatgcagctgtcctgtatcatgatggtggtggtggtcacacaaatctgtacgtgtgatcaaatgcgtaggaccacacacacacacacacacacacacatacacacacacacacacagaaaacacacaaaaatgggtggagacttcgtgaggtctggttaatagtattgtgcccacatgaacttcctgctcttggtattgttgcactacagttataggcgatgttactacggaggaagctgagagaagggttcaaggtgcttctggcactatttttgcaacttctgtgagcctgtgatcatggaamaatggaaaaataaggaaactaagttgcttttctttataagcctgaaatgatgcattctgggatcacatggcctattttactgttaatttggaggggggataccttgtttatgatggaatctactttgcacttgggctcccacagactgtacaggcccagaaccctaattcaaacgcaacc

SEQ ID NO: 551407 - DNA, 553 bp, Homo sapiens
agcccaagagtaaggggaaggttaatacaactaataaggagtagcaagacaggtagcccttctgtgaccatgcagctgtcctgtatcatgatggtggtggtggtcacacaaatctgtacgtgtgatcaaatgcgtaggaccacacacacacacacacacacacacatacacacacacacacacagaaaacacacaaaaatgggtggagacttcgtgaggtctggttaatagtattgtgcccacatgaacttcctgctcttggtattgttgcactacagttataggcgatgttactacggaggaagctgagagaagggttcaaggtgcttctggcactatttttgcaacttctgtgagcctgtgatcatggaaaaatggaaaaataaggaaaytaagttgcttttctttataagcctgaaatgatgcattctgggatcacatggcctattttactgttaatttggaggggggataccttgtttatgatggaatctactttgcacttgggctcccacagactgtacaggcccagaaccctaattcaaacgcaacc

SEQ ID NO: 551408 - DNA, 571 bp, Homo sapiens
ttttttttttttttggtgacgagaaaagttgagagatgcaaatatctacctacttggttcgtgttttcccccttcaaaatctccctccctccccaactctgtataaaagaatgcaatgctcattacaaaccagtgtggctttgtcaaaaataagtcggactcaaagaacctcattggaaaaatgtggggtgggaggccaatggcagaagatgaggtgagctccctggtggagtaaccatttctggtgtgtgctggattggcacactgtcatctatsaatgcgtccatgaaggaccccagcccgttagacggagagagggttggaagaatcctcagtgaatgaagtgcaggcagctgctcctttcccaggttgatctgtttgctgctaggtggtagagatggaggctcaaacacacagctccctagctactggcttgaactataatccatacattagtaaaaggcctaaagtgctcagatcattttaaacagggatatttggccagaattatactagtatttgaaagcaacagagctctccaccttaacatttctttaacgtggctcagaat

SEQ ID NO: 551409 - DNA, 578 bp, Homo sapiens
atggcttatattaggtattcaataaatagctgttgtttgctgtagatttaagtatttttttcctgattaaaaataaagttgagcttcatctattcatccctcctcccccaacccctggcaactgctrcttggatctgatccagtggagcacagaggatcttgagggcagtgaaattactctgtgtgacactataatggtggatatatatgagtacatgtttgtccaaacccacaaaatgtacaccacagaaagcgaaccctaaagtaaactatcaactctgggtgataacgacctgttgatgtaggcttatcagtggtaataaacgaatcactctggttgaggggtgttgatagtgagggaaggtatggatttgggggacagggggcatgtgggaaatccctgtaccttccacttagtaaacctgaaactgctctaaaaataataataaagtctattttaaaaagttgaaaagcattataattaggagattgactaaagaccatgaattggcaaatgatagcctgtgggccaaacctggccacaggctgtttttgtaaataaagttttattgggacac

SEQ ID NO: 551410 - DNA, 578 bp, Homo sapiens
atggcttatattaggtattcaataaatagctgttgtttgctgtagatttaagtatttttttcctgattaaaaataaagttgagcttcatctattcatccctcctcccccaacccctggcaactgctacttggatctgatccagtggagcacagaggatcttgagggcagtgaaattactctgtgtgacactataatggtggatatatatgagtacatgtttgtccaaacccacaaaatgtacaccacagaaagcgaaccctaaagtaaactatcaactctgggtgataacgacctgtygatgtaggcttatcagtggtaataaacgaatcactctggttgaggggtgttgatagtgagggaaggtatggatttgggggacagggggcatgtgggaaatccctgtaccttccacttagtaaacctgaaactgctctaaaaataataataaagtctattttaaaaagttgaaaagcattataattaggagattgactaaagaccatgaattggcaaatgatagcctgtgggccaaacctggccacaggctgtttttgtaaataaagttttattgggacac

SEQ ID NO: 551411 - DNA, 674 bp, Homo sapiens
gatgggcttggcggcaaagagtataaagtggactctgagccataaagtggactctgagccaattcgacttaacactgccacaaactttctcattctgccagtgtggtatgatgtgaactacatggaattttgaaatcacagagacccaaattccaattctgtctcttaccctcattaactagagaacatgggtgacctattttaacctcatagagtggagtttcratttccagatctataaaatggggattatgatacacacctcttgcggtggttttaacttgggttgatttgatcagataatgtatgtacaaatttttgcaaacaataaagactataaaatgatagttagtttggtataattataaggaaaatcaccctcttatgagagtacatctatctagcacattgctttctggaaatggctagttctatatttactcactccaaaaaagggaaattgattcttgggtctttgttgcaatgttacgcccctacaaatgtaagggccaaaacctccctgcgtgacttgatggtgaagccatttcaaatggaagaacacaaagcatcctattttggggacagtttttgccactcagaaaacctgtcattaatgacctgtctgtcacctgtgtctacggtcctctttgataaattgcacgggtgttgaaacc

SEQ ID NO: 551412 - DNA, 650 bp, Homo sapiens
tactggtaagccaatatgcagatccacaataatggaaaagtggaaacaacctatgtccaccaacggatgaatgcataaacaacatgtggtatattcaaaataccacgaaatattattcagccataaaaaggagtatattagaactctgatttaatgagtcagattacatgctacatatatgtaatgcatgctaaaacatggctgattacaagctacaacatggctgarccacagaaacattaggctgagttttaaaaagccaaatagaaaaggccatatgttatacaattccatttgtatgaaatatacaaaataggcaaaagccacagaaacagaaaacagatgaatgagtgcccggggctgggaaaacagcaagtgacacttaataggcatgcggtttccgctacataaaaaatgaacattgaaaatgttctggaactagacaacattgtgaaagtactaaatgccattgaaatgtacatttgaaatgattaaaatggaaaatactatgttatactgtatatattttaccacaataaaaagtagtaaatatatataagtacttttgacatcaaaaaattctaatacaaccattaatacacctatcctgctatttttcttttctactttcttaatatttttgcttccat

SEQ ID NO: 551413 - DNA, 1239 bp, Homo sapiens
tgtccaacatgacaaaacaggctgagtttttctgaaacggtgagcaaatctttctttctcctctttacaccctgaatggagtggcaaatcctgtcattcttactcctctctgggataatccccatggcttacttctcattgaattctaggggtggtggaaaggcagcactcgcttatgcattttatttacttgtragtaagagcctttcttctttgttcaagggtgaattcctttagagaaccagaatctgcaaaaatctttgtctttggaactggaaattaacaatttaacttaaaaaacatcattgggacagtttaaccagggtggtggtggggttctaattattttttttcaaatgaaagtaaaaatggtggccagaagttaagccaagtattagattcaaagagaaggataaaataaaatttatttttattttatggcaaaataaaatttatttttattttatggcaaaataaaattaggagaatagaggacatagtgtgttaaacaatatagcttagtaaacattgcttaagactgaagctgttagaagaaccttacagaaacctgcaacatgtgcttagagataaaaaaagtaattcacgtttttgagtgttgtccactaagcactattttatgtattttgcatataatgtcccatttaattttcaaactatttgagatgttgtaggaaatagaggtaccaagagtcaaagtcaattgtttatagttccaagtctacctttagtgcagcactgtttagtacaactatctgtgactatggaaatgtttttaatctgtactgtcccatatggcagttacaaaacccatgtaactatgtaactaatgagtacatgaatgtggttactgtaactgagaaaatgccacatttagctggtggcttccagattggacaacctagctctggagctgaagcatgtaaccataatgccataccaccaacttttgccggatagtcttgcagtactaggtagtgcaatctccatatttgtaataacacttgaaagctaaaaaaggagctagccattaaaagatgccagaaaacaacactctgggcctaggaaacacaagataaagatgaacaaattagacatatatttttagtgttctcttggaatttagtggatttgaggaaagattgaaatgggatgaagctggagaggttagcgaaaaattgtacacccagaagtttagctatctggaaagtggagagaatg

SEQ ID NO: 551414 - DNA, 1454 bp, Homo sapiens
gatgatggagatgggtcagacccgggggaggtggcgggggaccctgggactggtgatttagtgggaagaggcagccttcacacagaatccgcaggcctctggtgtggttggtttcagttccctttatgttcacagacccccacccccacacaacagatttcctgacatttaatatttgttttggcttttttggactgtggggtctccttgtatcagtccaatgtggagtcgccccaggatggaagtgcccttctggtaaaatcacacgttcaatctgaggaactggcttgtgattttaaaaggccgctaggacttgggatgtggcctgactctctttggacagtgcacggaagtgaagggatggatgtaacattggcaccaggtttagacattggcttcatggagaatttactccatgggaattttgaaacttgaaacctgtcactttttgtgcacaggcagctgtagggtcttaactcaggggactttggagtgtttgctagggtcattcctctgccccatgctgtggctgaccccatgatctcaaccttgtatttattccattggtttatctccagcttctagaatgaagacctttacaaaaaaaaaaaaaaccaaactcaactgtaataaaccagtttttgttttgagacggagttttgctcttgccgcccagcctggagtgcagaggtgcgatctcggctcactgcaacctctgcttcctcagttcaagcaattctcctgtctcagcctcctgagcagctgggattgcaggcacatgccaccatgcctttgtatttttagtagagacaggatttcatcatattggtcaggctggtctcaaactcctgacctcaggtgatccgcctgccttggcctcccaaagtgttgggattacatgtgtgagtcaccatgcctggctaataacccagtcctttagagttgctgcttattttccttcttcatagcacacaccggtctgagaaacccaggctattagacagtttgggatctctgaagtattagcctagtaaccacagctgtaagttgactcaggcgcggaaaaaagaaaagctggcaggctttcccagtgattgttttcttcctttgcttgctctgcaatctggccttggaaacacagggcctatatttcagtgttgaggtttggctgcttgaggggttgacctagttcacaggcacccaaactttgtggattaaatacacccatttcccctccttttttttttttgagacggagtctcgctctgttgcccagactggagtgcagtgacgtratctcggctcactgcaacctctgcctcccaggttccagtgattctcctgcctcagcctccctagtagctgggactacaggtgtgtgcctccatgcctggctaatttttgtatttttagtagagacagggtttcgactacggccataccaccctgaacgc

SEQ ID NO: 551415 - DNA, 1702 bp, Homo sapiens
  misc_feature 247, 248, 249, 250, 251, 252, 253, 254, 255, 256, 257, 258,259, 260, 261, 262, 263, 264, 265, 266, 267, 268, 269, 270,271, 272, 273, 274, 275, 276, 277, 278, 279, 280, 281, 282,283, 284, 285, 286, 287, 288, 289, 290, 291, 292, 293: n = A,T,C or G
  misc_feature 294, 295, 296, 297, 298, 299, 300, 301, 302, 303, 304, 305,306, 307, 308, 309, 310, 311, 312, 313, 314, 315, 316, 317,318, 319, 320, 321, 322, 323, 324, 325, 326, 327, 328, 329,330, 331, 332, 333, 334, 335, 336, 337, 338, 339, 340: n = A,T,C or G
  misc_feature 341, 342, 343, 344, 345, 346: n = A,T,C or G
tcatagcttagctcccacttatgagtgagaacatacaatatttggttttccattcctgagttacttcacttagaatactaatctccagttccattctttttttttttttaacagcttataagttcctaggtccagtgtttcctgtctctaatcccagtttctcaggagggtgaggcgggagcaggcccctcctaccctcctgttcggtcattttagcagatgactttcaccctcatgccttttgcannnnnnnnnnnnnnnnnnnnnnnnnnnnnnnnnnnnnnnnnnnnnnnnnnnnnnnnnnnnnnnnnnnnnnnnnnnnnnnnnnnnnnnnnnnnnnnnnnnngcaagaagggattatttttaactttatgaataggttatatgttcacatggacaccattgaaaaaaaaataatctaaaaagtatacatgaaaagttctactcccaccctgtctccctttgttctaataaggtgcctcccycatacctaaaatctcacttgttagtgtcttttaaagttctatatgtaactataaacaaatatgaacatatattctttgagacagagtcttgttctttttttctttgagatggagtcttgctctgttgcccaggctggagtacagtggcgcgatctcggctcactgcaacctctgcctcccagaatcaagcgattctcctccctcagcctcccaagaagctgagactacaggcatgcactaccatgcccagctaagttttgtatttttagtagagacacggttttaccatgttggccaggctggtctccaactcctgacctcaagcgatccacccacctcagcttcccaaagtgctgggattataggcgtgagccactatgcctgaccaagacagagtcttgttctgtggctcaggctggagtgctgttgtgcagtcgtggctcactgcagactcaaactcctgggtttaagtgatcctcccacctcagcctcccaaaatgctgggattacagggataaacttatttcttatccccttctttttagttacacaaaagatagcactgctttgcacttgcttttatcagcaaacaataatgtgtcttgacgatcattcccctgcagagcataaagagcttttttttttttaataggttcatagtatttcattgtaaggaaattctataattgatttaaactaatcctctattgatggctatttgggctgtcgcccatgttttgctagcacaaacaatgccttagtgaataaccttttacatacgtcatttttgtgtgcaagctttccagtttcacatcggaaaatgggaacagtccaggtaaatggcccatggagcatttctgcaagagcagcaaccaggaaaataaaaggctggagaaccactgctggaacaggtgccccatctccttgtggtggtagcaacagtaccacagcatcttgtgagtgacctgtggctgttctccagtgtatgccagagtcagattctggcacctgtgggtcactcttcttcatgctcttttcttttcttattatttttgcctacttggaattctttttttttcaaatttgagacagagtcttgctctgtcgcccaggccggagtgcagtgatgcgatattggctcactgcaacctcttcatcctgggttcaagcgattctcctgcctcagcctcccaagtagctgggattacaggtgcccg

SEQ ID NO: 551416 - DNA, 1077 bp, Homo sapiens
atttagtaagctaatataatatttaagtcagacttttcctactaataaaattccagatccagatggcattacttatgagttactcaaatagttaaaatataaatagcaccagtcttaaacaaaattatacagtgtgtagcatatatgtattgattcaaataccagagtcgttggaagaataaaaatttccaagtcaatgtctcatatgcacataattggawatatcttgataaaacattaaaaatgaacactgtattatctaaacaagatgatatacaatatggcagtagggattgtttccatttgaatttcagtcaatgcaatttaccacataccaaaaatgtgcttagttcaaaccatttgaaaaagcatttcatgaaattcaccacccatttatgaataagctccacatgaactggaaataagaggaaaattaatctgataaagagatgctacaagcaccaaacactttacagataacattgtacttaatggtaaattattgaaaattttcccagagactgggaaatagaaaaaggattccattactgctactttataaaaaaaaatgttatcagataatctaaccaatataataaaacatgaaaaaaatatgtatatgtctatttctatctatctctattgacagataaaaatagacagagatgggaaagacagaaattaagaactccattatttacacaattaggtattccatttccatgcactagcaacaagctatcagaatatgaaatggaaaaagaaagggtaactgttgcaatagtatcaacgtaacatcaaacactcaaggaaaatgtaatttttaagatatgcaatacctttacaaagcgaaagagaaagacagaacaaagaagactaaaataaagtaataaatatataataggctagaataatctatttttaaaagacgtaattctcaacaaggatttttatgttttgttttgtcttttttgtttgttgtgcatccactagttgttttacattttatatgcaaatgaaatgagtaacaaccaagatccttataaagcacgttgctggataacttaaactatcaaa

SEQ ID NO: 551417 - DNA, 1077 bp, Homo sapiens
atttagtaagctaatataatatttaagtcagacttttcctactaataaaattccagatccagatggcattacttatgagttactcaaatagttaaaatataaatagcaccagtcttaaacaaaattatacagtgtgtagcatatatgtattgattcaaataccagagtcgttggaagaataaaaatttccaagtcaatgtctcatatgcacataattggatatatcttgataaaacattaaaaatgaacactgtattatctaaacaagatgatatacaatatggcagtagggattgtttccatttgaatttcagtcaatgcaatttaccacataccaaaaatgtgcttagttcaaaccatttgaaaaagcatttcatgaaattcaccacccatttatgaataagctccacatgaactggaaataagaggaaaattaatctgataaagagatgctacaagcaccaaacactttacagataacattgtacttaatggtaaattattgaaaattttcccagagactgggaaatagaaaaaggattccattactgctactttataaaaaaaaatgttatcagataatctaaccaatataataaaacatgaaaaaaatatgtatatgtctatttctatctatctctattgacagataaaaatagacagagatgggaaagacagaaattaagaactccattatttacacaattaggtattccatttccatgcactagcaacaagctatcagaatatgaaatggaaaaagaaagggtaactgttgcartagtatcaacgtaacatcaaacactcaaggaaaatgtaatttttaagatatgcaatacctttacaaagcgaaagagaaagacagaacaaagaagactaaaataaagtaataaatatataataggctagaataatctatttttaaaagacgtaattctcaacaaggatttttatgttttgttttgtcttttttgtttgttgtgcatccactagttgttttacattttatatgcaaatgaaatgagtaacaaccaagatccttataaagcacgttgctggataacttaaactatcaaa

SEQ ID NO: 551418 - DNA, 1406 bp, Homo sapiens
tgtgatgatgggtacacagggccctgcacacggtaggtgctcagtaaacaactgctgaaggatgtgcctttcccacggtcacacgcaagcaggtgctggcgcagggctcaaacccagaccaacctcggtgcccacccggtgcctcctcccaggcagccctgctggctgtgaggatgtgggagccctggggatggaggtttctaccaacctcggtgccctccctgtgcctcctcccaggtggccctgctggctgtgaggatgtgggagcsctggggatggaggtttctaccaacctcggtaccctccctgtgcctcctcccaggcggccctgctggctgtggggacagaggtttctacttgtcctgcctccatcccatttcccgtaagggaggaaattctccgtggaactcccctgctggactgacactcctccaccgctcgacacattcagaatcaggtcagggcttggtcagctcggagccttccaccaggagaatgaggctcaggaggctgctggccttgtggggagctctgggtgggaccctccttgaggggtgagaccccctcaccaccatatttctgcccataattcattgtctgcccgtggttattctcctaagagctgcccttgcatgggcagccgctgcgagggaggagaaatgcacacccgtctgtccaccgcttcctctgggcagcgatgtccacccagcactgcttccccacccccagggacacctcctacccctcctcatgtggacaccggcactttgccccagatcccagggtgaatagcgctgctgcttaaggacagcacagaccctaggaagataaggcagatgacatcagaaatgttcagagggtcgtccatgccagctgtgggaacagccccggggccaggcctgtgggcacctgggcctttgcagatcagaaggagcaagtgtccttctgtgttgatgcaggctttccagtcggagctgcaaaaggagacacaaaaatcacagctcattccaagaggtgcctgcagccagcagcacccagcagcattgtcaccactgcaagcagccactgacagccgacctgagaatgaacatgagggccagggaggaggcagctcagcctgcagcgtcagcagcgcagttcggcagagcctgctaatcgtcttgctcaagtttcaaactctgtttaccaaatgaccacagaagcgttttaacaacaaacacctcatttgaaggccaagatgaaaaattttacataaaaaattaattttactggtttacattgtttttatacattaaaatgaatacatttacttatttttttgagacagggtctcattctgtcacccaggctggagtgcagtggcacgatcatagctcactgtcgactcgaccacctggacccaagca

SEQ ID NO: 551419 - DNA, 706 bp, Homo sapiens
tttttttaaattagttgggcatggtggcttgcacctgtagtaccagttacttggaagactgaggtggaaggatagcttgagcctaggaggttgaggctgcagtgatcatgcttcagctagggtgacagagtgagactgtattaaaaaaaaaaaaaaaaaaaagagattctgctccaagcttccaacattttagaaaataaatgagatatattagataaacacrttctgggtttccgggcagacacactgtgaaaattaagtgattttttttctaaattatttaatgtatattttaaatagtgaaatagaaactaatgtatactaataatgagggctttgtgttaaagaaaagaaaattagttaacatgggccaggcgcagtggctcacgcctgtaatcccagcaccttgggaggccaaggtgggcggatcacttgaggtcaggagtttgagaccagcctggccaacatggtgaaaccctgtctctaataaaatacaaaaaaaattatccaggtgtggtggcgcacgcctataatcccagctactcgggaagctgaggcaggagaatggcttgaacctgggaggcggaggctgcagtgagctgagattatgccactgcactccagcctgggtgacaaaacgagacgtgtcttaaaaaaaaaaaattagttaacacaaatggtatgttaaaaattagtgtgaaccagg

SEQ ID NO: 551420 - DNA, 966 bp, Homo sapiens
  misc_feature 8, 9, 10, 11, 12, 13, 14, 15, 16, 17, 18, 19, 20, 21, 22,23, 24, 25, 26, 27, 28, 29, 30, 31, 32, 33, 34, 35, 36,37, 38, 39, 40, 41, 42, 43, 44, 45, 46, 47, 48, 49, 50,51, 52, 53, 54, 55, 56, 57, 58, 59, 60, 61, 62, 63, 64,65, 66: n = A,T,C or G
  misc_feature 67, 68, 69, 70, 71, 72, 73, 74, 75, 76, 77, 78, 79, 80, 81,82, 83, 84, 85, 86, 87, 88, 89, 90, 91, 92, 93, 94, 95,96, 97, 98, 99, 100, 101, 102, 103, 104, 105, 106, 107: n = A,T,C or G
aggccacnnnnnnnnnnnnnnnnnnnnnnnnnnnnnnnnnnnnnnnnnnnnnnnnnnnnnnnnnnnnnnnnnnnnnnnnnnnnnnnnnnnnnnnnnnnnnnnnnnnnagacctactgcgtctgggggcagggcccagccgtctatatttcagcaagccttccaagagacttcagtgcctgctaaagtttgatgcctactgccttaaataaacttcttcatccctgtcaaacttcctaggggagcacattttgaatttttgacctgagacctcaaaacttttacctgtgctcactcagttcaggtgaaagaatctttggcattcagaagcttgtgttcacactcacctacttctcatggcatgattcctcttacctctaaattctactgacttaatcaagattgagggattctgggatgaatctggggacactttttggtccctgaaataaaatacgcaaactttggagtatgagtgcgtatttggggaaagtatacctatcagattttcaagaacttcatgaccctaaaatgactctttcttaaaataatttttttttttttttttttttttttttttttttggagaacggtctggttctgtcacccaggttggaatgcagtgtcaggatcatagctccactgtgtgacctcaaactcttgggctcaagcaactctcctgcctcaagcaactctccagcctcagcctccgagtaactgagactacaggttgtgtgccaccatacccagataatttttttttaactttttttcttttttttttttttttttttgagatggagtcttgttcttatgccgaggctggagtgaaccgtggcaccatctctgctcactacaacatctgcccccygggttcaagcgattctcctgcctcagcctcctcgagtagctgggattctgggtgccccccgcaaccatgtcccacgaatttttgtattgttagtaga

SEQ ID NO: 551421 - DNA, 469 bp, Homo sapiens
taaaaaatattttattgcggttttatgtgtgtatgcatgcatgcatgcatgtwtagcaacataaagttggccattttaattatttaaaaatctacaattcagtgtcattagttgtattgataatgtagtcattatcactatttctaaaactttctcatcagcccacacagaaactctataacattaggcaataattccccatttcttccttctccatgtaattatttaaggctaataattagtacatagtcacaaaataaccaagcataacactattttttttttttttttttgagacagtgtctcgctctgtcacccagcctggagtgcagtggtgcgattttggctcaccgcagcctccacctccctggttcaagcagttctcgtgcctcggcctcctgaatagctgggattacaagcgcccagcaccatgcttggctaatttttggattttttagtagagactggg

SEQ ID NO: 551422 - DNA, 608 bp, Homo sapiens
tttatttatttatttatttatttatttatttatttatttattgagatggagtctcgctctgtcacccaggccggagtgcacttgtgtgatctcagctcactgcaacctccgcctcccgagttcaagtgattcccctgcctcagcctcctgagtagccgggattacaggtgtgtgccaccatgcccggctaatttttgtatttttagtagagacrggggtctcaccatgttggccaggctggtctcgagctcctgacctcaagtgatccgcccaccttggcctgccaaagtgctgggattacaggcgtgagtcatcgtgctcagccaggcgtgcttttttaatactggctccagggtatccccagtggcttgttaaaaaaatacatcatgggctgcttttcctttcttgctgtgggaatgtaaaaggacctgatgaggatgaaagacacgacttgttgacagccctgggagtctagaaggaggtggaagtcagaaatgttgcagttgttcagaacgaattcctagtactgtaactaggccagtgctggcatggaaatagagattacctacacaccccaaagggggcttaggcctgcatgcacctggtga

SEQ ID NO: 551423 - DNA, 2940 bp, Homo sapiens
tggcagtattgtatggttcaacctcatccatccaatcttgccgttaatgtttaagatgacgtaagatgagataaatataggtgtccaaagttgctgattaagagccgctgtgtcttaaggctttttgacgttatgtaacccttcattgtctgtccagttacagcctctaattttttaatttaacttttaattttctcaaggtaaaaacacttaatgtgaattctacttttttaacatattttttaagtgtgctatacagctttgttaactattggcacaatgttgtatagcagatctatgtaacttattcctcttgcattactcagacactttgaataacctaacattaggtaacttaagagaacacaccttgttatggacttaatgtttgtgtttcccaaaaattcctatctcaaagccctaatcctcaagatagctgtatttggaaatgaggactctaaaaaagtaaagttaaatgagatcagaaagatgaggcccttgatccaacagaattagtgtccttataagaagaaacaccagacacctcacactctctccttgaacatgcaccaaggaagggctatgtgaggacacagcaagaaggtagttgtctgtaaaccaggaagagagccctcaccagaaaaccaaccatgctggcatgctgatctgggacttctaaactgcataactgtgagaaaataaatttgtgttgtttaggccacacgatttgtgatattttattgtgacagtctgagcagactgacatacgtagtcaacaacaagacctgccttaatcaataatgtacagaactatggactctttccactcttcctagacgtagactgcaccctttctatccatacttagcataggcacgaaaaatcatcccctcttctaagtcatattcccccgaatgcctctgtgaactattcagtcaatttgttccctgggctgtgttcccttacctggcaggggaataaattcagcattcactttgttgattattctggtggtcattttatttcctttacattgtgatatattgttgacagtaggctaaaaataagggacttgaagttaccattctgaagcttacaaaagaattgtgaagaccctctctctccccaccgtatgtgtacttagcatcatgttttcaaggttcattcatgttgtagcgtgtatcagtacttcactctttgtaaagctgaaaaatattcctttatatggatatgccacattttatttagccagtgatccttttatgtattcttaagttgtttctacctttggctattgtgaataatgttgctatgcccatctatgtatgagtgagtttttgtttgaacacctcttttctatctcttacatatacacccaggagtagaattgctaggtcacacagtaattctaagtttaacttactggggaactgccaaatgttttccacatctgctgaaccattttatatttctaccagtagtataagagggttccaatttctccacattctcaccaacatgtgttttttctgtgtgtttttttttattatagccatcttagggtgtatattatattatggtggtttttcattacggccattttagggggtatgttatcttattgaggttttgatttctagcaattgtgtatttagaagccctccggtgattctgatgcatctcaagcttgaaaatgtggtccgggggttagtaccgccaacatcactcaggaactagttatagacatgcagaatcttaggctccacccagaccaacccagtcagattctgccttttagcaagatctccaagtgatacccacatatgtcagtgttgagaagcaatggagtaagagacagccctaaattgccaacacttcctgattaccatttaaacagaccagagttagggtttttttttttatgcccctccttgtctgacatgttcttgcttaacagcctggaaaagtagaaagcacatagtacttggagtaaaacagatcctggttcatatcctgactttatcacttaccagttacacaaacttgggttacagagtgcttgatctagaaaattaattaatatctgcattctgtggatgttagaatgaattgactataggcatgtaaatctctcacacaacccagcatgaggaggttcactcagtcttgctctacccactttcccccttgtcccacaatctccctaaagagtgtcagggaagaaaatctcagcctaggcttcccatcttgccactgagcagctgagagactggctgaatgacttgccaaatgattcttttaaggcagctggctcagcaaggaaaagtccaggaatgatcccacagtctggactgagacagaactcaaggctgaaactgtgaactcttctagatcttttaatttgtagacttgtaagaatctctaagattgcttgctttggtataaagtaattctgaagtattttaaatagcttgggacggcctcagtagctcatgcctatgatcccaatacattgggaggccaagacaagaggattgtttgaggccaggagttcaagaccgtcctaggcaacaaagtgagaccccatggcaaaaataaattagcagatgtgatggcatgtgcctgtattcccagctactcaggagactgaagtgggaggatsgcttgagcccaagagttcaaggttatagagagctactatcgtgccactgcactccaacctgggcaacagagggagacctgttttagaggggtttatcttcaactcttcttattcaagcatagcatgcaattatacacaggtgtttactctgcgatttctggaggaaaactggcccgagaaaggttttgggcctcaaacagaacaattttccaactgtcctttgtacaattagaattgttttccacttcctctaattctaggtaaaaaaataaaaaaaa

SEQ ID NO: 551424 - DNA, 2940 bp, Homo sapiens
tggcagtattgtatggttcaacctcatccatccaatcttgccgttaatgtttaagatgacgtaagatgagataaatataggtgtccaaagttgctgattaagagccgctgtgtcttaaggctttttgacgttatgtaacccttcattgtctgtccagttacagcctctaattttttaatttaacttttaattttctcaaggtaaaaacacttaatgtgaattctacttttttaacatattttttaagtgtgctatacagctttgttaactattggcacaatgttgtatagcagatctatgtaacttattcctcttgcattactcagacactttgaataacctaacattaggtaacttaagagaacacaccttgttatggacttaatgtttgtgtttcccaaaaattcctatctcaaagccctaatcctcaagatagctgtatttggaaatgaggactctaaaaaagtaaagttaaatgagatcagaaagatgaggcccttgatccaacagaattagtgtccttataagaagaaacaccagacacctcacactctctccttgaacatgcaccaaggaagggctatgtgaggacacagcaagaaggtagttgtctgtaaaccaggaagagagccctcaccagaaaaccaaccatgctggcatgctgatctgggacttctaaactgcataactgtgagaaaataaatttgtgttgtttaggccacacgatttgtgatattttattgtgacagtctgagcagactgacatacgtagtcaacaacaagacctgccttaatcaataatgtacagaactatggactctttccactcttcctagacgtagactgcaccctttctatccatacttagcataggcacgaaaaatcatcccctcttctaagtcatattcccccgaatgcctctgtgaactattcagtcaatttgttccctgggctgtgttcccttacctggcaggggaataaattcagcattcactttgttgattattctggtggtcattttatttcctttacattgtgatatattgttgacagtaggctaaaaataagggacttgaagttaccattctgaagcttacaaaagaattgtgaagaccctctctctccccaccgtatgtgtacttagcatcatgttttcaaggttcattcatgttgtagcgtgtatcagtacttcactctttgtaaagctgaaaaatattcctttatatggatatgccacattttatttagccagtgatccttttatgtattcttaagttgtttctacctttggctattgtgaataatgttgctatgcccatctatgtatgagtgagtttttgtttgaacacctcttttctatctcttacatatacacccaggagtagaattgctaggtcacacagtaattctaagtttaacttactggggaactgccaaatgttttccacatctgctgaaccattttatatttctaccagtagtataagagggttccaatttctccacattctcaccaacatgtgttttttctgtgtgtttttttttattatagccatcttagggtgtatattatattatggtggtttttcattacggccattttagggggtatgttatcttattgaggttttgatttctagcaattgtgtatttagaagccctccggtgattctgatgcatctcaagcttgaaaatgtggtccgggggttagtaccgccaacatcactcaggaactagttatagacatgcagaatcttaggctccacccagaccaacccagtcagattctgccttttagcaagatctccaagtgatacccacatatgtcagtgttgagaagcaatggagtaagagacagccctaaattgccaacacttcctgattaccatttaaacagaccagagttagggtttttttttttatgcccctccttgtctgacatgttcttgcttaacagcctggaaaagtagaaagcacatagtacttggagtaaaacagatcctggttcatatcctgactttatcacttaccagttacacaaacttgggttacagagtgcttgatctagaaaattaattaatatctgcattctgtggatgttagaatgaattgactataggcatgtaaatctctcacacaacccagcatgaggaggttcactcagtcttgctctacccactttcccccttgtcccacaatctccctaaagagtgtcagggaagaaaatctcagcctaggcttcccatcttgccactgagcagctgagagactggctgaatgacttgccaaatgattcttttaaggcagctggctcagcaaggaaaagtccaggaatgatcccacagtctggactgagacagaactcaaggctgaaactgtgaactcttctagatcttttaatttgtagacttgtaagaatctctaagattgcttgctttggtataaagtaattctgaagtattttaaatagcttgggacggcctcagtagctcatgcctatgatcccaatacattgggaggccaagacaagaggattgtttgaggccaggagttcaagaccgtcctaggcaacaaagtgagaccccatggcaaaaataaattagcagatgtgatggcatgtgcctgtattcccagctactcaggagactgaagtgggaggatggcttgagcccaagagttcaaggttatagagagctactatcgtgccactgcactccaacctgggcamcagagggagacctgttttagaggggtttatcttcaactcttcttattcaagcatagcatgcaattatacacaggtgtttactctgcgatttctggaggaaaactggcccgagaaaggttttgggcctcaaacagaacaattttccaactgtcctttgtacaattagaattgttttccacttcctctaattctaggtaaaaaaataaaaaaaa

SEQ ID NO: 551425 - DNA, 2940 bp, Homo sapiens
tggcagtattgtatggttcaacctcatccatccaatcttgccgttaatgtttaagatgacgtaagatgagataaatataggtgtccaaagttgctgattaagagccgctgtgtcttaaggctttttgacgttatgtaacccttcattgtctgtccagttacagcctctaattttttaatttaacttttaattttctcaaggtaaaaacacttaatgtgaattctacttttttaacatattttttaagtgtgctatacagctttgttaactattggcacaatgttgtatagcagatctatgtaacttattcctcttgcattactcagacactttgaataacctaacattaggtaacttaagagaacacaccttgttatggacttaatgtttgtgtttcccaaaaattcctatctcaaagccctaatcctcaagatagctgtatttggaaatgaggactctaaaaaagtaaagttaaatgagatcagaaagatgaggcccttgatccaacagaattagtgtccttataagaagaaacaccagacacctcacactctctccttgaacatgcaccaaggaagggctatgtgaggacacagcaagaaggtagttgtctgtaaaccaggaagagagccctcaccagaaaaccaaccatgctggcatgctgatctgggacttctaaactgcataactgtgagaaaataaatttgtgttgtttaggccacacgatttgtgatattttattgtgacagtctgagcagactgacatacgtagtcaacaacaagacctgccttaatcaataatgtacagaactatggactctttccactcttcctagacgtagactgcaccctttctatccatacttagcataggcacgaaaaatcatcccctcttctaagtcatattcccccgaatgcctctgtgaactattcagtcaatttgttccctgggctgtgttcccttacctggcaggggaataaattcagcattcactttgttgattattctggtggtcattttatttcctttacattgtgatatattgttgacagtaggctaaaaataagggacttgaagttaccattctgaagcttacaaaagaattgtgaagaccctctctctccccaccgtatgtgtacttagcatcatgttttcaaggttcattcatgttgtagcgtgtatcagtacttcactctttgtaaagctgaaaaatattcctttatatggatatgccacattttatttagccagtgatccttttatgtattcttaagttgtttctacctttggctattgtgaataatgttgctatgcccatctatgtatgagtgagtttttgtttgaacacctcttttctatctcttacatatacacccaggagtagaattgctaggtcacacagtaattctaagtttaacttactggggaactgccaaatgttttccacatctgctgaaccattttatatttctaccagtagtataagagggttccaatttctccacattctcaccaacatgtgttttttctgtgtgtttttttttattatagccatcttagggtgtatattatattatggtggtttttcattacggccattttagggggtatgttatcttattgaggttttgatttctagcaattgtgtatttagaagccctccggtgattctgatgcatctcaagcttgaaaatgtggtccgggggttagtaccgccaacatcactcaggaactagttatagacatgcagaatcttaggctccacccagaccaacccagtcagattctgccttttagcaagatctccaagtgatacccacatatgtcagtgttgagaagcaatggagtaagagacagccctaaattgccaacacttcctgattaccatttaaacagaccagagttagggtttttttttttatgcccctccttgtctgacatgttcttgcttaacagcctggaaaagtagaaagcacatagtacttggagtaaaacagatcctggttcatatcctgactttatcacttaccagttacacaaacttgggttacagagtgcttgatctagaaaattaattaatatctgcattctgtggatgttagaatgaattgactataggcatgtaaatctctcacacaacccagcatgaggaggttcactcagtcttgctctacccactttcccccttgtcccacaatctccctaaagagtgtcagggaagaaaatctcagcctaggcttcccatcttgccactgagcagctgagagactggctgaatgacttgccaaatgattcttttaaggcagctggctcagcaaggaaaagtccaggaatgatcccacagtctggactgagacagaactcaaggctgaaactgtgaactcttctagatcttttaatttgtagacttgtaagaatctctaagattgcttgctttggtataaagtaattctgaagtattttaaatagcttgggacggcctcagtagctcatgcctatgatcccaatacattgggaggccaagacaagaggattgtttgaggccaggagttcaagaccgtcctaggcaacaaagtgagaccccatggcaaaaataaattagcagatgtgatggcatgtgcctgtattcccagctactcaggagactgaagtgggaggatggcttgagcccaagagttcaaggttatagagagctactatcgtgccactgcactccaacctgggcaacagagggagacctgttttagaggggtttatcttcaactcttcttattcaagcatagcatgcaattatacacaggtgtttactctgcgatttctgraggaaaactggcccgagaaaggttttgggcctcaaacagaacaattttccaactgtcctttgtacaattagaattgttttccacttcctctaattctaggtaaaaaaataaaaaaaa

SEQ ID NO: 551426 - DNA, 548 bp, Homo sapiens
atccagaaactggagaccaaactagcaaattcgcaaggagctgcttgatagaaaaacacttgagatcaagagtcagaaatagctgggttgaattccagttctctcatattaagtgacaagttgcagaatgcccctgtctttctgagctgtttttatatctgtacaatggggttaatactactagtatttgmttccagggattgttttggaggggagtgaggaataaatgatataattcactaaaacacgtagaatagtatttgacacagagtaggtcagcatgcccaaagtatcagagtcattattgagttattccgctacctccgtatttgagtcctttcttttgggctttcctacttaacgtcgcagatgttatttttttgaagagggtgtaggccaagaaaggggtgggagaaacgagcaaggtgttgatagaaccccttagtgtcctcctcataccacagacactctcttcccccacttacttggccaatttttttttttttttttttttggtggagtctcgttctgtctcccaggctggagtg

SEQ ID NO: 551427 - DNA, 607 bp, Homo sapiens
cacttactgaggtgtgtgaacaaaaacaggcaacctagctcagcaagtaagaatggagtggcatctccccacctgctctggagtcatgtgtttgcttctggaagggaggcaagaggcattcaacctcctgttaatttggttgctccttcagatacgctcttcatggtacagccctgagctgcatcatttaaagaccaattgttaaggaccaatctgagggcctgtgcattagttaaaactccttatctggtcatagagggtggtgtggtttggacgcgttccccttgtctgtgcaattcccaacagaggcaagtgcgcatttgagacaggttgagggttcaagctgtccaatccctgctcatctgcagcacaccaaggaatgtggactaatgaaaaataaactgcatgcatgcartgcccatcacactgcctgcattttctaatcttcacaataactctgtgttgagaaatattcctgtctgtaatcccggcactttgggaggctgaagcgggcagatcacctgaggtcaggagtttgagaccagcctgggcaacatggtgaactccccccaaccaacgacccttcccatatctactaaaaatacaa

SEQ ID NO: 551428 - DNA, 658 bp, Homo sapiens
tggtccatgaaaaaattgtcttccatggaaccagtccctggcaccaaataggtttgggacctctgatcaagagtgatagcattgtaatgtaacatttttgaaactcaaaattaatgcatagaagtccatgagaagtaaaatgttaaagacaggatcaaaatcaatgcagaaaatccataatgagcaaaatatsaacatgttttaaaaagagggcatcagtattactgatttctttcgtttgactcaggctccagtacagcttatgttggcactgtgatgtatcctgtctgtatttaaaatttttaggtagtgtccatcatgacctttttgcagtaattgcgatttttaaaaatattgcgttaaaatagtacatatcttgattactgagttttttggtgcctcctttgagatggtgcagaaagcaagctcctcactcatctcctctagcccagccccaatagctaactcactcttagcgcctgtccttgagtgctgtgtgagccattgtgttgcaccagcttgttttaagtcccaacaatcttgttccatggtgtcttttaataatggaagagcaaagaggttaaatgactagcccaaggtctacatgaggtggaggaggagggaatcaaattaggcataaagcctattgcttggatca

SEQ ID NO: 551429 - DNA, 658 bp, Homo sapiens
tggtccatgaaaaaattgtcttccatggaaccagtccctggcaccaaataggtttgggacctctgatcaagagtgatagcattgtaatgtaacatttttgaaactcaaaattaatgcatagaagtccatgagaagtaaaatgttaaagacaggatcaaaatcaatgcagaaaatccataatgagcaaaatatgaacatgttttaaaaagagggcatcagtattactgatttctttcgtttgactcaggctccagtacagcttatgttggcactgtgatgtatcctgtctgtatttaaaatttttaggtagtgtccatcatgacctttttgcagtaattgcgatttttaaaaatattgcgttaaaatagtacatatcttgattactgagttttttggtgcctcctttgagatggtgcagaaagcaagctcctcactcatctcctctagcccagccccaatagctaactcactcttagcgcctgyccttgagtgctgtgtgagccattgtgttgcaccagcttgttttaagtcccaacaatcttgttccatggtgtcttttaataatggaagagcaaagaggttaaatgactagcccaaggtctacatgaggtggaggaggagggaatcaaattaggcataaagcctattgcttggatca

SEQ ID NO: 551430 - DNA, 1476 bp, Homo sapiens
tccccctacttactcagaagtataaacgtcagcttgatgaaacaagcagacttgcctctgcacaactcaccttgaaagcttatgtttaacagacaaaagaccatgtcccattttgtgtgaatgagatgttttctgaagccaactggcctctaaatccagatctagagaattgggagcagcgcttcttgcttcttaattaccacctggtggcttgcctgcctcagggcacccacccttcatgcggtcaatgctgagagaggtttgcaaagttcaggggagatcaagaggaggctgcattgttttctgctgattttccagagacaaggaatctactgaactccaaaaggactggacttctcaggtgtcagtgctgtatggtaggagagaaagcagctaaaaactcaccatcagcaaagggcaagtgattataagagctggcggatgctgcggtggaagttcgattcaattctaactccctctgtacaaatgaagggagatgtcacttgcctaagaatgtagcaagtccaagaaatcggccacaccaccgcatccaatagactgctcagagcgtgcatttcagggcagggtctgcaagtttatttttggtttagccacgagttagaatgttaacgtaagtcaatttgttaggactgcagataaagtcctttaccagaaagaaaaacaataacaacaaccacaaaacacaggtaaggagcttaatgttctcaacagcattgagaccatgggggcactgtgagtaggaaaaatccaaaaatgctttatcaggccccatggtgctgacagcgcagcaaagctcagctggaactgtggtcggctgccagagtttgaaccaatgttggtgctaaaatgatcagaaatgtacaagtccgtatttggagaattacaactttgcttctttcaaatagtttatggggagggtcttgggtatgcgccataacacgtaacagaattartatcagttttagtagatactgtcactaaagtcattcgggcaagtgcccagggacatttttcaagagccctttctgcctcttttattggactgcccctctgcccatgatgcatataaatcattctggtgaaagtcagctttcataagcaaacaccctaaacctattttattatttggagattttaaaaacatttcaacaagatcggcctgcttttcttctgtgatccttaaaaaaagaaaagaaagaaagaaagaaaaagaaaagaaaaaagaaaaagcccacgtgacttccacagctcgattccaaagaagctaaagacatcgtgtttggacatcagtaaaaatgatggacaaatctttttgcaaaaatttcaccctggcttgccttgaaaaatataaagcagctctctggcactagatgtcaaattaactgcaggcaaagtgtgttacagtaattcacttggcagtttaagcaaaaccaagagaacaacattaaagtggat

SEQ ID NO: 551431 - DNA, 529 bp, Homo sapiens
catcttccctgtagagctcaataagactctccctagctccagtggaagacaaatgacttatattttgaagagtatacaactgagagtctctggacaggggagcaccaggcacatttgagggtaggtgtattgtaactgagagggttaacagaatgtttacatactgaatgctggaccattagtctttttctctcaactctgctcctaaaatactgaaagccagaacatatcttccaagcaagaaacaaagactcttctggaggacttgatcagcccaagggtacagacccaagggcacagacatcaatctgccctaagaaaatgacccagtttgatcacacaacagcaaaacctgtgttcaacaagtctaacctatagggctctgagcttcctgcacattttgaagctgtacttctaaaactttctcatgtcacatcayacacagaaaacgtagtattactctgggctaaacagaggcggcctgtaggctcatggctggacagggcccccagcatttggagatgctgct

SEQ ID NO: 551432 - DNA, 1076 bp, Homo sapiens
tgttgaaaatagatgcacgtgtttagaggccagctcctgcgagcatgcagatgctggtgtcaggctgggaggaggcagacggacacattccccacctgaagaccaagcagaagtggaggcgaaagacagcgtgggctgaccgtggagcggccccatcgtgcacgcacgcaggcgatgctgaggtttgggctggcgtggagcggccccatcgtgcacgcacgcaggcgatgctggggtttggccragctctgccgctggctgggacacagggtggtgctggcttccacggtccccgacacgctcttggcaccatgggcagctccccaggccagaagcacctgcagaaggcgctcattcctcctccccgtgctcttccctgcagatgggatggggtgacctcggggtgtatggagagccctccagagagaccccgaatttggaccggatggctgcagaagggctgcttttcccaaacttctattctgccaaccctctgtgctcgccatgtaagtcagcggggccctcgcccccaggaaggggtgagcccaacaggccgaggcctcccgggtccttccagccctgactctgggcggctgcatcaaccttgtctattcctactactgcagggagggtggcaggtgggctcaggcctttctcatcaaatcccagcccggctccgtgccatgtggggtgcggcacctgctgggttttcagggtcgaagttgcggtattgttggtggctgctgttctgtttcccagagtcgagtgctgtggccgcctggggagaggtgctgcagtgtggctccgtctcagggtacctgggaagcaggagtcccactccctccctccctggggagagtctctcctgctggagacagaaacatgtggtgttgatcgtgaggaagaggagaaggcagggcacggggctggtgctcgaggatgggggcgtgtggacctgcacgcccagtgggtgtcccaggagcctgcgaaaggaggcggggtcttggggacaacgctgagctgcagggcccaagggccacgcgtctttcagtggaatgggtgccgtgccccaccca

SEQ ID NO: 551433 - DNA, 608 bp, Homo sapiens
tggtagcaagagaagagcgggcagagggcacagcctgaacagaagtggcatcaagcaagctgacttcatgttgggggagtggcaatgccttcagggtggacgcaagggagacccttcggggagaagcagtgagcagtgaagctggagagaagcagggactggatgcggaggacggtggttccccactccttcaggatcaagccccactcygctcttttcttccacccatgcactggatatgtgcatcccagccccaggcccaaatctttaaggtgcaacaacataaacttgtctgaatgttaaggtctgttttcatttaaccgatccttctgaaaagtgtaaagttagagatctgatgcaatgatattccgtttgaaaaatcccgaaaggctaatgatagggtttggctccgagtccccacccaaatctcgccttgaattgtaataatccccacgtgtcaagggcagagccaggtggggatcactgaatcatgggggtggtttcagccatgcggttctcgtgatagtgagtgagttctcacgagatctgatggttttaaaagcattgtctggcattttctctgctggcgcttcttctcttgcctgctg

SEQ ID NO: 551434 - DNA, 635 bp, Homo sapiens
tcattatgagggccttggccatgaacctagcaatgtgtgaggaaaagatctttttctcccttacaaagccattatatagatttttaatacctaaagaatatagaaagtagggcatacggttctacactgaagaatttcaatccctctmtccaatgtctgcatattatctatttagcccttaatttggttatccactctctagttgaatatctccaagttaaggagaagctaagaaatactctaatttgttagtataaatgtactgctaaagaaaaagttctttcttaccttgagatctctgtaattcccatacaaagtagttgttaagaacagtctttgcaacagcacgtgtaggttaaatcaatggtaagctggtaaattattaacaattgacacttagggagggggtagtttatagtatttgccaattttatgtggtgtgactacatcatttaaggataatttctggctacctacatgacattgggtgaggtggaacattatccattcctggaaggtatattatcctttctcatgctgctaataaagacatacccgagactgggtaatttataaatgaaagcagtttaatggactcacagttccacatggctgggggagggaggcctcgcaat

SEQ ID NO: 551435 - DNA, 644 bp, Homo sapiens
tattggtttcctgtcagttgtgccaacaatgataagtaacgacctgacgtgaaatcaagagagaggaaagctctggtcaggcacagtgactcaaacctgtaaccccagcattttgggaggtcgcggtaggcagattgcttgagtttaggagttcgagatcagcctgggcaacatggcaaaatcccatctctgcagaaaattagccaggtgtggtggcrcacacctgtagtccaggctacataggaggctgaggcaggaggatcacctgagcctggggaggtcgaggctacagtgagccatgatctcaccactgcattccagcctgggcaacagagtgagacctagctccaaaaaaaaaaaaaagaagaagagagagagagaggaaagctcgaagctgacagaactccaaaagctaactagcctaaagccaagctgcctagaaacaaccatatatacccattagtacacttggaagaaggcatcacattatgggacaggggatgaaagctcgggggtcaggcaggtaacagaactgaaatggacaggtgggagaggagtgtagcaagctgacgctggcacggctgctgagttcctctgctcgagctgatcttgtcatgcgtgatgcgattccagtattgccagat

SEQ ID NO: 551436 - DNA, 655 bp, Homo sapiens
tttttttgagaagagtctcgctctgttgcccaggctggagtgcagtggtgtgatctcggctcactgcaagctctgcctcccagtttcacaccattctcctacctcagcctcccgagtagctgggactacaggtgcccgccaccacgcctggctaattttttgtatttttagtagagacagggtttcaccgtgttagccaggatggtctcgatctcctgacctcgtgatctgcccaccttggcctccaaaaatgctgggattacaagtgtgagccaccacgcctggcctactgtgatcttttttttttttttttwaaaaaaaacaaaaaacataatcagccatgagctaaacagaatagatactacttcatttaactctgataaggcctttcaaactcctgtttttatcgagtgcagtttattctaccactggcgtgatatagtggcctaactcaccacctgtggggagtgcttccttgttttcttccagtgtaacaagaggtatgtagtttagaaatgtcctgtattccactgatgctgtaatgaaaaccctcttttccagctagtgcatgtttatgtttattttattttttatgtttattttttataacccctctgctggcaggaattatttttaattttttttttgagacagg

SEQ ID NO: 551437 - DNA, 638 bp, Homo sapiens
cagaggcgaggtgggggcttctctgctcaccgtgacttgtacaaacttaacatgagatgcttcatttgctttcaagctccctgttttctgactcaaaacaaattttgcaaaggcacctactggctgttaaaactggaattagtcttactggtcaaagttccttttcctaccttgaagtggactcattttggcatataaacgtgaataagatgcgtctaaccaggcaagcgagccccccaaacaggagcgccctggctgacgggaaacactggatctggggagaatcgcgcaaacgtcctctcctcctctccaaaatgacggctgagtygaagagtccgcctgtcagaacggcgacccggcacgaggccccaggcccggctggcgagggcaggaagatgtggatggcacccgccagatccagattccgggaggggtccagggaaacagggaacccctgggtgtcagtaacgacccttccaggctgggccaggccattggtgacgagggagggccagcaggagctggcacggggcccaaaaggacttcatcggagacatcggggtccaggaaagcaggtgctgcaggtggatggtgaggggcgggcctggcctgggtgtgacagtgagggacgggcctgg

SEQ ID NO: 551438 - DNA, 637 bp, Homo sapiens
gaaaatataataaaagattctgttgtcctagtaccacttctggtaccaataactgtatcagtcaaggttcattcatggaagccggagcatgatgactattataaaatgagaagtttattcaagtaattagacattaaacaattgtggaaggagctggaaagctggaactttcggggaaatgttgaagctggcatatctgattgttagagtaagatctttaagacagactggtaaagaagtttgtaaatgttatttgttcttcccggctactgcctctrtgaatttgcaacaaggcatctgatagtgggcctgagatttcttttagtgagcagatatattcattttccattttgacattaccatttaccttaaatttagcagtttaaaacagcacatattatctcatagtttccatgggtcaggggtctgtgcacatgttagcccactcctctccttagggtaataaaaggctatgatcaaggtgtcagccaggcccaggggtgtcttctgaggcttgtggtcttttttaagttcatgtaattcttggcagaattgatttcattgtccttgtagaactaatggagactgtgtctccagggccagtaagaagtgaacctcttgacactgccttttaaat

SEQ ID NO: 551439 - DNA, 601 bp, Homo sapiens
aatataatgcatttgctatctcatcccattctggaactgctctgtttcataaacttattatactctctttttggtattttctattctgtttggtccctgttcttcagcatgaatatttccttctgatctatctcttacttcactaaatgtctctttcactatattcaatctgtagtaaaatccatccattcaattcttaattaattctagttaatttattttttattttgagagtttcaatttgattatatttatagagcccagttctctgtgtaatactacttcttgtcatctattttattgttgatattaatcacaattttaaaatctctgataattccatccataggtctgtttctaatgtgtgtttttttctttttttcctcttctttggtatgctattcatttttgactgaaaaaaaaaaaaataaaaccctatctatctatagtttgctcctgcctaggatgtgtctctctaggaccctaaartgatggcctctggtatttttaagggctcttatttcttggaaggtctaatacctcatttgtctctgctaagctctttgaggttgcttaaaattttgctttacttttaagcagc

SEQ ID NO: 551440 - DNA, 626 bp, Homo sapiens
gctccttcagttcctagaaaaacgaggtttgatcattcctcagggtcagaagctggcagaaggtagggacaccaagtactgaaggggctaagcatgtgggggcaggaaaatatttaagggaacatgcactttctcagctcaagacgcatctctcttttataagactgtacataatttcttcttgacttgagttagttttaatccatgtacggtctgttctctggaacagctgttacaagactatgctcctttctcccttggaaaaaccatgtccttgataaatattgatggggaagtggggagggcaaggccttattgcattgactgtcaygtgttcacttaaataatccaagcgactgtttttttggggggccattcccaatggactcttgtgaagcaagttagattcattgaaagaggtgttgcaagatgaacaacaaactcactccctggtttgtgcctgactctcctctgggaggatgattacatttgcaagtaggacagccactggagagagtcctggtgagaagatctagattttgaattcttctgtgctttggtaaattgtccaagttgggctgctcattgtgaacctgggtgacttcttttctctgtaggaaagtgca

SEQ ID NO: 551441 - DNA, 748 bp, Homo sapiens
caaagtgctgggattataggcatgagccaccatgctcagacttgctttatttctttaaggtagacatggaaggagagagaagtcattttttgcttgtaaagtggatactccgagaagtgtatcatatattcatcttaaaggccatgtgtataaacagaaagagttcttgaggaaaatatcatactattataagataatctactgtacatattgtgtatgtaggcactctgaaagcaaaatggcatttttaaaaagctcttcagcctcgatagaaaaaaaaacaggagcttagatgtattttcttgaaggcaaggtctgtgaaaatccttttatggagcttgtgtgccaaaacatgctgtgtaaagtcagccagaggtcattaccgtttttattaggtgattatattataaatatgagttgggcctcaatcataagcagatcctttatgtgtgtttctgaacatgcagsctccaaagtgctaaattccaaattggaatattgattgtctgatgcctgagttacagctttcctgaaatcttgaattaggcctcaggtcccatgtgtctttctggagataagttcttcttgtaactggaagatgtaaggtcttaaatagcgggccccacaaggtggaaatccaaaggcagacttgggcaccattctctcccttgtgaatcaggaggtattaaacacaccagtttatggtgtctatagagaaattgtcataatttgtaaatgtctatgagtt

SEQ ID NO: 551442 - DNA, 564 bp, Homo sapiens
gtttttggcttcttgaattgtacaaaaagacaaaatgcatttaggtctgttagtaaatgtgttctattccacattgaaaaattgtactttagccagataaaacagatggcacatgcatgtagttccagctactcaggaggttgaggcaggrgggtcacttgagcccagcttgtgtaacagagaccccatctctaaaagaaaaagaaaaaaagaaaatttgtaccttcaggaagcacatatttctaggaattatgaaatggtcctactctacagaattggtttgcaactgctaagaattaaaaagtataattagtatacataattaaaactactagaaataaagggaacaattcagtatgctaagcaggaaagtgagagtgtttttgttgagaaaaattataagaaaggcataaaggtatgcttttttccctttgggaaaaaagtaattttgtctaattttgatattatttaaaggttctttcaaaatatggacttaggaactaaaaagaagcaaggaaagagggaacctgtaagcaggagaaagagagattttgtgttttatca

SEQ ID NO: 551443 - DNA, 1946 bp, Homo sapiens
ttgttgcctgatatttagaatacttttttcaaactgttagaaagagtagatcagtaaaacgaaatgtaaaaagaatacggggcactaataactttttatcttactacataaggaagttaaaaaatagtaacgactacctctaatgttaccatcatttcacaaaatattttacatccaaaaaagtaggaagaaaaacattatagaataaaggatgaaggcagttttgtgaccacacacctacacaccaccaaattgtgcttatttttctcattttgcagtcatctaggagaaacttgtcatggtctggactagcctggcatggagaagtcccagatccgtctgtgatgctgcccagactttagagatgccataaaggctacttagtatgcctcactctttgcttgttactttttctgaacagagctctgtcagaaaaaattgtctcggtcctgccaaggatgaaatgcccacaccagctggagccccaccagatccaggggatggattttattcacatatttcctgttgttcaggtgagagcctctgtgtggtttcttgtcctcttaacatcagaattcctgtgatgggcctggcttgtcctgtaatgggtccgtctgtcctggatcctgaatgtaatgggtgtggcttagatttggtacagcagaacatggtggtgttcgttgtcgtcatcttcagaagattgccagtcctgcatatactctagtttcatgctgtcacctgataagatctttgaatgttctcatctgacttttcattgcctttttggtaaaaacagaactctgtagcctggtatgctctgttcccttttgacctatccagcttgatttcattccttgcttttctttgttctttttgttctagcactctctggcattcattcagatttccccaggtttattcttccacctgtcacagtgcttttgcgttgctagttccttgggctggaatgctcttccattctctccttacctgtttaattcatatggcttacttcaacccttcagatctcagttccaccaaacctcttcaagaaagccttccctcatccgctaatccacagcatgttcctttatggtatgcactcctacggccacattcctttccttcaccagaatcttacagcagttcataatcatgtgtatccatgtgtgtgtgattgtttatctgcttctctcattagactcttaagctgcatgagagcaagtctgcatggctgtcttgcttattgctttgtttccagtacctaccagaacatcttacaatttgtagatattcagtccgtatggctaaatgcctaagggagagacttctctttgcctccagctgtttcccaaacccctatgattaagtggctcgtgctgtacagctcccaaacagccggccctccatattcgcagctccacatccataaattcaacaaacaatgcatcaaaaatgtttgggggtgggtggggggaaacacaataaaaaataacaatacaacaataaaaagtaatataaatttagcaagctggaaaaagaaagtaataaaaatttaaaaatacagtataacataactatttacatagcatttacrttgtattaggtattataaccttagagatgatttaaaatataggggaggatgtgtttaggttgtatgcaaatactgtgccattttatatcagggacttgagcatctgtggattaatatctagcgggtcctggaacccatccaccacagattccttgggacaactgcattctgtgcagttcttctcttcccctctaggcatcttagaaagaggaggagcaaagggactcaggtgtgttgcccgctgtgtgaacactacttcccatctgactctattagagttctttgaagcgtttattataatcccttacatttgaggaaagtgagaaatgtaatttccttacatttggga

SEQ ID NO: 551444 - DNA, 1208 bp, Homo sapiens
aaaaaatctttgttaaatttttgctctattattaaagaaggaagaygtagttttcttccagcaaatcagatttgctggaaccactttctctgataatttttcctttctcagcttcacatgtgtagagttaggtgcatttctcgaggaatgagaaaagcgggtaatataacgtatagaccaaagattttgagtttcatttcctctaattaacttgagatgagttctcccataattctaggtctcaaacccaggtcctgggaaaaaacttctgcctggctaaaatgcagagaaacccattattagcagaacaactggagaatgaacactttccaaccccctgctttgtgccgtgtcagtgttaggcatttgcaggcagttttattattccttataacaacctcatctcccagaagggacagcctgagatgtagagaggttagagagctggtaagtggggagggtggatttgagccaacgtctgtctgatttcaaagctcatgttcttacaaaggcaatttaatatttacaagaactctctcttcccagtaaggatgccacccaaagaaacaaaaaataagatgagaagactggtacattttggatcaaagcaaggtccagaaatatctgtcagtctgtacggatgtgtttcctggagccaatgctggtaaaacacttcctaaatttcttccaatctctgttttcaatggtcagaagtttcctttatgagattctgttcggtttcttcttttttagatatagagtgttgatttgtcacaggctggagttcagtggtgtggtcatggctcactgcagcctcaaatctcctggactcaggtaatcttcctgcctcagcctcctgagtatctgggactacaagcatgtgccaccatgcctggctaatctttatttattatatttgtagggatagggtcttgctgtgtttcctgggattgtttgtttgtttctttaaacatggtattctctctgcttagaacactgctgtcactttgtgttgttgacaccctacttgcctttaagggctggctgttagtatacagaaaggagccaagagccttgacatctttgctgaccattaccaagtgccaccactcccatccaatctgttaggcatctccctaacttcagcagattgcatcctcctccaagcttgtatttcgggaaactcaacattctgccatggagtctca

SEQ ID NO: 551445 - DNA, 618 bp, Homo sapiens
accaattttggcccactctcttaaaggaatgaaatggctgcttccccttcccactaccccaccttccctaaaatgcctaaaatgacttcattaactctttattaaagagtgcttccaaaaatgaaagttgaatatgcattgaataatagacttaaatagtatagggaggttattccagtctcggagacctaaaacacattacaagatgcctaattgtatctgtccctgtagatacactctacatacatatatacatacatacattgtgtgwatacttatatacaatttgtgctgatcttgcataaataggtatcccatttttgtacatgcctttaattttgttcttttccttcatgactgactctgtgttgactggtttaagtccaatggaatgctaagtccaataagactcgacatccttacttttaatctaattatatgtcaatcttattttacgtgagaactatgctttttactgttaatataaaaactctaaattgttcatttccaagtcattttttccttaaaataagggcaaggtatctttaaaaattcaagtaatcacacagacactactgtatagacagtgacgacggctctgctgaaactgcacttttg

SEQ ID NO: 551446 - DNA, 626 bp, Homo sapiens
ttctcttgttcttccaactgtcattgtacaattgtcatattttttaaaaaatattttttactttaagatgaatgtatatatacatacatttataggaaacattacagagagattctgtgtaacataaacccagttgcccccaattgcaacatattgaaaactatactgcaatatcacaaccaagacattaacactggtacagtcaagatatagaacagttcatcactactattacctcatttttccctattctcacttccctctcacacttgacatttttttaaaccctggcaatcactaatctattctccatttttataattttgacatttcaataatgttgtataaatggaattatacagtataaatggaattatacaacacaaatatgaccatttgggattggacttttatcccctctctgtsgttttctggagagttatccaggtggttgtttgaataattcataaccatttattgctgaatagtacttcataatatgatataccatggtttatttaacgattaacctattaaaggacattggagctgttttcagtttttggttattacaaataaagctgctatatacatttgtttacaggtttatatgtaaagataattct

SEQ ID NO: 551447 - DNA, 626 bp, Homo sapiens
ttctcttgttcttccaactgtcattgtacaattgtcatattttttaaaaaatattttttactttaagatgaatgtatatatacatacatttataggaaacattacagagagattctgtgtaacataaacccagttgcccccaattgcaacatattgaaaactatactgcaatatcacaaccaagacattaacactggtacagtcaagatatagaacagttcatcactactattacctcatttttccctattctcacttccctctcacacttgacatttttttaaaccctggcaatcactaatctattctccatttttataattttgacatttcaataatgttgtataaatggaattatacagtataaatggaattatacaacacaaatatgaccatttgggattggacttttatcccctctctgtcgttttctggagagttatccaggtggttgtttgaataattcataaccatttattgctgaatagtacttcataatatgatataccatggtttatttaacsattaacctattaaaggacattggagctgttttcagtttttggttattacaaataaagctgctatatacatttgtttacaggtttatatgtaaagataattct

SEQ ID NO: 551448 - DNA, 3591 bp, Homo sapiens
tctgggacaagtcttccctgactggtcccacctgattggtctgcactttaactttgtaacctggcatcttgtatttatagaaatgctgctttgtgttcttttaaattctatattttgctgttcctctacctaaatattaaacttttcagggatagggatttactgaatcttaaatctgccaggcagagattatatgtgttatgttcatcatggtatccccagtgccatatgcagtgtccacagtacttttctatttattgtataaacaactgtttttcattgaagaaatcttttaaagaccttattcactctttgcatacagttgcttagcaaatacccttaagtgaatcaattaaacacctatctcattttacagagaaaatgctaggatccattgtggatctgtaagttctccaaacatgttaatgaaagccttcatttaagaatagtagtagtatttttaaatttccattatacttcagggagaaagcaagttttcatttatttttaaagtggctcttattttcttggcaggtaactatttaatatcatgtatatacatctttaaggctattaggcttatttatttatttatttatttatttattatttattatgtgagaggtactgtgtaaatttatttttcctgcatcgtaattggatgcctatagtgttatagaagtgatattatatggccaactgaatatatgggtaccttggaggaaactttaaccagaattttagttttccaccttaccatttctttaaaggttaagaactttgctcccttattgtaaattaggattcctgtgtatttctattctttcattctttctctttactcaatagccaaaccagatctccctggaagagaacattttggtctcccgttacattaacaaccccctgctcatagatggtgagttgtgattaggcccttgaccaaattgggccagatttttgctcaactttttaagcttttcatagccttctctagtaagtctttattatactgttgtgaaattcttgacatgtgtggctccagaaaggcagcaggttccttacctatctcacgggatttatctgaaggtgaaatgagacaatataagagaaagtgctttataggttatatagtagtatatgtatgaaaattgtgcagtaattaatatatatgaaaatgacacacatatgcattatatatacattacagttatattaatgtatatatacattatacggtttttattatgtactatatacataatatgtatacggtacaattatatagtataattattagttatcctccgaagtcaaggtgtgtgagcagtgtgtgtttcatgtggagtgtaggaatgttctttctttcatgtttcttggtttcgttgtttattctgtaacaggaaacaaatgaacttagtttttttttgtgaatacaaactttttttttttagatttcaagtttgacgtgcgcctctatgtgctcgtgacttcctatgatcctcttgtcatctatctctatgaagaaggattggctaggtaagaagctgtttgggggtgaaggggttgggtgggtatattaagggtgggtatattaagagtggatccattaacaagtttattaaatcagatcatgctatttttacttgtcattactgcttacagatgcaatccacctcctcaactgctgtgctctataacatcaaagccagtatgcctaaaaagaacttcagaaattaggcttatttgtctgtagtctcactgcatgtccacacataaggtgtgtaaacatcttccccagcactgatccaggatcatatggtattttcctgcagtgacaattgttatgaagctcctaggatattaagataatttgctgttattcttcaggatagatgtagaaagaaaaataaaatcctacctgtatttgcctattatatgccaggcatttattttcatcctcgcaacaaccttttagttgatgcatttttgcagttgaggaaacagatttagaggtgggagaagtggaatggggatttgacctcatggatctgactccagagctcagggctcagacaatttcatgccctctcatatttggaaggtattaattgagggtttttttttttttccttaacatgcaagttactttacagtggttgtacatacattgttctctttttgttaaggtgcttttttttgtttgtttttgagatggcgtgatctcggctcactgcaagctctgcctccaggttcacgccattctcctgcctcagcctcctgagtagctgggacaacaggtgccccccaccatgcctggctaatgttttgtatttttagtagagacgaggtttcactgtgttagccaggatggtctcgatctcctgacctcgtgatccgcctgcctcagcctcccaaagtgctgggattacaggtgtgagccaccacacctggcctgttgaggtgctttctaagttttaaggtaatgtgacttacaagattaagttcaagttgttatattttgaagttttgtttcctctagccacagaattttacaggtaattgtttttgtaaaccctttaaattgtttaaaataagtatgtaactactatgctgtgttcttccccccaacaaaactaaatttttgtattagccaactagtttgccctgaagttctttttatgcgtagtgcctttgatatagagcaggggtgtccaatcttttggcttccctgggccacattggaagaagaattgtcttgggccatacctaaaatacactaacaatagctgatgagcttaaaaaaaattgcaaaaaactcataatattttgagaaactttataaatttgtgttgggccacattcaaagctgtcctgggctgtatgcagcctgtgggcctcaggttggacaagcttgttataaagcatagcagtttaggaggtgatttgcatctgtgagtggtcacgacaagctaaaaaagcctggtctgtgtatgtttctgtattttagaaaatgcaattggaagatgggaaatrccatggataaaagaaggctacctatttatgtacaggtgctttgacagatattattgtactctgacaactattattttagaatggtcttttaatgattttagagacttagtttttttcacatgtatcctatgacttgaaatcagtgagagcagactaaccaaacctcgctggtggagctctgtgttccgttcgcctctaggtggcagtcacagcatttataagtcctgtcatattcttaactgagattttgagtttgagccctgggaacattggagactaccaaaactccctagttctggcctcttccttgaaaattgagaaagggaagaactgaaacatctcgcagttattagataaagggctggaccaggcatctgaacatgagctgactactagctctaatcaggtttttataggaaagaaattgtcgataatatttgtagacacacgtgctctcacgttttgaagtatcactatacaaaattaggtataaaagcctattcctggccaggcgtggtggctcacacctgtaatcctagcactttgggaggccga

SEQ ID NO: 551449 - DNA, 3591 bp, Homo sapiens
tctgggacaagtcttccctgactggtcccacctgattggtctgcactttaactttgtaacctggcatcttgtatttatagaaatgctgctttgtgttcttttaaattctatattttgctgttcctctacctaaatattaaacttttcagggatagggatttactgaatcttaaatctgccaggcagagattatatgtgttatgttcatcatggtatccccagtgccatatgcagtgtccacagtacttttctatttattgtataaacaactgtttttcattgaagaaatcttttaaagaccttattcactctttgcatacagttgcttagcaaatacccttaagtgaatcaattaaacacctatctcattttacagagaaaatgctaggatccattgtggatctgtaagttctccaaacatgttaatgaaagccttcatttaagaatagtagtagtatttttaaatttccattatacttcagggagaaagcaagttttcatttatttttaaagtggctcttattttcttggcaggtaactatttaatatcatgtatatacatctttaaggctattaggcttatttatttatttatttatttatttattatttattatgtgagaggtactgtgtaaatttatttttcctgcatcgtaattggatgcctatagtgttatagaagtgatattatatggccaactgaatatatgggtaccttggaggaaactttaaccagaattttagttttccaccttaccatttctttaaaggttaagaactttgctcccttattgtaaattaggattcctgtgtatttctattctttcattctttctctttactcaatagccaaaccagatctccctggaagagaacattttggtctcccgttacattaacaaccccctgctcatagatggtgagttgtgattaggcccttgaccaaattgggccagatttttgctcaactttttaagcttttcatagccttctctagtaagtctttattatactgttgtgaaattcttgacatgtgtggctccagaaaggcagcaggttccttacctatctcacgggatttatctgaaggtgaaatgagacaatataagagaaagtgctttataggttatatagtagtatatgtatgaaaattgtgcagtaattaatatatatgaaaatgacacacatatgcattatatatacattacagttatattaatgtatatatacattatacggtttttattatgtactatatacataatatgtatacggtacaattatatagtataattattagttatcctccgaagtcaaggtgtgtgagcagtgtgtgtttcatgtggagtgtaggaatgttctttctttcatgtttcttggtttcgttgtttattctgtaacaggaaacaaatgaacttagtttttttttgtgaatacaaactttttttttttagatttcaagtttgacgtgcgcctctatgtgctcgtgacttcctatgatcctcttgtcatctatctctatgaagaaggattggctaggtaagaagctgtttgggggtgaaggggttgggtgggtatattaagggtgggtatattaagagtggatccattaacaagtttattaaatcagatcatgctatttttacttgtcattactgcttacagatgcaatccacctcctcaactgctgtgctctataacatcaaagccagtatgcctaaaaagaacttcagaaattaggcttatttgtctgtagtctcactgcatgtccacacataaggtgtgtaaacatcttccccagcactgatccaggatcatatggtattttcctgcagtgacaattgttatgaagctcctaggatattaagataatttgctgttattcttcaggatagatgtagaaagaaaaataaaatcctacctgtatttgcctattatatgccaggcatttattttcatcctcgcaacaaccttttagttgatgcatttttgcagttgaggaaacagatttagaggtgggagaagtggaatggggatttgacctcatggatctgactccagagctcagggctcagacaatttcatgccctctcatatttggaaggtattaattgagggtttttttttttttccttaacatgcaagttactttacagtggttgtacatacattgttctctttttgttaaggtgcttttttttgtttgtttttgagatggcgtgatctcggctcactgcaagctctgcctccaggttcacgccattctcctgcctcagcctcctgagtagctgggacaacaggtgccccccaccatgcctggctaatgttttgtatttttagtagagacgaggtttcactgtgttagccaggatggtctcgatctcctgacctcgtgatccgcctgcctcagcctcccaaagtgctgggattacaggtgtgagccaccacacctggcctgttgaggtgctttctaagttttaaggtaatgtgacttacaagattaagttcaagttgttatattttgaagttttgtttcctctagccacagaattttacaggtaattgtttttgtaaaccctttaaattgtttaaaataagtatgtaactactatgctgtgttcttccccccaacaaaactaaatttttgtattagccaactagtttgccctgaagttctttttatgcgtagtgcctttgatatagagcaggggtgtccaatcttttggcttccctgggccacattggaagaagaattgtcttgggccatacctaaaatacactaacaatagctgatgagcttaaaaaaaattgcaaaaaactcataatattttgagaaactttataaatttgtgttgggccacattcaaagctgtcctgggctgtatgcagcctgtgggcctcaggttggacaagcttgttataaagcatagcagtttaggaggtgatttgcatctgtgagtggtcacgacaagctaaaaaagcctggtctgtgtatgtttctgtattttagaaaatgcaattggaagatgggaaataccatggataaaagaaggmtacctatttatgtacaggtgctttgacagatattattgtactctgacaactattattttagaatggtcttttaatgattttagagacttagtttttttcacatgtatcctatgacttgaaatcagtgagagcagactaaccaaacctcgctggtggagctctgtgttccgttcgcctctaggtggcagtcacagcatttataagtcctgtcatattcttaactgagattttgagtttgagccctgggaacattggagactaccaaaactccctagttctggcctcttccttgaaaattgagaaagggaagaactgaaacatctcgcagttattagataaagggctggaccaggcatctgaacatgagctgactactagctctaatcaggtttttataggaaagaaattgtcgataatatttgtagacacacgtgctctcacgttttgaagtatcactatacaaaattaggtataaaagcctattcctggccaggcgtggtggctcacacctgtaatcctagcactttgggaggccga

SEQ ID NO: 551450 - DNA, 3591 bp, Homo sapiens
tctgggacaagtcttccctgactggtcccacctgattggtctgcactttaactttgtaacctggcatcttgtatttatagaaatgctgctttgtgttcttttaaattctatattttgctgttcctctacctaaatattaaacttttcagggatagggatttactgaatcttaaatctgccaggcagagattatatgtgttatgttcatcatggtatccccagtgccatatgcagtgtccacagtacttttctatttattgtataaacaactgtttttcattgaagaaatcttttaaagaccttattcactctttgcatacagttgcttagcaaatacccttaagtgaatcaattaaacacctatctcattttacagagaaaatgctaggatccattgtggatctgtaagttctccaaacatgttaatgaaagccttcatttaagaatagtagtagtatttttaaatttccattatacttcagggagaaagcaagttttcatttatttttaaagtggctcttattttcttggcaggtaactatttaatatcatgtatatacatctttaaggctattaggcttatttatttatttatttatttatttattatttattatgtgagaggtactgtgtaaatttatttttcctgcatcgtaattggatgcctatagtgttatagaagtgatattatatggccaactgaatatatgggtaccttggaggaaactttaaccagaattttagttttccaccttaccatttctttaaaggttaagaactttgctcccttattgtaaattaggattcctgtgtatttctattctttcattctttctctttactcaatagccaaaccagatctccctggaagagaacattttggtctcccgttacattaacaaccccctgctcatagatggtgagttgtgattaggcccttgaccaaattgggccagatttttgctcaactttttaagcttttcatagccttctctagtaagtctttattatactgttgtgaaattcttgacatgtgtggctccagaaaggcagcaggttccttacctatctcacgggatttatctgaaggtgaaatgagacaatataagagaaagtgctttataggttatatagtagtatatgtatgaaaattgtgcagtaattaatatatatgaaaatgacacacatatgcattatatatacattacagttatattaatgtatatatacattatacggtttttattatgtactatatacataatatgtatacggtacaattatatagtataattattagttatcctccgaagtcaaggtgtgtgagcagtgtgtgtttcatgtggagtgtaggaatgttctttctttcatgtttcttggtttcgttgtttattctgtaacaggaaacaaatgaacttagtttttttttgtgaatacaaactttttttttttagatttcaagtttgacgtgcgcctctatgtgctcgtgacttcctatgatcctcttgtcatctatctctatgaagaaggattggctaggtaagaagctgtttgggggtgaaggggttgggtgggtatattaagggtgggtatattaagagtggatccattaacaagtttattaaatcagatcatgctatttttacttgtcattactgcttacagatgcaatccacctcctcaactgctgtgctctataacatcaaagccagtatgcctaaaaagaacttcagaaattaggcttatttgtctgtagtctcactgcatgtccacacataaggtgtgtaaacatcttccccagcactgatccaggatcatatggtattttcctgcagtgacaattgttatgaagctcctaggatattaagataatttgctgttattcttcaggatagatgtagaaagaaaaataaaatcctacctgtatttgcctattatatgccaggcatttattttcatcctcgcaacaaccttttagttgatgcatttttgcagttgaggaaacagatttagaggtgggagaagtggaatggggatttgacctcatggatctgactccagagctcagggctcagacaatttcatgccctctcatatttggaaggtattaattgagggtttttttttttttccttaacatgcaagttactttacagtggttgtacatacattgttctctttttgttaaggtgcttttttttgtttgtttttgagatggcgtgatctcggctcactgcaagctctgcctccaggttcacgccattctcctgcctcagcctcctgagtagctgggacaacaggtgccccccaccatgcctggctaatgttttgtatttttagtagagacgaggtttcactgtgttagccaggatggtctcgatctcctgacctcgtgatccgcctgcctcagcctcccaaagtgctgggattacaggtgtgagccaccacacctggcctgttgaggtgctttctaagttttaaggtaatgtgacttacaagattaagttcaagttgttatattttgaagttttgtttcctctagccacagaattttacaggtaattgtttttgtaaaccctttaaattgtttaaaataagtatgtaactactatgctgtgttcttccccccaacaaaactaaatttttgtattagccaactagtttgccctgaagttctttttatgcgtagtgcctttgatatagagcaggggtgtccaatcttttggcttccctgggccacattggaagaagaattgtcttgggccatacctaaaatacactaacaatagctgatgagcttaaaaaaaattgcaaaaaactcataatattttgagaaactttataaatttgtgttgggccacattcaaagctgtcctgggctgtatgcagcctgtgggcctcaggttggacaagcttgttataaagcatagcagtttaggaggtgatttgcatctgtgagtggtcacgacaagctaaaaaagcctggtctgtgtatgtttctgtattttagaaaatgcaattggaagatgggaaataccatggataaaagaaggctacctatttatgtacaggtgctttgacaratattattgtactctgacaactattattttagaatggtcttttaatgattttagagacttagtttttttcacatgtatcctatgacttgaaatcagtgagagcagactaaccaaacctcgctggtggagctctgtgttccgttcgcctctaggtggcagtcacagcatttataagtcctgtcatattcttaactgagattttgagtttgagccctgggaacattggagactaccaaaactccctagttctggcctcttccttgaaaattgagaaagggaagaactgaaacatctcgcagttattagataaagggctggaccaggcatctgaacatgagctgactactagctctaatcaggtttttataggaaagaaattgtcgataatatttgtagacacacgtgctctcacgttttgaagtatcactatacaaaattaggtataaaagcctattcctggccaggcgtggtggctcacacctgtaatcctagcactttgggaggccga

SEQ ID NO: 551451 - DNA, 410 bp, Homo sapiens
cctcccagagtgctgcgattataggcatgagtcaccatgcccagcctgtttttgatcttttcgatagctgacctattatcactgtttatggaaattagcttagtgacttatcctaagttcttgaggagrcactagagaaaatatgtactttgtctataagtttagcagattattttaggaactctagcttctctgcaaagtaggttttatctgacatacaaggcaaaggaaatattaggaagtacacatacatgctaatatatagagagccaaaataaataaagcaacacattatttatatttaagaactttgctttgaagacttagaaaggcaaacaaagaaaaaaaaatcccactcaaaaagaagttttaagactgttgactgtatattctacttaaattaagtcaca

SEQ ID NO: 551452 - DNA, 410 bp, Homo sapiens
cctcccagagtgctgcgattataggcatgagtcaccatgcccagcctgtttttgatcttttcgatagctgacctattatcactgtttatggaaattagcttagtgacttatcctaagttcttgaggaggcactagagaaaatatgtactttgtctataagtttagcagattattttaggaactctagcttctctgcaaagtaggttttatctgacatacaaggcaaaggaaatattaggaagtacacatacwtgctaatatatagagagccaaaataaataaagcaacacattatttatatttaagaactttgctttgaagacttagaaaggcaaacaaagaaaaaaaaatcccactcaaaaagaagttttaagactgttgactgtatattctacttaaattaagtcaca

SEQ ID NO: 551453 - DNA, 661 bp, Homo sapiens
ggccatgaatgtgttaaggggcaatccctcctgggaaataacagaaatggggagaaaataaagtgtttctttaacatggaagttagtcagtaaccttgtttgcttaccaaagaattagctgtttgttttaggtgtcatttctcaggatttcttcagctcctacacttctctaattctgaaacactaattctgaaaattgagccagtcataacaatttaattacacacacaaagggagcataacctcaagttaacataaaattataygattggactaacatgcagttgttaccgcaattatccagtctgacactgtgcattattgcatttcacattgtattaatatgtataaaagacagagggtcaataaatatttagcagatgaatcagagttggcatctcaagaatataagggtgatttagaaattatcttaaataatctagaagaagcgctgtgtgggttctgtagagaaaacaaaggagaggaaattgtttaccatccactcctcacttggcgtattcagggaatatctagtagctttttgatgaggcatagagacagaagagcatggggagctgcttaagaggagtcctaaaaatgtgtccaggacagcttgctggagtatttatgacaaacttaagaatgttctcctcattttgtg

SEQ ID NO: 551454 - DNA, 947 bp, Homo sapiens
cttccaggctgctttgtttacctaatcaagcctgggcaatggcgagcgcccctcccccagcctcgctgcagccttgcagtttgatctcagactgctgtgctagcaatcagcgagactccgtgggcgtaggaccctccgagccaagcgtgtgatataatctcgtggtgcgccgttttttaagcccgtcggaaaagcgcagtattcgggtgggagtgacccgattttccagttgtcgtccgtcacccctttctttgactcggaaagggaactccctgaccccttgtgcttcccaggtgagtcaatgcctcgccctgctttggctcgcgcacggtgcgcacacccactgagctgcgcccactgtctggcactccctagtgagatgaacccggtacctcagatggaaatgcagaaatcacccgtcttctgcgttgctcacgctgggagctgtagaccagagctgttcctattcggccatcttggctattcttmactctaaatgaaaatctaggcttttacagctctcaacaattttatgtttgtatatctcatgaagagtttttgtctatatagaagggtttcttttttagtggtttaatacaattcaaaataacttcacagctatatgacagcaatggaattcttgatatttaaaaggcattcttaatcgagaggattttgatacaaatacatggcaagttttattgttgttcttggtgctttcaggcacttcataaatacaaaataaatgaaaacatttctcactaagtttacacataacttttgaacacatgaaagtgtactgggattaattagggtatttgaatgtaaatggaaaaggagacgacagagacctgtcttttatttttttggataggaacttgccagagcagagaaagcacacttgttagaagtattgaatattgttggaaaattctcctgtttcccca

SEQ ID NO: 551455 - DNA, 256 bp, Homo sapiens
cagaaaacagccacagtactaccgagaattaaaaggaaaaattacggctgggcgcagtggctcacacgtgtaatcctagcactttgggaggccaargcgggcagatcacgaggtcaatagattgagaccatcctggccaacatggtgaaaccctgtctctactaaaaatacaaaaattagctgggcatggtggcgggtccctgtagttccagctacttgggaggctgaggcaggagaatcacttgaacccgggagg

SEQ ID NO: 551456 - DNA, 524 bp, Homo sapiens
gttggcattatatagaatataatacctgttctcagagtcgaaagaaacttcawatcgctactttgtctagcactttgctaataagaccacaagaccatgttttatagatgtggtatccagagattactttaatctatgtattttgtggtttataggagctgatgagcacactttgaaaatcacaatattgaactttcaggagttcattatcaatactgacatctttaacataggacaaaatcaaaaccagtgtattcaagatttaaatattaaagccagtatattttaaaatgtgtgaattatttaatgccctaaaattcattcagataaaactatgcaattacttattaagcttagtaattagcatatttggaagtaaagactgaataaatatagaagtacattctattcacatattaagaaaaaaactgttgttttctgtttctcttctgtagggaaaccataggcattaagcataattaaaaaaatagttaaggataagaatgaattgggggtgatgtgtg

SEQ ID NO: 551457 - DNA, 1037 bp, Homo sapiens
aacccacccagtatctatcacatctccctatttctaattttatctttgcctgtgtttgtctctgccttgcccccattagagagtgagctctgtgagagcagaaaacttgtcattgttttttgcattgatatttatttacctagaatagtgattggcacaaagtaggcatttgataagaaatattttttgagtgagtgcatggatactgatccttgtaatggaagcatttgtaacaaaaataagtttcttctttataaacacaaaacgtccaagaggaaaaagaactatcttttctctcgtttaatttctgctacttttgttttaccttttattttattcactctaaaattttttttatggtgcatgctgtcaggatctgacattttttctcaatcatctttctctactgggtatccctgggattatctgtctggcaccytcttcccctttcactgaggaacttctaattctactctgctctcaccagaccacatggttacctcggtgttttcatattctcacatagcccagccctccattggccacagctaatcagtcaagcagtaagccattcagaatctatcactgagatttttcaaactgaaactgggaaaccaagttattcctgatttggtggtgaaatttttacagtgtagaacatggagctgccagtggccccatgaagaaagcttgtggtaagaataagtgaaatgtgcagagaagcagaaatgaaggtggagacagggtcccggcgctgaactagtaccagtgtactgatgtattgctacaggtatgtctattaattgatgaaaaagtaattgtagttttgatcactaagtttggccattaaaagtaatggccaaaactgcaactacttttgcacccatctcagaagtctccctgctactcacacgttccataaatctataatccgagtgttcttcattcaaacaaatttgcctagtttgtttggcttccatttccagaagcatttttctacttgttagtgtgtgtgtgtgtgtgtgtgtgtgtgtgtg

SEQ ID NO: 551458 - DNA, 516 bp, Homo sapiens
tgttctcaaatagctgctttgattaattttagtacatacttactgatgagctatcagatgactcattgtttttttcatatttctgtttcttgctcttttttttcttttctttctttgctttttttgaatgcttgtcttttttcttctttttcttcacagagtgttcctacaatcattttgaacaggcaagaaaataatttaatttcatcttaatttaaaaggatgtattctgagagaaaaaaaaaaaccacattctaaaaaactttcaatctctgatgaaataagaccaagaatatgtctaaataaataaaatctttcaggaaatcttaacacaccttctataatatatgcactatcaataaatcatataactgagacttcttaccagaaaaatactgggaaaattttggctttatttgtagattaatgtgacaaatataatcaaataaacacatatatacacaaacatgtatacatgcatcyatacacacacaaacacacatacatataatatcc

SEQ ID NO: 551459 - DNA, 2031 bp, Homo sapiens
cctacaaaatgaagttaagccattagaaattgggagtgtagacctcattcatggtacctggggtttgaggacctctctgtgccatagaccttgtccctgagagagctccagaggatggaattacaaaacttctcagttcagtgtcatcaaggaattcatagttcagagctaaaaaccaatttcatcgtttttgctcctatttcttacccgtgaatttctccaactgtttattaaaattaaaaaccaaactgaactactattttttagaaaggcaacaatcttcctatggtatttggcaataagctggaagaatctcactgaagaatgtataagatgtcttcaagattggagtgaatggcatctgttttgctgctcaatcatcctaaaaccagtgattctgtagtttcattatccatcttaatttcaaatgaatgataaccgcagaccttgggaggaggcatcagttactttgcttcttttctaaattggagcagtcaaagcaatctcaaaaacaatttcaacaattcatcccgtcttctccccaaatctattcaagtttcagccctgattgctgcatgagtaaatgaaataatttgtttacctctcaagaaatattccatacattacagttaggacacctacataatgacaatgggcctgtttgtgaaatacctcatatcaagggaaacctagaaatatgcatcattttatagcttaatattccatattttctgtcatgcatttccttaagaactgcagagkaatgcatgtaatttagttactagcacattctggctcaatggtaatgtgtcttgctttacataatatatatgctgctaaaatatatatgtaaattatctcacttttggtaaacttggtcttgattttatatttaattgtatggaatttcagaaattatagctcttcattttaaataattttttagttgctaaatactgcagagctaattcaagatatttaattcattgactatttaattgtctaatatgtgcacagtattgtgctagagaaattagacaagtgctggccttgagaaatagatgcatcagaggtagaattatagaataacacacacagacacacacacgtactcatgtctttttaacaaaaactatttttcatcataattgcagcttagcacagtggttcagggtatgggctccagaggcaaacgacctgcattccaggtgctgctctgccacttactaactgtaggacattgggcaaagttatctaacatctctgtgcttcatttgcctggagtatatcataaagataatagtagaacccacatcaaggaggctccatgagaactatatttggagagaacagtgtctaggactcagtgggcactgcataaacattagctaatattgttattttcttgtctgaaaataggaataataatagtaccttttattgagacagtatctcactctgtcacccacactgcagtgcattggtgtgatcacagctcactgcagccttgacctcccaagcaatcttcccatctcagcctcccgagtagcttggattacacgtacacaccaccatggttgactattcttttttatttttagtagagacgaggtctcgcattgttgtccaggttgttctcaaactcctgagctgaagtgatcctcccacctctgcctcacaaagtgctgggattacagatgtgagccaccaagcccggccaatagtatcttctctatagggtagttgagaatattaaatgagttaaagcatttaagcttttagatgctgtcattatcaccagcattaaaaatatatcatcaaaatgtataaggaagcacagagggggtagggccggggaaatttaaatctaaagtattggcaaagttatcagaaatgaagtgaaattcaaaatggtctgaaaagaatgagtaagattttgataggcagagaagagagaggagagattttctggaaaaaaaaaaaaaaaaaggcttttctggaaagtatgagtaatggtcctgaaagataata

SEQ ID NO: 551460 - DNA, 1499 bp, Homo sapiens
tttcttatcaagaattttatgcatcatttagttcttaaaccagttctaattttttaaataaaaacacttgaaaacattcttgcaggaacattgcatcccacagaacaacaataatccaattattaaaatctagaatggaaacaatattgatagaaataaaagtaaagggtcattttctttactgtttccatttgtaccaattaattccagttctatgaaataaaatatttgtggttaaatttagggaaattctatgcaaatttaaagttttctgtgataaacaaatataaggtaaatattttcctagtgtattgcattgccagggccttttttttttttttaatgtgactacagagaaagaaatggcttaatttcctacgtctcccctgaataaacagttcacagacccagacacatatggacacatacctcctacctgaaaaataaaaaagttacaatatatcactaacttaacattaattaacacatcaatccatagtgtagcaactgcctagtctgtgctactttgccaagtactgatcagacagttcttactcacaattattccttattaaccgtatcctagaggttcattcttctatacatggccagagccaaaattacccagatacgtggtctttacaaattcccttggatttaaattcatcctcccctctcaggctaacagtagagagacaattcctgggctaagtccctgcactcgttttcttttgtgttagggatttggttggatgatgaggacgggtgggaagttagagggaaacataatacagttttagtgcatctttccaattctcatgtcttacttttatgtctcttattcaaatgaagttagaagactataaagttaaagagatagagaaatatttagaaataaatatttaaccattgtcttaaaagaacaagagtaggagggaaggaagtagaaagaaacaggtgacagagactttatacttcactatgcattagtcacaccctttatactgggtccaatgggtacaatccaaagtagagaaaaatgctctagtgttgggattaatagtttacgttaaggttaccacaattgtttatgacaatctaagttaaaaaaatctcttttatatattctttgcagctgatattatattaaacattaacacacttctttttactgggtaagaaattttgatagcatgagattttgattttttaaatatttattgtagtcacaaattattaaattacgaacaaaaattatttatctrtttacacaattgaggcattatagatggagttatcaaacaagtatctccccaaagcaaaaccacttatagtaacaaaaggatgatttttatttcaagggacttaaataatgtatttctacatccttaaaactcatcgaaaattgggtttatgggtttttaattggaaagactaccaagtggtgaacactatctgctgggaagaacctgtgtctataatattctttcaaaaacccg

SEQ ID NO: 551461 - DNA, 1160 bp, Homo sapiens
ataatggtgcatcttgggaccattgtcgttcttgtcaataaaaaggcctggggggacatgcaacaaagctaccttttgattcaccgtttttctttccttcacaggacatttgtaagcctgtggtcagctaggtcattttattttatcctgatgtgccttgataatagcatcatgtctacaaaaaatttgacaggccatcgatgttcgtttctctgactcctatgttgtttttcagtcctcaatgtcaaacatactttgaaagctactgaatacgttggttgggacagtatttgacaagatatttcttctttgataaaattgagctcatgggggttgatctttgaatttaaggtaattttttgagcaatgaaagacactctgtcattctactgctggcacacaagaaatgtttgaaaaaatggaaattctatttaatttagctaaacaatatttttaaatatgagttttggagactggaacaagagcaaactgctaagtgcaaaatggacaaattatgactgttatcacattaaaatgagatctaacctcatatttattgaattctggtacaattatgagtaatacaatgtgcatgaatgtctatatatgaaaggaggagtttacataaaagtcagtcttcgagaaaaggctggctattgtttctattcttaaaaaccagttggaagtatatgttaagaaattatactgaggctgcaggactacttgaggccaggagttcaagatcagcctgagcaacatggcaagactgtatttctacaatttcttttttaattagttgggtgtggtggcatgcacctgtactcctagctrcttaggagactgagctatgaacattgcttgatctcaggagttggaggctgcagtaagctctgattgtaccactacacattagccttggtgacagaataagatactgtctccaaaaaatatacacaaacaaatatatatatatatatatacacacacacacatatatatgtacatacacatacacaaacatataaagaaatatatacgaataatatgttatgaagtaatgaaaaatatcattgaatatattttgaatgtcaaagggaatatgcatatcacaatgacatccttaaggataatattgtaccataaggttttaaaggggtttt

SEQ ID NO: 551462 - DNA, 533 bp, Homo sapiens
catctctaccaaaaggtacaaaaaaatattaggcaggcatggtggcaggcgcctgtagtcccagctactgggaaggatgaggtgggaaaatcacttgaacctaggaggcagaggttgcagtaagctgagatcacaccactgcactccatcttggctgacaggatgagaccctgtcttaaaaaaaaatattaaaaattttaaaattaaaaaaaaaaaaaagaaatgaggattctaaactacatgagcttctgagttctttaagagaaatctatttttcctacaactgcagaaactcaacaactacttgagtccctttatggaccagcaccacctccaacacagtggcacccaacctggtgcctgctgccctccctccctgtgcctcaaaccagcagtttytgtctatgcccagtttcctgttccttgacagataagtatggggaaaaccaaatcagagtctacattgaagcacacataataacccggaatgcttttctctctggcataatttccttacactgaagtcaagtcca

SEQ ID NO: 551463 - DNA, 1695 bp, Homo sapiens
gcatgtgttttctttttttgatagaatgacttattttcttttggatatttacccagttttgggattgctcggtcaaatcatagttgtgttttatgttcttggggaaatctgcaaattgcttttcacagtaggtgaattaatttacattcccaccaacagtatgtaagcgttcgcttttcttcacagcctcaccaacatcatcaacatctgctgttttttgactttttaatagtagccattctgatttgtgtgagatggtatctcattgtggttttggattacatctctctgatgattaatgatattaagtatttttcatgtttgttggctacttgtatgtcttcttttgagaagtatctgttcatgtctgttgcccatttttaatggagttatttgattttgctcattcaactctttaagttttttatagattctggatattagacctttgttggatgcacagtttttgaattttctcccattctgtaggttgtctgtttactctgttgatagtttatttgttgtgcagaagctcttcggtttaattaggttccaactgtccatttttgtctttgttgcaattgctttggatacagcctaaatgtttctgtttttgcatatacccacagaatttgaaacatgtaatttctttcttttccttttttattgcaaactaaaaataatctgacagataaatgattgttcaagtccagatgatttaaaaaaatatatatatatatatagccttcttaattagcaacaataatgaaaaagggttaaaataacacaaaatcttgtaattatttttcatttggaaatttcaaacccccaaaagatgaataaaattcagttagggctcattacaagcacaacccatccagtgagagagattgcaatattggtacattaactttggtcatttttgactcagtaaataatgatctacttagaactgttactaggtacatccacaatttaataataataataatacacacacatatttacaataaatatttattttagcgaaaaaaattgtgacaaataagagtgaagaatacaatgaaatttctatgaagttttgcttcagtttttgattatgctttttgatcacatgaaaattgcattaatatataaaaagataagcatgagaattcatcattgctgacaaatatttctgatgaaactaagttgatatgcatttattcttcatagttggtaaaatctaggccttaatttactttatatcatttaataaagtatttttaattctaattggagcacttaaatgataaaaagagatagatatttgactttgctttacccagaattctttttaaggtttatgatattttttagaaaagaaatatagctgggcccagtggctcatgtctgtaatcccagcaatttgggaggctgaagcaggatgatcacttgcgtccaggagtttgagaccagcctgggtaatacagtgagaccccacctctagtataaattaaaaaaaaaatttaaaaagaataaaaataagaataaatataatttaaaattcctcctttaaatatatatttttaattttgatttttgtgggtacacagctggtgtatatatttatggactattattttgaaagtcaaatgaaaattttatcatttaaaccttaagaagctttaatataagtctcagatttkcaaatag

SEQ ID NO: 551464 - DNA, 1695 bp, Homo sapiens
gcatgtgttttctttttttgatagaatgacttattttcttttggatatttacccagttttgggattgctcggtcaaatcatagttgtgttttatgttcttggggaaatctgcaaattgcttttcacagtaggtgaattaatttacattcccaccaacagtatgtaagcgttcgcttttcttcacagcctcaccaacatcatcaacatctgctgttttttgactttttaatagtagccattctgatttgtgtgagatggtatctcattgtggttttggattacatctctctgatgattaatgatattaagtatttttcatgtttgttggctacttgtatgtcttcttttgagaagtatctgttcatgtctgttgcccatttttaatggagttatttgattttgctcattcaactctttaagttttttatagattctggatattagacctttgttggatgcacagtttttgaattttctcccattctgtaggttgtctgtttactctgttgatagtttatttgttgtgcagaagctcttcggtttaattaggttccaactgtccatttttgtctttgttgcaattgctttggatacagcctaaatgtttctgtttttgcatatacccacagaatttgaaacatgtaatttctttcttttccttttttattgcaaactaaaaataatctgacagataaatgattgttcaagtccagatgatttaaaaaaatatatatatatatatagccttcttaattagcaacaataatgaaaaagggttaaaataacacaaaatcttgtaattatttttcatttggaaatttcaaacccccaaaagatgaataaaattcagttagggctcattacaagcacaacccatccagtgagagagattgcaatattggtacattaactttggtcatttttgactcagtaaataatgatctacttagaactgttactaggtacatccacaatttaataataataataatacacacacatatttacaataaatatttattttagcgaaaaaaattgtgacaaataagagtgaagaatacaatgaaatttctatgaagttttgcttcagtttttgattatgctttttgatcacatgaaaattgcattaatatataaaaagataagcatgagaattcatcattgctgacaaayatttctgatgaaactaagttgatatgcatttattcttcatagttggtaaaatctaggccttaatttactttatatcatttaataaagtatttttaattctaattggagcacttaaatgataaaaagagatagatatttgactttgctttacccagaattctttttaaggtttatgatattttttagaaaagaaatatagctgggcccagtggctcatgtctgtaatcccagcaatttgggaggctgaagcaggatgatcacttgcgtccaggagtttgagaccagcctgggtaatacagtgagaccccacctctagtataaattaaaaaaaaaatttaaaaagaataaaaataagaataaatataatttaaaattcctcctttaaatatatatttttaattttgatttttgtgggtacacagctggtgtatatatttatggactattattttgaaagtcaaatgaaaattttatcatttaaaccttaagaagctttaatataagtctcagatttgcaaatag

SEQ ID NO: 551465 - DNA, 1695 bp, Homo sapiens
gcatgtgttttctttttttgatagaatgacttattttcttttggatatttacccagttttgggattgctcggtcaaatcatagttgtgttttatgttcttggggaaatctgcaaattgcttttcacagtaggtgaattaatttacattcccaccaacagtatgtaagcgttcgcttttcttcacagcctcaccaacatcatcaacatctgctgttttttgactttttaatagtagccattctgatttgtgtgagatggtatctcattgtggttttggattacatctctctgatgattaatgatattaagtatttttcatgtttgttggctacttgtatgtcttcttttgagaagtatctgttcatgtctgttgcccatttttaatggagttatttgattttgctcattcaactctttaagttttttatagattctggatattagacctttgttggatgcacagtttttgaattttctcccattctgtaggttgtctgtttactctgttgatagtttatttgttgtgcagaagctcttcggtttaattaggttccaactgtccatttttgtctttgttgcaattgctttggatacagcctaaatgtttctgtttttgcatatacccacagaatttgaaacatgtaatttctttcttttccttttttattgcaaactaaaaataatctgacagataaatgattgttcaagtccagatgatttaaaaaaatatatatatatatatagccttcttaattagcaacaataatgaaaaagggttaaaataacacaaaatcttgtaattatttttcatttggaaatttcaaacccccaaaagatgaataaaattcagttagggctcattacaagcacaacccatccagtgagagagattgcaatattggtacattaactttggtcatttttgactcagtaaataatgatctacttagaactgttactaggtacatccacaatttaataataataataatacacacacatatttacaataaatatttattttagcgaaaaaaattgtgacaaataagagtgaagaatacaatgaaatttctatgaagttttgcttcagtttttgattatgctttttgatcacatgaaaattgcattaatatataaaaagataagcatgagaattcatcattgctgacaaatatttctgatgaaactaagttgatatgcatttattcttcatagttggtaaaatctaggccttaatttactttatatcatttaataaagtatttttaattctaattggagcacttaaatgataaaaagagatagatatttgactttgctttacccagaattctttttaaggtttatgatattttttagaaaagaaatatagctggrcccagtggctcatgtctgtaatcccagcaatttgggaggctgaagcaggatgatcacttgcgtccaggagtttgagaccagcctgggtaatacagtgagaccccacctctagtataaattaaaaaaaaaatttaaaaagaataaaaataagaataaatataatttaaaattcctcctttaaatatatatttttaattttgatttttgtgggtacacagctggtgtatatatttatggactattattttgaaagtcaaatgaaaattttatcatttaaaccttaagaagctttaatataagtctcagatttgcaaatag

SEQ ID NO: 551466 - DNA, 1695 bp, Homo sapiens
gcatgtgttttctttttttgatagaatgacttattttcttttggatatttacccagttttgggattgctcggtcaaatcatagttgtgttttatgttcttggggaaatctgcaaattgcttttcacagtaggtgaattaatttacattcccaccaacagtatgtaagcgttcgcttttcttcacagcctcaccaacatcatcaacatctgctgttttttgactttttaatagtagccattctgatttgtgtgagatggtatctcattgtggttttggattacatctctctgatgattaatgatattaagtatttttcatgtttgttggctacttgtatgtcttcttttgagaagtatctgttcatgtctgttgcccatttttaatggagttatttgattttgctcattcaactctttaagttttttatagattctggatattagacctttgttggatgcacagtttttgaattttctcccattctgtaggttgtctgtttactctgttgatagtttatttgttgtgcagaagctcttcggtttaattaggttccaactgtccatttttgtctttgttgcaattgctttggatacagcctaaatgtttctgtttttgcatatacccacagaatttgaaacatgtaatttctttcttttccttttttattgcaaactaaaaataatctgacagataaatgattgttcaagtccagatgatttaaaaaaatatatatatatatatagccttcttaattagcaacaataatgaaaaagggttaaaataacacaaaatcttgtaattatttttcatttggaaatttcaaacccccaaaagatgaataaaattcagttagggctcattacaagcacaacccatccagtgagagagattgcaatattggtacattaactttggtcatttttgactcagtaaataatgatctacttagaactgttactaggtacatccacaatttaataataataataatacacacacatatttacaataaatatttattttagcgaaaaaaattgtgacaaataagagtgaagaatacaatgaaatttctatgaagttttgcttcagtttttgattatgctttttgatcacatgaaaattgcattaatatataaaaagataagcatgagaattcatcattgctgacaaatatttctgatgaaactaagttgatatgcatttattcttcatagttggtaaaatctaggccttaatttactttatatcatttaataaagtatttttaattctaattggagcacttaaatgataaaaagagatagatatttgactttgctttacccagaattctttttaaggtttatgatattttttagaaaagaaatatagctgggcccagtggctcatgtctgtaatcccagcaatttgggaggctgaagcaggatgatcacttgcgtccaggagtttgagaccagcctgggtaatacagtgagaccccacctctagtataaattaaaaaaaaaatttaaaaagaataaaaataagartaaatataatttaaaattcctcctttaaatatatatttttaattttgatttttgtgggtacacagctggtgtatatatttatggactattattttgaaagtcaaatgaaaattttatcatttaaaccttaagaagctttaatataagtctcagatttgcaaatag

SEQ ID NO: 551467 - DNA, 1695 bp, Homo sapiens
gcatgtgttttctttttttgatagaatgacttattttcttttggatatttacccagttttgggattgctcggtcaaatcatagttgtgttttatgttcttggggaaatctgcaaattgcttttcacagtaggtgaattaatttacattcccaccaacagtatgtaagcgttcgcttttcttcacagcctcaccaacatcatcaacatctgctgttttttgactttttaatagtagccattctgatttgtgtgagatggtatctcattgtggttttggattacatctctctgatgattaatgatattaagtatttttcatgtttgttggctacttgtatgtcttcttttgagaagtatctgttcatgtctgttgcccatttttaatggagttatttgattttgctcattcaactctttaagttttttatagattctggatattagacctttgttggatgcacagtttttgaattttctcccattctgtaggttgtctgtttactctgttgatagtttatttgttgtgcagaagctcttcggtttaattaggttccaactgtccatttttgtctttgttgcaattgctttggatacagcctaaatgtttctgtttttgcatatacccacagaatttgaaacatgtaatttctttcttttccttttttattgcaaactaaaaataatctgacagataaatgattgttcaagtccagatgatttaaaaaaatatatatatatatatagccttcttaattagcaacaataatgaaaaagggttaaaataacacaaaatcttgtaattatttttcatttggaaatttcaaacccccaaaagatgaataaaattcagttagggctcattacaagcacaacccatccagtgagagagattgcaatattggtacattaactttggtcatttttgactcagtaaataatgatctacttagaactgttactaggtacatccacaatttaataataataataatacacacacatatttacaataaatatttattttagcgaaaaaaattgtgacaaataagagtgaagaatacaatgaaatttctatgaagttttgcttcagtttttgattatgctttttgatcacatgaaaattgcattaatatataaaaagataagcatgagaattcatcattgctgacaaatatttctgatgaaactaagttgatatgcatttattcttcatagttggtaaaatctaggccttaatttactttatatcatttaataaagtatttttaattctaattggagcacttaaatgataaaaagagatagatatttgactttgctttacccagaattctttttaaggtttatgatattttttagaaaagaaatatagctgggcccagtggctcatgtctgtaatcccagcaatttgggaggctgaagcaggatgatcacttgcgtccaggagtttgagaccagcctgggtaatacagtgagaccccacctctagtataaattaaaaaaaaaatttaaaaagaataaaaataagaataaatataatttaaaattcctcctttaaatatatatttttaattttgatttttgtgggtacacagcwggtgtatatatttatggactattattttgaaagtcaaatgaaaattttatcatttaaaccttaagaagctttaatataagtctcagatttgcaaatag

SEQ ID NO: 551468 - DNA, 2238 bp, Homo sapiens
tgcatcataatgatagagtgaatagagatgaagaaacgccagcgtccgctgcaagtttaaagagagagacattgcatgtattttcatctggggaggctgctgttcagcgaagtgttctctgagatgaaacaaagctgccttcccacttggcattcacattaattgtgggcttgccaaccggccagtttcattggtgtataaattagtagggaataattccacctgtctgaaaaaccagaatatctgaggaatgcttcctgagatggtgacttatttgtttttctgtggtttgcactcagctcttagaaaacctccaggatctgctaaacacaaaaaaaatctgtgttctgccctggcatacctgtgtgagaggtaatggctatcattacaacaaatagaagttttattattttcaacagcgtatttttgagatgtattaaaataaatcattttcaaatcctcattattgtaaaatgaaagtccactgaggtcccctgagagaaaatttaaacttatggatttctattaataacaataataggaaatattagttgagagtcaacgatggtctaggagctgccatttgggatgtatcagtggggtgctaagataggtgactgcgaaggaaaaaaatatttagttcattttttgttatatttatttgttattgcagtgtgggataaatgctttctcagtgactaaaattttttttaaataatccaaatttagccaaacgtagttgacactgccttctaaaatgtcctgtatttcttagttctaggacaggcaattacaaggactataaatatggggtccagggctttcaatgcccttttaaccttttacaattaaaattaactgaatcttaaacattcagtttttcattccataattgtgagctggttgtgtgctttgtattgtgttggcaccagggatataaatgtgaaaaagcagacctggactctctctccttgcagcttacagtctagaggtggatacttcattacaccaaaacaacaaaaacaaaaaccgaatcacaccaaaccttgacacttcttgccatacgggggttttcacatttgcatcaatactattctaatagtcactttttgttggaccaatcagccttgaacttactgagaagggccacattgatcttaatatttgttgtgtagctttaagccttggcagaaaagaaaagaaaagaaaagaaaaaaacaaacaaaaaacaacagcaacattaaaccagttagttggagacaaaatgcatggctgtttccactgtcacttatttatttgggcatttattttggcccaaagatacccagattttctgtcttttagataatgaagtactttgggttttctccactcatgcagtacaaggtttacataaccaaatacaatggagatgtatttagttattgagacaaattggattccttagttagttacctagctagttagttagctagctagccagctagtctgtcattttgagtgtttgactgtatgtgtctgtatctgcacacattatagctgccaagcactttatcatttataaaaaacagttttaaaatgcagtaccttgtttgcatagtggctaaaatcatgggccttggagtcatatcaataaatatgcttggattcaaatagtggctccaccatatatttaccaagtgaccttaaattctgtaagcctcagtgtcctccttgtaaaataagggtaatagmcatttcacaggtttgcaatgggagtagatgaggtattccattaaaatagcttataggaaacaatgaatggtagctaatatttttgttgttgttttataaaataatttctaacccttattagaatttaatgaagcaggctactaatgatctcattaggtcctcctatttatttttatctctacatgactgtaaaggcagactccctttcctagaattcctacttttcttttctccaattaagtattttctacccatttcttagagctcaattaaatacttctttcctgactttagtgctaagttagatacattgttccataacaagtatttattatgccagtgctgttttaagtgttggaaatacagtgatattaagaagagactatagtccctgtcaccatgcagcttacattgtatcagaggaggcaaactttccacaaatattgctaagataagtttttacttcaggttgggggacacgcttagaaagtgaaatacagggta

SEQ ID NO: 551469 - DNA, 2238 bp, Homo sapiens
tgcatcataatgatagagtgaatagagatgaagaaacgccagcgtccgctgcaagtttaaagagagagacattgcatgtattttcatctggggaggctgctgttcagcgaagtgttctctgagatgaaacaaagctgccttcccacttggcattcacattaattgtgggcttgccaaccggccagtttcattggtgtataaattagtagggaataattccacctgtctgaaaaaccagaatatctgaggaatgcttcctgagatggtgacttatttgtttttctgtggtttgcactcagctcttagaaaacctccaggatctgctaaacacaaaaaaaatctgtgttctgccctggcatacctgtgtgagaggtaatggctatcattacaacaaatagaagttttattattttcaacagcgtatttttgagatgtattaaaataaatcattttcaaatcctcattattgtaaaatgaaagtccactgaggtcccctgagagaaaatttaaacttatggatttctattaataacaataataggaaatattagttgagagtcaacgatggtctaggagctgccatttgggatgtatcagtggggtgctaagataggtgactgcgaaggaaaaaaatatttagttcattttttgttatatttatttgttattgcagtgtgggataaatgctttctcagtgactaaaattttttttaaataatccaaatttagccaaacgtagttgacactgccttctaaaatgtcctgtatttcttagttctaggacaggcaattacaaggactataaatatggggtccagggctttcaatgcccttttaaccttttacaattaaaattaactgaatcttaaacattcagtttttcattccataattgtgagctggttgtgtgctttgtattgtgttggcaccagggatataaatgtgaaaaagcagacctggactctctctccttgcagcttacagtctagaggtggatacttcattacaccaaaacaacaaaaacaaaaaccgaatcacaccaaaccttgacacttcttgccatacgggggttttcacatttgcatcaatactattctaatagtcactttttgttggaccaatcagccttgaacttactgagaagggccacattgatcttaatatttgttgtgtagctttaagccttggcagaaaagaaaagaaaagaaaagaaaaaaacaaacaaaaaacaacagcaacattaaaccagttagttggagacaaaatgcatggctgtttccactgtcacttatttatttgggcatttattttggcccaaagatacccagattttctgtcttttagataatgaagtactttgggttttctccactcatgcagtacaaggtttacataaccaaatacaatggagatgtatttagttattgagacaaattggattccttagttagttacctagctagttagttagctagctagccagctagtctgtcattttgagtgtttgactgtatgtgtctgtatctgcacacattatagctgccaagcactttatcatttataaaaaacagttttaaaatgcagtaccttgtttgcatagtggctaaaatcatgggccttggagtcatatcaataaatatgcttggattcaaatagtggctccaccatatatttaccaagtgaccttaaattctgtaagcctcagtgtcctccttgtaaaataagggtaatagccatttcacaggtttgcaatgggagtagatgaggtattccattaaaatagcttataggaaacaatgaatggtagctaatatttttgttgttgttttataaaataatttctaacccttattagaatttaatgaagcaggctactaatgatctcattaggtcctcctatttatttttatctctacatgactgtaaaggcagactccctttcctagaattcctacttttcttttctccaattaagtattttctacccatttcttagagctcaattaaatacttctttcctgactttagtrctaagttagatacattgttccataacaagtatttattatgccagtgctgttttaagtgttggaaatacagtgatattaagaagagactatagtccctgtcaccatgcagcttacattgtatcagaggaggcaaactttccacaaatattgctaagataagtttttacttcaggttgggggacacgcttagaaagtgaaatacagggta

SEQ ID NO: 551470 - DNA, 555 bp, Homo sapiens
gccattgcttttggtgttttagtcatgaagtttttgtccatgcctatgtcctgataaactcatttctttaaagtcaacggcaacaacaaggaaatctttacctaaatcattgcatttgtacatatctctagtttgtgctaaatgattatgagttattgttgaattaggaaagagggtagcagctgaaggaccaaggaggaaagacctagagttgctcttgtatcctttgtaagatatacaatctaaagactatgccaaggttataatatggatgacagttaaaatgtcttggctttcaaagtattctctaatacattaactttaattttattgtaatcttaattgtacatggatactatacctagcagcatccctctgaacaaggttccctgagaaacatgagaacatttccagacaagacgtaaaactggatgaatcttgagaaaggttcttaggagtctcccaatgcctagtcttgaatatcagccatctctgctttgtctggctrtattgagaatgcaattatagacacattgtattcactgtgagaaaatt

SEQ ID NO: 551471 - DNA, 1152 bp, Homo sapiens
actagtatgagatttttttctgaaattgagctaaaatgtgccagataatttcacagtgatagatgaggggatgaaattaagtgatgaccaaggccaagtgtagcccggattctctgatccatgaaatggctgaacaacattgttaaacttctactgtttcaaatcccaagtacatttcctgcgttttctattctggcactgccctcttgtgataaaacaacagcattgcagtcattgcaaccaacttttcttgaaatggtaatttcaaaaagcacagaccctctgcctctatcccaggctttgtactaagtgctttacatacatcagctcatttaagataagagctattatccccaatttacaagtaagctaactgtgcatacccacagccaattaagtggcaatagaatttcaaaggagctctgaatttaaccaccgtgggttgcattgggtaaatactaatgctttcaataggcatctgtgatagagatgtaaaggttttaaagaattaataaaccatccattttctatcttgcaatataaactttattctgtcagcagccatttgaaattcttctttcctatgactggaaaagcctttttactttttgagaggtaaagattaatttaaaatcttatatatatctaggattttgatacttactatgccaaaaaagcccctcacttaaaaaatctgcagagaaaaacaggaccttctctctccctttctctctgtctctgaagtaaacacacacacacacacacacacacacacacacacacacacacacagccggataatatctgatacaatgagatttataaycctatttattgtttttaagcttgttatttattgcttataacttgtcccaatgttcatctctaaccctaaatcgattaaaatattactgagaaaaaatacacccatagtattattcattctagtgggaaggcaaaatatctgacttttagccctatgtaacttttaagttacacaggcaccaagacaggagaggatcttgtgcagacaagtacagcagtggggatctggaggtggatgtgtcctggttaggctcaggcaagagactgaaggtggggacagatattattggcgaaatggaaggattaatccttgatagaggccaagtg

SEQ ID NO: 551472 - DNA, 518 bp, Homo sapiens
ttgtggttgttacctagcatttctgaaaaacaatgagtaacatacactttctttctgtgcagctgctaagccagagaaaacgtaaattcaagttacagtgtctgtcttgtggagacagctcagatgacaataaggctaggtagaggttagcagagtcacgagatagagagaaaaacaaatccattttgtttggcccacggacccagctgcctaaagcggttgaatcttcctttgtagcttccagttacaggggtaacaaatcccttttaaaattagttatttatttatttacttatttaacttccttgaggtcagtttgaatacagcttctgtcacttgatacaagaatagcctagactaatgtgtcgtgtaaaccatctctgatgccttccctgcctctagattgcactcttcgctgctacccacagagcygtttctggcacctgaataactggctttcagccagatactgtgttggagggtataaaagattttccacttgaagttttctctatgaa

SEQ ID NO: 551473 - DNA, 662 bp, Homo sapiens
agtgttttgatgttgagaggcacgtgttgccctgaattttctgtctttacaaattactrgaaattttgccagaaaacctattaatatctttccatcttttaggaactaaatattatttccagtctgtcttcttaaggatctttctgtattaaagttttcctggcacttcttgggatcattcgttggtagagcaagctttatttcaagaaattaatcgttaattatacttttttttcctttttttctgttatcttcatggacactggatatattttatgttgtcccttcttcttgtacttcccttatgttcctgctttttaattgatctcctttcctttttattttcccgttattttcttcatgctgttttctatatgttcttgattgtggtttcagtaatgtcttttttttttccctcctaatgtgattccatttctataacaagtacagtttatctcttttatttcccaagccccctgagctttggaaactaaatgtttatctcctttttgcgtttcttatttaagagcctgcatgagtgacttgagtcctttttgtccttaggcaatggattcgttcgtttcttaatttttaattttttaaaaaaatgtcattattttaaataatttttttttcaatttacaaaaaaccagtggtacttt

SEQ ID NO: 551474 - DNA, 662 bp, Homo sapiens
agtgttttgatgttgagaggcacgtgttgccctgaattttctgtctttacaaattactggaaattttgccagaaaacctattaatatctttccatcttttaggaactaaatattatttccagtctgtcttcttaaggatctttctgtattaaagttttcctggcacttcttgggatcattcgttggtagagcaagctttatttcaagaaattaatcgttaattatacttttttttcctttttttctgttatcttcatggacactggatatattttatgttgtcccttcttcttgtacttcccttatgttcctgctttttaattkatctcctttcctttttattttcccgttattttcttcatgctgttttctatatgttcttgattgtggtttcagtaatgtcttttttttttccctcctaatgtgattccatttctataacaagtacagtttatctcttttatttcccaagccccctgagctttggaaactaaatgtttatctcctttttgcgtttcttatttaagagcctgcatgagtgacttgagtcctttttgtccttaggcaatggattcgttcgtttcttaatttttaattttttaaaaaaatgtcattattttaaataatttttttttcaatttacaaaaaaccagtggtacttt

SEQ ID NO: 551475 - DNA, 1019 bp, Homo sapiens
ggttggagtaattgtcaaatgaaaactactttttcaggaccccagttgagttttctgtgaaaaaaaatgctaaataaactacttgtataagaagtatgttaaagccaatacatcttcttataggaggaatgtgtaagttattttttaatgacccttttattggcaaataaaatgatggctatggcaatcattcattttatttcttaaaatacatttcttcaaaaatatttagattcatatttaaattgagcagcaagtcaatttctaaagtgagtaagtggtagagatttctactgtacttaaaaagaaacagttgttcatgctttcaaacaaattaaattttgagcccttatgacatctcaagcattcataaaataaaacctatgtttagaggaaatcaaagaaatactcctttactttatagtctaaatacactacttgattttaatcccaataaggattgtatgtgtgtgtgtgtgtgtgtgtgtgtacctttggatgtgtatgtatagtcaatcatttatttttagtaatatgtctatatgtaagctaatattgatcattatgttttaattcaatatatttaataagtttaaagtttgtggtactataaacaagaaaattggctgggtgccgtggctcacacctgtaatcccagcactttgggaggccgaggagggtggatcatgaggtcaagagatcgaagccatcctggccaacatggtgaaaccccatctctactaaaaayacaaaaattagctgagtgtggtggcgcgtgcctgtaatcccagctactcaggaggctgaggcaggataatagcttaaacctgagagcggaagttgcagtgagccgagatcatgccactgcaatccagcctggtgacagagtgagactctgtatcaaaagtaataataataataataaaataaaattatatgatgaaaaacataattagaaagccgaatagtactattcagtttccttataaggaaataacttttactcagatctttttctt

SEQ ID NO: 551476 - DNA, 291 bp, Homo sapiens
tagaaaataataaggactgtaaaactaacacactaaatgttcattcaagaactcatttcacgtagcaaaatgcgctccaggttcatcattattattgcaagtgatctcaaaacatcacatggtaacctatgcatacataatattattattcattaattaaaagtgaaataaaataatgaagttattaaagtcctccaggtccgtagacatggtcaaaaatggcaggatcttcctcttttttaaggttgaataatgttgggttatatatatatttattgcataawactgtat

SEQ ID NO: 551477 - DNA, 1590 bp, Homo sapiens
tattattctacatccatgtattatctagatatgagtaatcaaaaaaaacaaaaaacaagactctacaccttatcattatgaatacaataagcattcctaaagagtataatcacaaatgaaccaaattctccaaatataagtagtaaagttatccttttcctaagctaacattgcacaagtggagagaattaatgtctagaaacatgaccttggtacacctgcttctcaatgtactctaacagaagtcttacttgaatataaggtcatccacatcagtcagagtagcacctatgcttttcaacagcaagttgacagaatgaactgcaaacatttcctgtttttctttgtctgattcttcacctccggaacccaaagacaaactcaaatgcaactaaaagaaaaataatgttcaataaatgaaagctaaaagtgaaaaatttacatatttaggatccaggtagtccagaaacaaaccaaaaaaagtctttcgattagagtcctagtgaaagctattatttgataccacacattatagcagaacaacccacttacatttgattctctttgctttttgatagaatacaaattagtctgatccaaaaacagagttctaattttatgcaatgtatataaatgccattgcattcatatgagggaaaccgacacactttacaaaaatggcgtaatcattttaagaagaaaaacatgtaaactggcacacaagtaatctgccagtcaaaatacagataataacaataacatgacaattaaggtaagttagcaagctgtcaagtttttaaaagtataataaggctttcagcttccacagatcctccaacttagtatttaaacatgagatttcagattctcatttagctgctactttgaactgaaccatcattagtgcaatagtgcaagaagacayaggcaaaaagtaattcaatatgtgtaaataaagtagatgaatttcctttctcattttgtcatttcctaggcatattaactaaccaatatagagttcaagtaaagtggacttggggcaacgccaggaaagcctgtggttagttttttctttcatgtgaccctctgcccaaatgacgagtctgggagtgctgggatccaggaaaggtaaccacaggtaaacattaatccagcccttccctagggcaatgttacttatgggctatgaaaataattgttgttcataatctttgccattagacttcatggcacaattcccactgtgcctaagaacacgaataggtaaattatcaatcattaatatccccctagaatataatatccatgaagctgttttatacctccacagcaactttcataataagcattcagtaaatacttgtttaaggtattgttcaatcccacaaataactgattttcacttaaaagtgaaaaagaaatggtatattacctatcacataaaacaatatcaattttaaacctgacactatcagtatgtctgatatcaccaaactaatagatcaatttaaaataataattccattttagaaatccattcatttagctgaaggactggtaaatgcaattgaaagtaatgtgctgtaaaca

SEQ ID NO: 551478 - DNA, 1590 bp, Homo sapiens
tattattctacatccatgtattatctagatatgagtaatcaaaaaaaacaaaaaacaagactctacaccttatcattatgaatacaataagcattcctaaagagtataatcacaaatgaaccaaattctccaaatataagtagtaaagttatccttttcctaagctaacattgcacaagtggagagaattaatgtctagaaacatgaccttggtacacctgcttctcaatgtactctaacagaagtcttacttgaatataaggtcatccacatcagtcagagtagcacctatgcttttcaacagcaagttgacagaatgaactgcaaacatttcctgtttttctttgtctgattcttcacctccggaacccaaagacaaactcaaatgcaactaaaagaaaaataatgttcaataaatgaaagctaaaagtgaaaaatttacatatttaggatccaggtagtccagaaacaaaccaaaaaaagtctttcgattagagtcctagtgaaagctattatttgataccacacattatagcagaacaacccacttacatttgattctctttgctttttgatagaatacaaattagtctgatccaaaaacagagttctaattttatgcaatgtatataaatgccattgcattcatatgagggaaaccgacacactttacaaaaatggcgtaatcattttaagaagaaaaacatgtaaactggcacacaagtaatctgccagtcaaaatacagataataacaataacatgacaattaaggtaagttagcaagctgtcaagtttttaaaagtataataaggctttcagcttccacagatcctccaacttagtatttaaacatgagatttcagattctcatttagctgctactttgaactgaaccatcattagtgcaatagtgcaagaagacataggcaaaaagtaattcaatatgtgtaaataaagtagatgaatttcctttctcattttgtcatttcctaggcatattaactaaccaatatagagttcaagtaaagtggacttggggcaacgccaggaaagcctgtggttagttttttctttcatgtgaccctctgcccaaatgacgagtctgggagtgctgggatccaggaaaggtaaccacaggtaaacattaatccagcccttccctagggcaatgttacttatgggctatgaaaataattgttgttcataatctttgccattagacttcatggcacaattcccactgtgcctaagaacacgaataggtaaattatcaatcattaatatccccctagaatataatatccatgaagctgttttatacctccacagcaactttcataataagcattcrgtaaatacttgtttaaggtattgttcaatcccacaaataactgattttcacttaaaagtgaaaaagaaatggtatattacctatcacataaaacaatatcaattttaaacctgacactatcagtatgtctgatatcaccaaactaatagatcaatttaaaataataattccattttagaaatccattcatttagctgaaggactggtaaatgcaattgaaagtaatgtgctgtaaaca

SEQ ID NO: 551479 - DNA, 620 bp, Homo sapiens
gacatttctttcctgctcacagtgtgccaggatctgtgccatttacctcaccttcagtgtatcatgtaatcatcaccaaaccctatgaatttacttctgttatcacctctctactttatagatgcaaaaactgaggctcaggttaagtgacatctccacgaccccagagatactaagtgctggaatcaggatctgaagccaggttcatctcaacccaaagactacacccttagtcgaatgctacatggccaaatctgtcttagtgtcaaatgccacaaagagatgaatgctatcaccagtgtcttcctcctgggaaagccctcctcctcatgcttccaggacaataccctggtgtgaacttaccctcactagttctccttgctccacccatgagtcctggtgctctctgggacttgatcttttcacacgcgccattctctccaggcaacgtgacataaaactctacatttaactaccaccaaaggctgatgactggcaaatctttacctttacctttatcttgagcccacrtctttctcccatactcccatcttcttagatgtaacatggactcctccatttcagcatgatccatcctgaactcattacttacatccctg

SEQ ID NO: 551480 - DNA, 549 bp, Homo sapiens
ggggtgctgcaggggctgaatttattacaatagcatccagagaaagactttttaccctacatgatcctgcaacacatacttaacatggaaaatatattttactttattcctcctaactgcctgacaataaaagtttattaaccttatcttactgatgagggattgtagctaaaaaaaagttaaaatctcttcttaaggtcactacatgggttgaatggcagccccccaaaagatatgtccagatcataacccctgaaacctgtgaatattaccttatatagcaaaatatgtgaatgagtaaatttaaaaaggggatgagcccattctgcattatccaggtgggccctaaaggcaatcatgtgtatgtatccttatgagagagaggcagagggagtctgggggacagataaacgaaagagaagacatacaggagaggaggtggcaaggtgaccacagaggtgaagattggagtaacgcagycacaagccaaagtatgactggagacaccagaagctggaagaggcaaggaatgggttctccctaaagcct

SEQ ID NO: 551481 - DNA, 523 bp, Homo sapiens
gtgtttatctttttgtgactggcttatttcatttaaaataacgttttcagggttcataatattgtagtataggtaaaaattttcttcctttttaaggctgaakaatagtttgctgtatgtatataccacgtgttatttatgaaatgatgatcttttacactttcagggctctcataacttatctgatgatctatcacagtttctatcatttcactgtttttcctagctgaaattaactttttggcatatccttggcataagaccctggggaataaagttcttatataatcccacattttatttcgcttctagtcactctatggttaatgggtaaattctcagctttgactgtcttagatttggctgccgataagtaaagcgaggtgattagaaattgaaagaaagaaaaaaaaaagcaaacacaacatttttcccccaatcacctggattctgcaatggaaaagaatggcttttagtgctattgtctctgttaaatatttataaaagtctgtggaagtgcttg

SEQ ID NO: 551482 - DNA, 970 bp, Homo sapiens
ttgggttttactacctgtcaaatcttatgataccaaacctaactagtagcaaaagatgtcccaataagagaatctcaattttatgggtatgtgtgaatttataacacaaaatgtgttgattgaaatactaaatttatctaaaattaaacttttcacataggtctgtatcagtcatagagacaagtatttcaaagtagttgcattttatctcaaccatccttgatttctgcatgattttgcttcatgtatttagctgtcctgttatttggtgcaaacgaatgtataattattatttacttttctttataaattatgctttcgagtgtgtgtattaaagacaaaataaagagggtaatatagaagggttattttaagaaggaagctacttttaattcaccatgttaccaaaatcagtcatttgtggaatcaataattattccatagaaatgtaaatgttacagaaaactttttttaaagtttttgtgtttttctcttatgctaacttatgttttaattcttcaactttacttygttcatctgttcaacctcaagactctgatatagtttatgtttataaccatgaaatatgcaaaattatatgtaattataaatttatatttccaaatcaattttgaaaactaggacaaaatttttccagaaggaattttcagataattaaagcattaaagactcatattttaatatttgccaaaaagatgacaggtctaaacatatgcataatattctaatatgtgctgataccttttctcttagtttcccaatattttttgtggtttgtatatgtatgttcagtaaaatttgaaaataaaaccccatctctgtctctttccactttcctcttattttagtgtggggtaaatttatatgagtttgaatgtatgtatgcatttaagataaaatataatttgattaaataattcttaaagtttgatttatgacataaatatca

SEQ ID NO: 551483 - DNA, 609 bp, Homo sapiens
cactgtcttatcaattatagcacttttccctcactcccacatatttctcttttgcccttttctgtcaatcagtcacacttctagagggtatttgcagctatcctcctcgagggtacaactgttctgatattttgtttttcacaccaaattaatgatgtccctttagaacttcatataattagaattttacawtatacactcttgtttttgagattcatacctggttttgcatgtagcagtaatttgttccttttatctctaagaaatatcacattgtatgagtatacaacatcctccccaccttcacactgcaaccagaaccacaaataatgccaaaatgtcactttaactttttgtcctacaagcatctgtggtgttcggtaattgcttcatccgagtacttttccgcatataatggaacccagtatgacataatgattaactgcattaatctgggaaaagaatatctgaatttgaactctgtttctccaattcaattacctctatgatcttagacaagttatataagttgtctgtgtctcagaattcttaacattaagatagatatactaataagtacctcgttaaattactggagtttacaaaatt

SEQ ID NO: 551484 - DNA, 2009 bp, Homo sapiens
tttctctcttgtcagtatgaggtaggagatcaggagaacttcttttgtgagcctatgccatgacttgactgatcaaaataagatgtagtggagaaacctgctgaaatcagcagatggcaatgacagtgacctccagtcatcctccctatcaggagcacagcatgggaaaaccccaccctcatgatttaattaactcccactgaattcctcccatgacatgtggagatcatgggagctacaattcaagatgagatttggatggggacacagccaaaccatatcaatgctagtgtgatgtttttagatcaaaagggtcctctcatggttttctagaaaatcctcaaatattcattctttccttcattctataagcaaatattgaatgaacttgatgtgttcctggtataggctaagcgctagaggaggggaaaagaaatgaatagaaaaaacagaaatgttgattctttatttcaaaaatcttaaaacctgtatttaaaagaaaaattcataagcatatttgactggtattagtacattaaaattctatgattttaagtgataaattaggatatatgtcataacttctaaacatgaagaaaataaaggtataatcatagtgggatagatttaactggggtttcttagaaggttgaataacatagtcagtacatgggaagaaaaatcttccacaaagttaggaagaaaagattataagggaaatggtaggtaaacaaatgtagatgaaatagaattaacggttttagtaattttaaacagcactatcaatctgcagtataacaaagaaaacctggttaaaagttaatgtacataacccatgattctattagatgacaaatagatagacatatagataataaataggtatatagatgctagagagacagacagatagacagatagatagatagatagatagatagatagatagatagatagacagacagacagatagccagacaggagatagagctacatttgcacttgtacccacagctacatttatctactgtatagactatttaagactatctgtaccaaagagtgtaggtgctctgcttctgaggacaagcttctggcttgattttcacatacaacattgaggatggtgttgaaaaagaacattaaactcaccatacctcagttttctcgtacgtcaaggaaggtgactatgttacctacatataatttaattgtggctggaatgaggtaatttctataatgtttagcatggtaaatgggaccctgtcagaatcccattaatgataactattttagtaaaattaaaaataaattattaaaatataaatttgaaaaaaagttcaatttcatttacttaataagtaggaattcaaaagggagaacttaaaatcgcaaagtttacaaataaaagtgcatatctagttcyaaaataggtttatttataccagaaataatttttccccaatatttaagaaattgaaaacaactgacacctaaaagttgacttctttggtgtagcagctggctggggctgaggagcagctgctcattttggtcaggatgtctgtgtgctttttcttattatttttcacacctcccaatcaaaccactagttattagtgtttgactactaggctctcttcatttatttttttattacctgcttgatcctaggaggctttaaatttgccacctccaattaatctaattctgaagagtctcccaagtatacatctgcgtgtagctactgcaggaaaataaatgcagaaaatattctgaaagaaatggtgtcactatagaaaacttaaagctacatttatatttgaagacaaaatccccagaggtaaactttagttctcttactttaatacattgcatacaatacattttaatcaggatataagatgatgttatcataaataattcaatctagtaatccactgcacagcatttactaccaaaagagaactgataaaacatgcagagtgatcgtttacaatttggacaac

SEQ ID NO: 551485 - DNA, 658 bp, Homo sapiens
ttacgttttaaatgtagtgaggttgcaagcccgattcccacaggcacttatttgcaggatctgctttcattgggactaacacacaagttaacaactgcagtgctgataaaagagatcatctgtaagtgaaacatactgcttcctgccgtgcggcctctttcaatagatccagtcttctgtatactttcattacaaattcaggcttattcctattactttttcagaaattcagaatttgaaaaaatcattagcgcattgtcttctaactctgtttgttacatcactgattcataacttttttccaatcaagaagccttttcacagtgttagaaaactagtttttacaaaatggctacgtaccacattctgaagttcacaaataatttcaagcacaaccattggcctcagtctaagagcacttgctctaggtactaaaacccataaatgcatttctgtaatagaatttgagaaacaggaaacattctacttgagagcaatgctgaattcttgagaaaattctataatggaatcctgctttcccattgatttacattgcaattgtagatattcatagctaaataatttgtttttatctaaaatgcaatakaattattcttagaaagaagaatccctcaaacacagtaacattcctaaaaca

SEQ ID NO: 551486 - DNA, 663 bp, Homo sapiens
atacctataagcttactaatttcatgttaattataattatttttattaatgctgattttatgtcatgatattatgtttaagaaatttttattggataacagtgcgatgttttatactaaatttcaaacttttaaatgaagactggaataaattttctcaaataattgtttccagaatatcacaaaagctgtcattttcctttyctgtggatgtgagaacaaaacagttgggaacaggacaaaatacaaaccatctgtttatatcacaatttagttttctagaagtagagagagagtcataaatgaaatgatctaattcaggaacaaaaacaagtgcaatatttccacttttatcttttagtaatattgaatttttattaataaaaattatgcatacaaaatatcttttaatccacaatatactttaattaaaaaacagacaatgtagagatgccaacctagacactaacatgtgggtaattactttgagaaccacctaagggagaataaaaatacatttttaaaaatccaactgcaacagaaaatgattatttgcatgacaactaaaacataaatatgtatgataattgtgtcaattaatgtaaattaagtagtgtaaaaagaaacaataaaataaaatttcttagtaatttgtttcctttaa

SEQ ID NO: 551487 - DNA, 663 bp, Homo sapiens
atacctataagcttactaatttcatgttaattataattatttttattaatgctgattttatgtcatgatattatgtttaagaaatttttattggataacagtgcgatgttttatactaaatttcaaacttttaaatgaagactggaataaattttctcaaataattgtttccagaatatcacaaaagctgtcattttcctttcctgtggatgtgaraacaaaacagttgggaacaggacaaaatacaaaccatctgtttatatcacaatttagttttctagaagtagagagagagtcataaatgaaatgatctaattcaggaacaaaaacaagtgcaatatttccacttttatcttttagtaatattgaatttttattaataaaaattatgcatacaaaatatcttttaatccacaatatactttaattaaaaaacagacaatgtagagatgccaacctagacactaacatgtgggtaattactttgagaaccacctaagggagaataaaaatacatttttaaaaatccaactgcaacagaaaatgattatttgcatgacaactaaaacataaatatgtatgataattgtgtcaattaatgtaaattaagtagtgtaaaaagaaacaataaaataaaatttcttagtaatttgtttcctttaa

SEQ ID NO: 551488 - DNA, 1006 bp, Homo sapiens
atggtctaatttcaatgtcacgaatatgacaaaaggaaataatcacagaagaatttggggtgaggagaggtcaatacttgtgtcagtgattctccaaggggaatgaactgatccctttatgtttatttgaatacgacaccatgctatatgctgtgtgtacatttagagacatctaagtgatgtatatgaattgtcataacaacattttctgacctcaatcattacctgtatggatatgacacatccaagactaatctgtaacacagaagcccaatgaatatgtgttgtttgaaagaatgaacaaatgggcagcaaactcaaatattcctctatatacaggaattcttattttcccaccacaactaccatttaacttctcttcatctctcccactttttttctcctaaggtattaatgtctaaagtttattctctttctctttatctccttcttctcctcagactggtttaatgtagagtctatgggattcttaattccacaatggaatttccaggatattcatcaaattcggtttttctttaagacatttatgaatctcactttagccccttatgtactcaaactcatcctgatagtgtctttaaccatacaaagtgaagtcgatagaaaggggaaccttttaacttatgyttatttcttaacagttacgtattgaacatttatggaataaggaagtaaaccaggcacttgtattgttcctaactgaaaatcagtataacttaagcttggaggggctaaatgctctggcaagaccatgcattcattaagtgctaaatttggacctaaaatgacacctagaatctggttctttctactgtattatgcaatcttctcattgtgttttctttggaatagaagactccaagacaattactgagtatattaaatgcaataaaataaggaaaaacaaaaccaaaacattgagaagacctggaagtaggtaagagacaaagatatgcatcctctagtactgttcttcgaacta

SEQ ID NO: 551489 - DNA, 561 bp, Homo sapiens
ctttctttcctcccagggttttattctataagtaatcaaaggcccatttaatagtttagtgtgtgtctacaatattctcccatcctcaattaaacttagatattatttgttcaacctaattctyactcagccaacaatgatctatcatagtgtcaacaatgtgcaaggcctgatccttagataccttggagaaattagaattatacatataatgtggttcttgctttctaaaagtacctgctttagaataagaggacaggaaaaacacatatacagatagttcttgccttcttttcttcctttttcttaaatgctttctttttttctgctagaatatatactggaaggtagattatcatagaatcccttctgatagaaagtaattaagagggagtctaatatattgcctaagaatgcaggtgatgcctaggtttggatctaggctctgttacttgctaagctccagtttccttatctgtaaaatgacatataccttgcagaattgtcttgaataaaaaatgagaaaaacatggctcacagtaagcattgaacaatagtagc

SEQ ID NO: 551490 - DNA, 624 bp, Homo sapiens
aattgatatttagctaacatctatttttattttaatattccaggaaattattatgcagaaactttaaaggtctgtgtacttctctggtgttttgattttttttttttctttttctgtgagtaattttctaaaactggtttctaggccaggctatttatgtcttgctttttattttttttggcgatggagtctcgctttgttgcccaggctggagtgcagtggcgctatctcatcttgctgcaacctctgcctcctgggttcaagcagttatcctgcctcagcctcccgagtagctgggactacaggcacatgccaccacgcctggctagttttttgtatttttagtagagrtggagtttcaccgtgttgcccaggctggtctggaacttctgagctcaggcagtctgcctgccttggcctcccaaagtgctaggattacaggtgtaagccactgctcccagccttattattttatttttatggattcggggtatatgtgcaggtttgtcccatggatatattgtgtaatggtgagttttggacttctgttgtgcccatgaacattgtacccaataggtggtaatttttcaattctcatccctctctctgcctctgcccttttgg

SEQ ID NO: 551491 - DNA, 647 bp, Homo sapiens
taatgtcatgtttctgcatctatattacttgttgggtttacagacgaggtagtgtattattagtgggaagcwttgagtgctacatcatctccctttctataaaataaattgagtacgaaacaatttgaattaaaacacctgagtaaatagtaactttggagacctgctgtactatttgtaccttttggatcaaatgatgcttgtttatctcagtcaaaattttatgatttgtattctgtaaaatgagatctttttatttgtttgttttactactttcttttaggaaaacaccagaaattattgttggcagtttttgtgactcctcttactgatcttcgttctgacttctccaagtttcaggaaatgatagaaacaactttagatatggatcaggtatgcaatatactttttaatttaagcagtagttatttttaaaaagcaaaggccactttaagaaagtttgtagatttttctttttagtatctaattgtagcacctttgtggacagtggatgtaatattaagtgacagatgggaaaaggatttttaaaaaaatagcaactgtttcagtggatgaaataaagattattagcagagaaaatgaatattgggcataactgtcctggtgaaagacaatctcataaatga

SEQ ID NO: 551492 - DNA, 647 bp, Homo sapiens
taatgtcatgtttctgcatctatattacttgttgggtttacagacgaggtagtgtattattagtgggaagctttgagtgctacatcatctccctttctataaaataaattgagtacgaaacaatttgaattaaaacacctgagtaaatagtaactttggagacctrctgtactatttgtaccttttggatcaaatgatgcttgtttatctcagtcaaaattttatgatttgtattctgtaaaatgagatctttttatttgtttgttttactactttcttttaggaaaacaccagaaattattgttggcagtttttgtgactcctcttactgatcttcgttctgacttctccaagtttcaggaaatgatagaaacaactttagatatggatcaggtatgcaatatactttttaatttaagcagtagttatttttaaaaagcaaaggccactttaagaaagtttgtagatttttctttttagtatctaattgtagcacctttgtggacagtggatgtaatattaagtgacagatgggaaaaggatttttaaaaaaatagcaactgtttcagtggatgaaataaagattattagcagagaaaatgaatattgggcataactgtcctggtgaaagacaatctcataaatga

SEQ ID NO: 551493 - DNA, 1050 bp, Homo sapiens
ctttgtgtgccctttctttttgtgcatttaatatggagcagtagactcgctccacttcatgctgatggaggtggaagggggagacggaggtggaagcctgccactgaatttgaattatgtagggaacatagccgtgctgtactgtcttgtcaatatctccttccagctggtgctgacataattaggcacatcaagcacagaagaagacattttaaattcaaagcactgttccaagtcctgtgagtagctatgaaaggtgcctgaagtaatcaataacacatggtaaggtgtgcagttccagtaggttatccacccacctcaggtctattataagacacgaagaagcagaaaagccaagatttctaacttcttaaagagtggccttgtttgaatagtttgacttattagagtgtgttttctttaaaaatatatatacttagaattgaatctttcatcgccagcataaagtgtatatatgtaaactttctgagaccaggaacatcacctcctttgytctctactgtacatacccacagcatctaacagggtatgttccagttagtaagatctcaataaatacgtgtctcagggaataaatagataaatggagagccctggtcttacttttccttaccagtaaagtgggaatatattgtacattatggaattattatctgggttagaaaaaaatcagacaaaacatcttagcacacagctaatgctccataaagtggatatataataattaaaattatatgtggttgtaatatagaattgaaattatgatggagaataacccacagtttggtttttacaaatataactcgggcttctatcactgtcctgcctgactcttgcctgccccttcttctccccaatctttctccttttttcttttccaagcctctatttctcataaatttcttttgcagagcagatatcacttttaaatttgtctttaaagcccatggtttgagggtctcagatgccactctttaaaacacttaccaaagtatttttctaaacaaagacaattgtctcccaagaaaa

SEQ ID NO: 551494 - DNA, 590 bp, Homo sapiens
acaagacaagagcacaggacgtttggcgtagggctgagagccaatgacataccctggagcagtactgaagtttgggacctctcctgctaccattcccagygtctcagtgctgcagcccctggacttaatatatttgcggtaaatatcttcccaattgtctctatgtctctactacagttcatttagatagaatttggagttgatggcattgactactttgggtcccttttatttaacaaaatattttcagggaagtttacaaagttatctttttgcatagagtatgttcctttataatatgagatgtaatttgttacagctctggaaagaaaactaagagttaaaatcttgctcttaaacctaaatctaagaaaggatgacctacttaataaacagtgctgggaaaacaggctagccaaatgtagaacaatgaaattgggctcctatctctcaccttttgcaaaaatcaactcaagatggatcaaagacttaaatctaagacctgaaactacacagattctagaaagaacctgggaaaaactcttctgcacattggtctaggcaataacttatgactaagatgccaaaag

SEQ ID NO: 551495 - DNA, 389 bp, Homo sapiens
ataatcaagacccagtgaggtttgtggggtaatatttatctctataccacagatgaagaaagtgatacttaggtgrtttattcccaagatcacacaacccggaagtcgttagttgaggacagcctcatcaggccaagtctcaacatccagtgctccttccctgacactataccacctcagaaaacaggatacagagaaaaggaaccttccagtgatcccttctctagttttcagatacctgaaaggttcaacaggctctggccacacctacaattatcagacctttaagtacccatgggatgcagagaatgactgaaggctggataccctgggacagacctattgtggattacagtaagaagacaccttactagagatacccaaaaagg

SEQ ID NO: 551496 - DNA, 1442 bp, Homo sapiens
ttaattctgcttaacactaaaagggttttgagcaccataatgagattcttctgtctgctaattaattgacacgctcctgaatattcatatgagctagcaccaatacgttcctaattgcaccgtggaatagatctcagaggaaagtaaatcgccatagacttaattaaaataatgtattccagatccagcacggggaaagatgagacatttgccttcgagctcgctaagaaagtggcacctggttggtggaggggagagataccaaatgtcggcgcccagcctgaaataagtggcrtgggacgcgcagggagggcgttcagcttcagaaagcagcggctacgctgggtccaaacccggcggctcgggaggccatagctcctaggtgcgtccgagctcctgctaccctgcgcggtgttgtcctaccggaggaagtggctgatgggcagtctaggatcccggcccctgacccagggccctctcctccctgcggtcctggtccgggtcatggtcccggggctggtctgaagtgctgtctacagagggcacttggggaaacatcgtaggtccggaaattcccagggaaagtttttgcaggagttgtggacgccgcagcagccccaactctcccaacccagcttgcgacccgagagaagtcgctcacacttctctttgggggagggcgacagttccggggaggacgcttggatcccgaaaatgacgggatccaggtcccacaaccctcaggaagcgctgcggtcttcaaaactgcgcagctaaattcctgggcgcattctccctttcttggcgagtccagtgcccgtgccggggagcattccagcccagcttacctcggcaggtagaaagcacagcatcgaggctgcggaccctacatctgggctccacatcacagccatttttaccagataatgcaagagaaataaactctcctcccttggaaacacaagtcccccacccccttctttttggggggaaaaaaatcaccacaggttagaaactgaaaagagtttatttgaaggcatacaaatgcatatttattatacacatgtaggaattaacaatgtaaattacaccgccagcagttgctggttgtttattcattagatctttagaaaatctacattgcctccagacagcgcgatgataatgtgaaatacacaagcagtttacataaccaacttcaacgcacagcttcgtgctccgccactcggagtcatcaacaggtcgcggggaagcggacgcgaaggaaaacctaagttcctaacaactatggaaaatctgggaaacctacgaggcccacagttccctctgtccttttgggaagcgataaaagacttgaagaaaaagaagcaactgtctcactatggttcatctactttatctcgtttgtgtgtagcttttttttttctttgcaattaaaaaaa

SEQ ID NO: 551497 - DNA, 565 bp, Homo sapiens
tcacatattctagcatagaaacatttgtaaatatagaattaataaccctaatttttataatccattttctttgtttggtaggttataatcctaccaaaaattctactgataaaatatgatccatttattttattttgtttaatttatattgttatacttctggtcataaacttttatttctttataataacaattttataatgtaattttacattgtaaaattttataatgtaaacaaaattttgaaataaaagtctgattaataaagattatataatatgatattytgaattttaaaaatgtactgtatatttcataatgtatctctactttagcataacaaattcattaagggtaaatgaaaaaagccaagaaagtactatagagaccactcatattattttaatgcctaacaaatacacaagaataaaaccaaatttttcatcaaattatatgagaaaaaattttacgcagtaagattatacatttttttaaatctgtaaaaagacaatcattttggaaaaattactttttaatcctctcccttcctgataaaaaaatatgt

SEQ ID NO: 551498 - DNA, 556 bp, Homo sapiens
ggagctgcagaccggagctgttcctattgggccatcttggaatgcccccccccccttttttttttaagatggagtcttgctctgtagcccaggctggagagcagtggcatgatcttggctcattgcaagctccacctcctgggtttacascattctcctgcctcagcctcccaaatagcttggactacaggcatcttccaccacgctgtgtgtgtttttttttagtaatatgaagttaaaaccaggtaccatgaaggctcaccagattttgcttcttatgaaggtgttttttttttgttgttgttgttgttgtagaatgttgttaaatttgcattcttgcagggtggcagatgagcattggagtcttctattctgccatcttcctccaccttcttattctggcatttctgttgaaggactaattccttttatttcagaacaatattgtggctcttatcctcttccactttcaaacatatatatttttatattgctccctctttatcacattatctgtaaggtctaagacatattacttcataaactttatttttcc

SEQ ID NO: 551499 - DNA, 556 bp, Homo sapiens
ggagctgcagaccggagctgttcctattgggccatcttggaatgcccccccccccttttttttttaagatggagtcttgctctgtagcccaggctggagagcagtggcatgatcttggctcattgcaagctccacctcctgggtttacagcattctcctgcctcagcctcccaaatagcttggactacaggcatcttccaccacgctgtgtgtgtttttttttagtaatatgaagttaaaaccaggtaccatgaaggctcaccagattttgcttcttatgaaggtgttttktttttgttgttgttgttgttgtagaatgttgttaaatttgcattcttgcagggtggcagatgagcattggagtcttctattctgccatcttcctccaccttcttattctggcatttctgttgaaggactaattccttttatttcagaacaatattgtggctcttatcctcttccactttcaaacatatatatttttatattgctccctctttatcacattatctgtaaggtctaagacatattacttcataaactttatttttcc

SEQ ID NO: 551500 - DNA, 556 bp, Homo sapiens
ggagctgcagaccggagctgttcctattgggccatcttggaatgcccccccccccttttttttttaagatggagtcttgctctgtagcccaggctggagagcagtggcatgatcttggctcattgcaagctccacctcctgggtttacagcattctcctgcctcagcctcccaaatagcttggactacaggcatcttccaccacgctgtgtgtgtttttttttagtaatatgaagttaaaaccaggtaccatgaaggctcaccagattttgcttcttatgaaggtgtttttttkttgttgttgttgttgttgtagaatgttgttaaatttgcattcttgcagggtggcagatgagcattggagtcttctattctgccatcttcctccaccttcttattctggcatttctgttgaaggactaattccttttatttcagaacaatattgtggctcttatcctcttccactttcaaacatatatatttttatattgctccctctttatcacattatctgtaaggtctaagacatattacttcataaactttatttttcc

SEQ ID NO: 551501 - DNA, 556 bp, Homo sapiens
ggagctgcagaccggagctgttcctattgggccatcttggaatgcccccccccccttttttttttaagatggagtcttgctctgtagcccaggctggagagcagtggcatgatcttggctcattgcaagctccacctcctgggtttacagcattctcctgcctcagcctcccaaatagcttggactacaggcatcttccaccacgctgtgtgtgtttttttttagtaatatgaagttaaaaccaggtaccatgaaggctcaccagattttgcttcttatgaaggtgttttttttttgttgttgttgttgttgtagaaygttgttaaatttgcattcttgcagggtggcagatgagcattggagtcttctattctgccatcttcctccaccttcttattctggcatttctgttgaaggactaattccttttatttcagaacaatattgtggctcttatcctcttccactttcaaacatatatatttttatattgctccctctttatcacattatctgtaaggtctaagacatattacttcataaactttatttttcc

SEQ ID NO: 551502 - DNA, 1651 bp, Homo sapiens
aagaccaacatgtggcatctccagggttccccttcattttctaaattggtacttcactcaaaacatttctggcataacttcttttcaaaaaatgtgtgcttccattccaagcaacataataatagaccaatcccatcagtgagcagaggagggccatggattcctttggctcccctgctgccattcagtgctaaaacactgtccaacaaagccacatccacctcagtgaactgggtgggawccccctgcctttgttctttctccgcaaatgcctggcttagaaactaagcctgattgaaaacctgcagaccaacttaagaacattgtcttgctgaatttcagccttgattaatacccttttctagaatctgaaagtcctttgtcttgaaactctagtccacacttactcctgtccttcaaatttggaaattaaaccagatactcaccttctcatcattttaatgatgccctttggctcaggtgttgttgtcagaaagtaactcttctctttctttttttgagaagaagtctctctcttgtctcccaggctggagcgcaatggcgccctcttggctcactgcaaccacctcctcctgggttcaagcgattctcctccctcagcctcccgagtagctgggatgacaggcatgtgccaccatgcccagctaatttttttactcttagtagagatggggtttcaccacaatggccaggctgatctcgaactcttgacctcccaaagtgctgggattacagatgtgagtcactgtgcctggctgaatgtaactactttattgacaaagaggacccagttctgtcctttgagtatcttgaatggcaggtgtcatctaatgaacatgtaaagggacctaagttccagtaaccccaggcagcctggtgcacatctgtgttaaggtgtgtgtgttggtgtgggagggtgtgtggggtttgtgtgaagctgtgccaacctgtgggtgtgcaaccatgcaccctctccactttccccacacctgagtggtctgctggtcaccgtcagtagaccatgcatgcaaaatcattcttctggacgtgcaggagaaactgaaaaccagcactgtcaggtgtgttaaaacccttaagattggttctcggctgggcgcggtggctcactcctgtaatcccaacactttgggaggccgaggcgggcggatcatgaggtcaggagatccagaccatggtgaaaccctgtctctacttaaaaaatacaaaaaaattagccgggcgcagtggcaggcaccctgtagtcccagctactcgggaggctgaggcaggagaatggtgtgaacccaggaggcggagcttgcagtgagccgagattgcaccactgcactccagcctgggtgacagagcaagactccatctcaggaaaaaaaaaaaaaaaaaaaaaaaaaatttgttctcatgaacttcctggcttagccaaccacatccacccttccatgtgtaggttaatattcccaatctgccacctgctcctccttctatgtgatttctcgagcaaatgcaaagagacttgtctggggcaactcacaccccacaccatcttgatttttgtctctggggtcttcaaagccctctccttgccacagccgagtgagtgcccctgtcttgg

SEQ ID NO: 551503 - DNA, 1651 bp, Homo sapiens
aagaccaacatgtggcatctccagggttccccttcattttctaaattggtacttcactcaaaacatttctggcataacttcttttcaaaaaatgtgtgcttccattccaagcaacataataatagaccaatcccatcagtgagcagaggagggccatggattcctttggctcccctgctgccattcagtgctaaaacactgtccaacaaagccacatccacctcagtgaactgggtgggatccccctgcctttgttctttctccgcaaatgcctggcttasaaactaagcctgattgaaaacctgcagaccaacttaagaacattgtcttgctgaatttcagccttgattaatacccttttctagaatctgaaagtcctttgtcttgaaactctagtccacacttactcctgtccttcaaatttggaaattaaaccagatactcaccttctcatcattttaatgatgccctttggctcaggtgttgttgtcagaaagtaactcttctctttctttttttgagaagaagtctctctcttgtctcccaggctggagcgcaatggcgccctcttggctcactgcaaccacctcctcctgggttcaagcgattctcctccctcagcctcccgagtagctgggatgacaggcatgtgccaccatgcccagctaatttttttactcttagtagagatggggtttcaccacaatggccaggctgatctcgaactcttgacctcccaaagtgctgggattacagatgtgagtcactgtgcctggctgaatgtaactactttattgacaaagaggacccagttctgtcctttgagtatcttgaatggcaggtgtcatctaatgaacatgtaaagggacctaagttccagtaaccccaggcagcctggtgcacatctgtgttaaggtgtgtgtgttggtgtgggagggtgtgtggggtttgtgtgaagctgtgccaacctgtgggtgtgcaaccatgcaccctctccactttccccacacctgagtggtctgctggtcaccgtcagtagaccatgcatgcaaaatcattcttctggacgtgcaggagaaactgaaaaccagcactgtcaggtgtgttaaaacccttaagattggttctcggctgggcgcggtggctcactcctgtaatcccaacactttgggaggccgaggcgggcggatcatgaggtcaggagatccagaccatggtgaaaccctgtctctacttaaaaaatacaaaaaaattagccgggcgcagtggcaggcaccctgtagtcccagctactcgggaggctgaggcaggagaatggtgtgaacccaggaggcggagcttgcagtgagccgagattgcaccactgcactccagcctgggtgacagagcaagactccatctcaggaaaaaaaaaaaaaaaaaaaaaaaaaatttgttctcatgaacttcctggcttagccaaccacatccacccttccatgtgtaggttaatattcccaatctgccacctgctcctccttctatgtgatttctcgagcaaatgcaaagagacttgtctggggcaactcacaccccacaccatcttgatttttgtctctggggtcttcaaagccctctccttgccacagccgagtgagtgcccctgtcttgg

SEQ ID NO: 551504 - DNA, 1651 bp, Homo sapiens
aagaccaacatgtggcatctccagggttccccttcattttctaaattggtacttcactcaaaacatttctggcataacttcttttcaaaaaatgtgtgcttccattccaagcaacataataatagaccaatcccatcagtgagcagaggagggccatggattcctttggctcccctgctgccattcagtgctaaaacactgtccaacaaagccacatccacctcagtgaactgggtgggatccccctgcctttgttctttctccgcaaatgcctggcttagaaactaagcctgattgaaaacctgcagaccaacttaagaacattgtcttgctgaatttcagccttgattaatacccttttctagaatctgaaagtcctttgtcttgaaactctagtccacacttactcctgtccttcaaatttggaaattaaaccagatactcaccttctcatcattttaatgatgccctttggctcaggtgttgttgtcagaaagtaactcttctctttctttttttgagaagaagtctctctcttgtctcccaggctggagcgcaatggcgccctcttggctcaytgcaaccacctcctcctgggttcaagcgattctcctccctcagcctcccgagtagctgggatgacaggcatgtgccaccatgcccagctaatttttttactcttagtagagatggggtttcaccacaatggccaggctgatctcgaactcttgacctcccaaagtgctgggattacagatgtgagtcactgtgcctggctgaatgtaactactttattgacaaagaggacccagttctgtcctttgagtatcttgaatggcaggtgtcatctaatgaacatgtaaagggacctaagttccagtaaccccaggcagcctggtgcacatctgtgttaaggtgtgtgtgttggtgtgggagggtgtgtggggtttgtgtgaagctgtgccaacctgtgggtgtgcaaccatgcaccctctccactttccccacacctgagtggtctgctggtcaccgtcagtagaccatgcatgcaaaatcattcttctggacgtgcaggagaaactgaaaaccagcactgtcaggtgtgttaaaacccttaagattggttctcggctgggcgcggtggctcactcctgtaatcccaacactttgggaggccgaggcgggcggatcatgaggtcaggagatccagaccatggtgaaaccctgtctctacttaaaaaatacaaaaaaattagccgggcgcagtggcaggcaccctgtagtcccagctactcgggaggctgaggcaggagaatggtgtgaacccaggaggcggagcttgcagtgagccgagattgcaccactgcactccagcctgggtgacagagcaagactccatctcaggaaaaaaaaaaaaaaaaaaaaaaaaaatttgttctcatgaacttcctggcttagccaaccacatccacccttccatgtgtaggttaatattcccaatctgccacctgctcctccttctatgtgatttctcgagcaaatgcaaagagacttgtctggggcaactcacaccccacaccatcttgatttttgtctctggggtcttcaaagccctctccttgccacagccgagtgagtgcccctgtcttgg

SEQ ID NO: 551505 - DNA, 1651 bp, Homo sapiens
aagaccaacatgtggcatctccagggttccccttcattttctaaattggtacttcactcaaaacatttctggcataacttcttttcaaaaaatgtgtgcttccattccaagcaacataataatagaccaatcccatcagtgagcagaggagggccatggattcctttggctcccctgctgccattcagtgctaaaacactgtccaacaaagccacatccacctcagtgaactgggtgggatccccctgcctttgttctttctccgcaaatgcctggcttagaaactaagcctgattgaaaacctgcagaccaacttaagaacattgtcttgctgaatttcagccttgattaatacccttttctagaatctgaaagtcctttgtcttgaaactctagtccacacttactcctgtccttcaaatttggaaattaaaccagatactcaccttctcatcattttaatgatgccctttggctcaggtgttgttgtcagaaagtaactcttctctttctttttttgagaagaagtctctctcttgtctcccaggctggagcgcaatggcgccctcttggctcactgcaaccacctcctcctgggttcaagcgattctcctccctcagcctcccgagtagctgggatracaggcatgtgccaccatgcccagctaatttttttactcttagtagagatggggtttcaccacaatggccaggctgatctcgaactcttgacctcccaaagtgctgggattacagatgtgagtcactgtgcctggctgaatgtaactactttattgacaaagaggacccagttctgtcctttgagtatcttgaatggcaggtgtcatctaatgaacatgtaaagggacctaagttccagtaaccccaggcagcctggtgcacatctgtgttaaggtgtgtgtgttggtgtgggagggtgtgtggggtttgtgtgaagctgtgccaacctgtgggtgtgcaaccatgcaccctctccactttccccacacctgagtggtctgctggtcaccgtcagtagaccatgcatgcaaaatcattcttctggacgtgcaggagaaactgaaaaccagcactgtcaggtgtgttaaaacccttaagattggttctcggctgggcgcggtggctcactcctgtaatcccaacactttgggaggccgaggcgggcggatcatgaggtcaggagatccagaccatggtgaaaccctgtctctacttaaaaaatacaaaaaaattagccgggcgcagtggcaggcaccctgtagtcccagctactcgggaggctgaggcaggagaatggtgtgaacccaggaggcggagcttgcagtgagccgagattgcaccactgcactccagcctgggtgacagagcaagactccatctcaggaaaaaaaaaaaaaaaaaaaaaaaaaatttgttctcatgaacttcctggcttagccaaccacatccacccttccatgtgtaggttaatattcccaatctgccacctgctcctccttctatgtgatttctcgagcaaatgcaaagagacttgtctggggcaactcacaccccacaccatcttgatttttgtctctggggtcttcaaagccctctccttgccacagccgagtgagtgcccctgtcttgg

SEQ ID NO: 551506 - DNA, 1040 bp, Homo sapiens
tctggactataaggaaattacactcggaaaactgaaatatatgtagacatgaggctataaatttggggctcaaagggaaaagcaggtataagatggggtcagtggactaaagaatcagtgaacagaaatatatgacctttgagtcagcctataaatttccctcctcataaaactcaatgaaggaagtagaaccagagccagaacttcaggaggagatatggttagcacctaacacagtagccaccaaataaaagcatgctgaagacgaagtcacagaaacacttgttaaaacagatagagatagtcttccaaaggctagcacattcagattgaatggtttctaaatgcagaccagatgatatttttcaagaaatgtaggtttctcggcttaatatctgagctcccaccatccgttaattccataattctttctcagacttctctactgactggtattaggttggtgcaaaartaattttgccattaaaagtgatggcaaaaaccgcaattacttttacacccatctagtatttgcagcaggcagaagctaaggatgctcaccttgccccatccctcccccaaatgagtcatgatcatccaagattgcactccaaaatctgggaaacactttaatgaggcactgaactgattaataaggagtgtttagatttttcccatagatatttacaacagaatactaactaggctgcaccttgagactcaaggaccaatagaggctggtttctggacatatcccaggaatagagtagctcttaaaactaatgattcaattaacttaaatatgaattgagcataaggctataactgaaaaatctgtattagtagaggatggcagcaatattaatattttttagaaatcattcactttggactttgccatgtttcacagagtgtttgtagataatgaaactctacacgtcaaagcagattgtgcagccaagcagctctgaagggacttgaatatttagggtagattttatttatttacctatttcctaccttgttgctaaaatgattta

SEQ ID NO: 551507 - DNA, 1040 bp, Homo sapiens
tctggactataaggaaattacactcggaaaactgaaatatatgtagacatgaggctataaatttggggctcaaagggaaaagcaggtataagatggggtcagtggactaaagaatcagtgaacagaaatatatgacctttgagtcagcctataaatttccctcctcataaaactcaatgaaggaagtagaaccagagccagaacttcaggaggagatatggttagcacctaacacagtagccaccaaataaaagcatgctgaagacgaagtcacagaaacacttgttaaaacagatagagatagtcttccaaaggctagcacattcagattgaatggtttctaaatgcagaccagatgatatttttcaagaaatgtaggtttctcggcttaatatctgagctcccaccatccgttaattccataattctttctcagacttctctactgactggtattaggttggtgcaaaaataattttgccattaaaagtratggcaaaaaccgcaattacttttacacccatctagtatttgcagcaggcagaagctaaggatgctcaccttgccccatccctcccccaaatgagtcatgatcatccaagattgcactccaaaatctgggaaacactttaatgaggcactgaactgattaataaggagtgtttagatttttcccatagatatttacaacagaatactaactaggctgcaccttgagactcaaggaccaatagaggctggtttctggacatatcccaggaatagagtagctcttaaaactaatgattcaattaacttaaatatgaattgagcataaggctataactgaaaaatctgtattagtagaggatggcagcaatattaatattttttagaaatcattcactttggactttgccatgtttcacagagtgtttgtagataatgaaactctacacgtcaaagcagattgtgcagccaagcagctctgaagggacttgaatatttagggtagattttatttatttacctatttcctaccttgttgctaaaatgattta

SEQ ID NO: 551508 - DNA, 924 bp, Homo sapiens
gggagatttccaaaaagggagagtggtaaaatgtagggagtttttgtctgtttggttgtttgtttaaactgcaaagccagtgttgtgattggcttccattccagcatttaattaagttaacatcgagtctctgttgtctttgggtgaaaagaaataaaagaccctccatttgctcagaggtttcccaatgtttagcttgactgcaaatctgttgcaatcccgcagtcccattctctgctcagtccctgcccatcccactgggccagggagatcaaggttaaggacaaagaggtttcacatgaccaggggtctttgtgaattttacagggtttcctgcaaatcactctaaagtgaagccttccataattagcacgccagtgagaatcctttgatcatgtctcctctgctgactaaacagaaaggaaagggacattggggtgatgcctattacctgaaggtgggttgtgtctccttgacccccaccttgaaatcagcctcagactctgagtcagacatgcccagctccacatctgctgtgtgactgtgggcaactcactccacctctctgatcctcagaggcctcatttgtaaaaatgggatgataacagtaatcacaggatattgtcagkggcttcagtgaagtgatccatacacaatgtttagcccggtttctggcacttagtaagagctcaataaacagcagtcattgttactgtatgacatcatctaacgcttgcaaagacttccaaagacctaggttccagcctggttctaccactcattactgagtggtttttactcacatcatgttacccctaacctctctgatcttcctccatcatatgatgagaggaattcaagccctggagaggataatgaagtggatgagaatgatcaccatcataagtataatgataattccat

SEQ ID NO: 551509 - DNA, 1970 bp, Homo sapiens
gctaggccattcctccacttcacacagggtgtgagtgatttgctcaaggtcactgagccccacaggccaggtttgggacaactctcaatggccagttgagacagagagaaccatgtcctccttaagacacctggtgcctgtcctatgcaagaggaatggggttctctttcttttcaccccaagccatgaggtcccagcacctatctctcctacacacctgcccttcactgtgtcctcagcccagctgccagagcccttctccccttagaggggagagcacatgagctgacagaactcccagagaacaggggccaccaggactctgtgacttgcccatgggggcctggaggatttgaggacagaagctccgttataagaggacccagctgtaccgagtggccagcagcacaattagtgacggtcagggtgcgtgtgcacccccatgggtggagggcatgtgggtcgtctctgcaggaaggctttgcttctaccccacagaataactgggcctccggaagagacactaccaggcctcagttctttccaagagttggtgttgcaaggaagcaacatgtggttttcacaaggaaggattttgtccagcctgtgaaagagacctcctcttaagtcagggagccaggacagttgttcacacccatcctccaaagtgtttgttagcagagatggcagcgttttgccttcctgtctggccgtagtttcgtcttccatgaaatgggcccttgagggaaagagagaggctgccacgtcagggtttttattaatataagctgtcactttaaagaaagacactccaggctctggatgcaaaagggaggtaactagtggccagaggaagacaacgtttggtgtagatgtccctgccatttttttaattcacttgtttcctcccccaaaagtagagaagtcaggcattcccacctgggtcctggaaaaactgttctcactcttccatctccccagccgtgggcctcctctggctacggaaacttagattattttttggaggtggagacaccaagccacaccacacttgtcctccttcctcccttcccacgacagatsgttaaattattccaggggagccagagctctgaggctaaattaccacaacggccgtatcatggcaactgtacctgtctgtgcttctgcagctgcagctaccgagaaactcgctcgagaaaagccattatcggggctgggtggggaatccaagacagtgcgtgttccagaactccctcctgcctcctcagacccattagagcagcgccccagttcaggcaagccttgcgtgtgtaaggaagcaaattgaggggatgatggtgttcaggatgtgatgtgggtactgatgttcacagcccaaaactcacccgcgtttgcagactaagggacatttgatgacagcagtgtttttaggaagggggcaaggcagagagagcctctttctgtctacgttcctgatgtttgccctcatttattcatttcttgagttattgagcacatgagagggtcatgggggatgtgtttttggccaagaccagtaaggcccctgcagtcacagagctaaggtacaggtgggaaaacggaacagtaaattagggggcatcagagagtggtcacgtgacgcaggcttgttatggggcgatggggttgagggagcctgggagtgtagctcagtgggcagggaaggtttccctggaaaggtgtctctgacgggaggctagcagagaccaaggcagggggagtgtcaggtgccccagccctgagtaagtagggctgtagcccagagtctcgccgttcgcagctgtgacatcactctgcttcccctgagaccgaagccacttgaaatatgaccctcatgcagaaaaatgtttacgacaaggctcacagaacaagagctgtcgtacctgtcaggatctcagctagaaacagaattcatgtcgctgtgttca

SEQ ID NO: 551510 - DNA, 1970 bp, Homo sapiens
gctaggccattcctccacttcacacagggtgtgagtgatttgctcaaggtcactgagccccacaggccaggtttgggacaactctcaatggccagttgagacagagagaaccatgtcctccttaagacacctggtgcctgtcctatgcaagaggaatggggttctctttcttttcaccccaagccatgaggtcccagcacctatctctcctacacacctgcccttcactgtgtcctcagcccagctgccagagcccttctccccttagaggggagagcacatgagctgacagaactcccagagaacaggggccaccaggactctgtgacttgcccatgggggcctggaggatttgaggacagaagctccgttataagaggacccagctgtaccgagtggccagcagcacaattagtgacggtcagggtgcgtgtgcacccccatgggtggagggcatgtgggtcgtctctgcaggaaggctttgcttctaccccacagaataactgggcctccggaagagacactaccaggcctcagttctttccaagagttggtgttgcaaggaagcaacatgtggttttcacaaggaaggattttgtccagcctgtgaaagagacctcctcttaagtcagggagccaggacagttgttcacacccatcctccaaagtgtttgttagcagagatggcagcgttttgccttcctgtctggccgtagtttcgtcttccatgaaatgggcccttgagggaaagagagaggctgccacgtcagggtttttattaatataagctgtcactttaaagaaagacactccaggctctggatgcaaaagggaggtaactagtggccagaggaagacaacgtttggtgtagatgtccctgccatttttttaattcacttgtttcctcccccaaaagtagagaagtcaggcattcccacctgggtcctggaaaaactgttctcactcttccatctccccagccgtgggcctcctctggctacggaaacttagattattttttggaggtggagacaccaagccacaccacacttgtcctccttcctcccttcccacgacagatcgttaaattattccaggggagccagagctctgaggctaaattaccacaacggccgtatcatggcaactgtacctgtctgtgcttctgcagctgcagctaccgagaaactcgctcgagaaaagccattatcggggctgggtggggaatccaagacagtgcgtgttccagaactccctcctgcctcctcagacccattagagcagcgccccagttcaggcaagccttgcgtgtgtaaggaagcaaattgaggggatgatggtgttcaggatgtgatgtgggtactgatgttcacagcccaaaactcacccgcgtttgcagactaagggacatttgatgacagcagtgtttttaggaagggggcaaggcagagagagcctctttctgtctacgttcctgatgtttgccctcatttattcatttcttgagttattgagcacatgagagggtcatgggggatgtgtttttggccaagaccagtaaggcccctgcagtcacagagctaaggtacaggtgggaaaacggaacagtaaattagggggcatcagagagtggtcacgtgacgcaggcttgttatggggcgatggggttgagggagcctgggagtgtagctcrgtgggcagggaaggtttccctggaaaggtgtctctgacgggaggctagcagagaccaaggcagggggagtgtcaggtgccccagccctgagtaagtagggctgtagcccagagtctcgccgttcgcagctgtgacatcactctgcttcccctgagaccgaagccacttgaaatatgaccctcatgcagaaaaatgtttacgacaaggctcacagaacaagagctgtcgtacctgtcaggatctcagctagaaacagaattcatgtcgctgtgttca

SEQ ID NO: 551511 - DNA, 549 bp, Homo sapiens
cattttaagttaattgatatttaatattaaayatttaatatattaagtgaatacattcaaatctgcaaacaatacagctaggttgtagaagagttaaaaaaatccctccactcagtttttgccaaaacaccacctgtaagcactgagaagcctactgatgcacgcattatcctttgggccaatagaaacaaacgttttaataaaatgctttcccagtggtcaaattgtcttcctgagtaaagctaaacttgctgtagtgagaacaggtagtgtttatttctagcttcttctgggtcccaggttacctaagacccaagggtaatgacaatgggcagctccactttattaaaagccaacatttagcccagacattttattctccaaaaatcagcaagcatagctttacattcaagttgggtataatgactttattttcccagtaattccctaaataaaactattacaaaaaatgactcttcccagtgcaaaatcttaacattttgcttttatgagcaaaagcctgtattttacatatttttttttttttga

SEQ ID NO: 551512 - DNA, 549 bp, Homo sapiens
cattttaagttaattgatatttaatattaaatatttaatatattaagtgaatacattcaaatctgcaaacaatacagctaggttgtagaagagttaaaaaaatccctccactcagtttttgccaaaacaccacctgtaagcactgagaagcctactgatgcacgcattatcctttgggccaatagaaacaaacgttttaataaaatgctttcccagtggtcaaattgtcttcctgagtaaagctaaacttgctgtagtgagaacaggtagtgtttatttctagctkcttctgggtcccaggttacctaagacccaagggtaatgacaatgggcagctccactttattaaaagccaacatttagcccagacattttattctccaaaaatcagcaagcatagctttacattcaagttgggtataatgactttattttcccagtaattccctaaataaaactattacaaaaaatgactcttcccagtgcaaaatcttaacattttgcttttatgagcaaaagcctgtattttacatatttttttttttttga

SEQ ID NO: 551513 - DNA, 577 bp, Homo sapiens
gtatctccaatatgtgtgtatatatgtatgtaattgtgtgtgtatgcagtgtgtgtgagaaagtgtatgcaaacaagtcttatttgactgtagcaccttattactgatattctctccagtcatatatcatggtcaagcaagatgcattgctctaaaaacgtaaaagacacaattgcaaaattgttcgtacttccaaatttgcatccataaactttccaaagttgcatcatttttgcatagtgaaatgtctttgtaataaacacactaaaagaaattgtctttggttttgcagttcagatacagcagttagcctcctagagcctaacaaagtttcagtgaaagttagagccctgaataatttagagaagcatgaaaacaatttagctttcctacagcttgttctgtgaacctcaatgagaacctgtatgaaagtcggtgtttttttgttgttgttgttgttgttgtttttttwaaaaaaaaaaaaaaaggtgaggggagggagtagaattccttgttgaaaacattttgggaaacattttatatcctccctgttggagactcacaacatacattaaca

SEQ ID NO: 551514 - DNA, 776 bp, Homo sapiens
ctcctctagaatcaaaaatgaagagaactttactttgataagtaaaattatacacaaacaaaaggctgttaacttgtgagtaaattctttatgttaacatgactttcatcctgtttttgttggaaaaagaataacagtactttacagaagaacatttaactcccagaaaaaaatgcttactttgctttaattgaaaatggctgtcttacccacttagtaagagacaaactacttagattgtttttcttttattgttttgttcttctataaaaaagtttagaacttctttataaaatatttgttagaaacaattttttaattaaaaaagtacaaaaaattatatcaatcacccagatttaataattgtcaggattttgtctcatctgggatgtttaatatatttttttcttacctgaagcattttaaaacaaatccaaaacatcttgatactttattcatacatgttttggtatgtatcactaaaacacaataattttattatataatttaaatgctatttttacatctaacaaaattaattttaatttcttaatataatctattagtctaatacaattttcttgattgcttcattaaattttttttccccactttstggtttgcagaaataaggatctctaaaggcttttatattacattctgttgttttgtctctgaggtgtccttttttttcttttgtaaactttttattttgatgtaattgaaaatttagagagcacttatagaaaagttttaaaatagtacaagaaactcca

SEQ ID NO: 551515 - DNA, 538 bp, Homo sapiens
aatccacaaattgatttttgttgttgttttcagaaaataaagctctattttttttccttctggaagacctaatgatctttatttaacaataagaatcccagaatgagacaaaaaaagaaaggaggaggaggaggaggaggcagaggaagagaaggaaggaaaatggaggaaggaaaatggaggtagggacggagggagaatgggccaaagacttttaacttttgattaaaatttcaaattacaggtgaaagaattgcagtcaacccttatctgaataaatacaatgagagttaaacctaggcatgtcataatacaatttctaaatagtaaagttaaagaaaaatttcagaaagacccggagttaaaagacatattatgaacaggagacataggggatatgaattatactgatttatcatcaaaaacaatgayagcacaaaataaatgatatctttatagtgttaaaaaaaatcctgatttctatttccagtgaatgtatccttcaaaaatcaggctaaaggatatatattttcagaag

SEQ ID NO: 551516 - DNA, 1531 bp, Homo sapiens
tgagactatatgaaggaagcatcaccaagactatatggggccagaaaaaggaacaaagacacctcctatgttttaatcttgactgaraaaatgggaacagcacttattaaaactgggaactcagaaaaaggggctggtttggaagaaagaagaaaaacagctgaggtttaccattgtttaaagcaatagcaaaacttttaggtaaataggttcagtaggaagtcagaaaattcagctatggtcaaaattataagttcatgggttacctttttataaagtggttgtccaaaacagattctaaatttaattaagcctttaggagggttttattctaatctactacttaaaattttaaaacatgacttttccccctttttacaaaaattttagcttctactctttcaggtataagaggtatgcctctccaaattaagtttataataagaaacgcaaaagaaccaatccaaattctttgattatgttaaaattatatctaatattacttaatggcacattggttgaagcttggcaaactttttatgagttgttgtactaacattagttttaacatgatttcatccaattgttacattattttgtaaatgccatacaaattttgaacatttttgaattcgaatttttatccaatatattatcattatccttctactaaattaaattgaataaagaaatatactcaattttcataaattgtactttagatgatatactacctcctactttaaggttatttctatgaactgtggtaaagtctgaatttaataaataaaatagtaatgaaataggacaaaaaaaccacttccactaagaattaggatatgcgacttaataaaaaaattatgctatgattattttatattctttaagtatacattatctggtacatagggcaggcagaggcatcatcaatattatgaagtggagacaactggagtagctaggttagaaaccaggttaatcccttaagcaaaaagttactgaagacaatccacaggagatgtccaattgacacttcataaacactatctacaatatatttaacgaatggcccaagacatttttatagatttaaggccccaaataaagaaatgcggagtatcacatcttacattgtctgccctaaagtttcaattagtttcttttcaccagcaatatcagtaatgaggtactcaaatgttttaaacagccttttaaaaactgatacagctaatttatttcaatataactttctaaataggcatttctaacttaattagccatttgagaaaactcaaaagtgtttactttttccacaacagatccaccaagtgttttcaacatgcctgaagcagacttaaaaagaattttttgggtattatcccttcctattattacattactttttctaaccacaccagattgtagaaaaaagttttggaaaaactactttgtgataacctttttcatgtctgcaatatggatatccgcatttacatatatcctggtttggatggtcacaataactggtatg

SEQ ID NO: 551517 - DNA, 567 bp, Homo sapiens
  misc_feature 421, 423: n = A,T,C or G
taaatcggtcatcaaacatttgtaggaagtctacaatggcagtgctctaaatacataaataaaactaactgatcttatgcaggaayaataggaggtgatagctaaattaatataattaccacaagatagggacatttgaagtattatgggatacacagaaggagtttatttatatcatctgaaaataagaaagagaaaagaaaatattatgatgtaaattcagctggcctcctttttaactcttaagctgaaaataggacatgagaaaatgagaatttggatatgaaatggaacacaggaattattttagttatttggacattgcctggtgaagacagggcttggtaaaggtgctagttatgtctacttttatatatatatatatatatatatatatatatatatatatatatatatatananttttttttttttttttttttttttttttctcatggttagattcagctccgtgaaggtaaaagtacatcttattcatgtttaaatccctgtcatctagcaaggaatagactcaaatgtgtccagaattgactgtgacctctcctt

SEQ ID NO: 551518 - DNA, 585 bp, Homo sapiens
agcatggtattggtaagggaggttatatctagagcagggtttcaatagtttggcatgatcggcatttggggtcagataattctgtgatgcggtgtgggctatcttgtgcactgtaggatgttgagcagactaaatcctcactagaagccagtaggaccaccccctccaagtcataacaaggaaaaatgtctccagacacagcagaatctctcctgcagagcaaaatcaccatgttaagaaccacggatctagacagttagctgaaacttctttatttaccctgaatagacttgacccaaagatgattaaaataaattgaaatatttttggccacataagtcagaaatgcacagatttttatatagacagatgatatcatcccgtgtgcctaatattctttttggattatatcttatgtcacagcagaaggcacaatcattttgtcaactgtatcagaatrtaataacatttatcaccaaatcaatgaactctatagagagagcagatctgaaatgacttaatgtgacttatttttaaaaacaaagatactacagtgatagtgatgcaacctgacttctatttctc

SEQ ID NO: 551519 - DNA, 531 bp, Homo sapiens
tggctcaggcctgtaatcccagcactttgggaggctgaggctggagaattgcttgagcccaggagtttgagaccagcctgggcaacatagtgagacccagtttcaaattaaaaaaaaaaattatctcatcctcagaacatggtgtttgcacagcctcctgcttctatgccgtggatgcgaagtctacccatgtcttttattgactgctagaattcttctgaaagtatcttgtttcctgccttactgggtgctagcactctgcttcctcagctctgtaaattatttttcatctrttgtaactgctgtaatgagttacattacagctcttgccgggtgcctggatgaagcccattcatcaagacagaggaattgcaaaaaagagtttaatacacattgagccaggtaagtgggagaccagagtttttttgtttgtttgtttgtttgagacggagtcttgctctgtcgcccaggctggagtgcagtggcgcgatctcggctcaatgaaacctctgcctcccaggttcaaacgat

SEQ ID NO: 551520 - DNA, 558 bp, Homo sapiens
accacacagacaagtcccaagttaggcacttctgtgtgtcttgggggctgttgatcagaaataacctatgtggatcacccagcaaaatgaccagtatgaaaagatgttcagtggtagaaaatgaaataagcattgtgactacaactcactcaataagcattcattgaacactggtcactggtaaactgctatgaagaaatctcagctgggtgcggtggctcacgcttgtaatcccagcactttaaagggagaccaaggtgggcagatggatcactttaggtcaagcrttcgagaacagcctggccaacatggtgaaaccccatctctactaaaaacacaaaattagccgggcatggtggcaggtgcctgtaatcccagctacttgggaggctgaggcaggagaatcgtttgaacccgggaggtggagattgtagtgagctgagatcacaacactgcactccaacctgggaaacagagcaagactccatctcaaaaagaaaaaaaatctcaagcttattggatagataaatgcacaggtagatagatggatattgaatg

SEQ ID NO: 551521 - DNA, 812 bp, Homo sapiens
agccaccgcgcctggcctgaggttggaatctttatagacaatgataaatacttggctggttggtcaggggcctggaaggagaaagatgagaagattgaggataaggaaatcagaggaagaggggccacagagagagaggatgcccaatgcagatggggtgtcaccctccaggatgctgggtatactctaaatcaacaaccattaaatggcaatgcagaagtgtaaaggtctggcctgctcatcccaattcaggagagctctgcagggtcacccagccccaaagttccctgtgggactcactgaagctttttgggctgtatcatggtccttctgcaactgcccagttctgagtccttcatacccccacaagtgtgatactgagagcactccctagtaaactacctgcatgcaaaccattagatagattgaagggttctggggaccragaggtggaagtaggagtgaccctgctttctgtcactcccagtgactgacttggagaatttgtggtttttggcttcacaactctggcttttgtggttcagaggtcctggttcccagaatggaaatgcatccaccacaggacatagcaagtagcccactaaacctcagactatggcttccacctggttgtggcaagcttcttatgccaggcaaagagaggagtcaccattctagctggaataactgaccctgatcatcagaaggaaggagagctggaaaaagtgagtggcaccaggtgatctgcttggatgcctcctgactctcttgccccactttgatgagaaatgaacaagagcagcatccatggc

SEQ ID NO: 551522 - DNA, 408 bp, Homo sapiens
gcaatataaaataccttaaacaaaaggcaaaattagttgaaaggttcctaatactctgtaaagagcaagggtgtatatctgcatttggcctcattcccctagaccaaatctctttttcagtctgtgacaaagcctgtcccaagcttcagagcttcyaacctcaccgtcacaggctgagaagcaggcaacgggctgagcagtgtattcactggcgtgcttctatttctattaaaaggcggttagtgtgcatgtggtgttgaggggagaatgtatctttgtgtgaatatgcttaaaaggcctaactggtattactggatgccccagggaggagatacacagcagtgatcttttcccccctattggatctccggaggtgggaatcgttatcttcctcattctgtggccaga

SEQ ID NO: 551523 - DNA, 819 bp, Homo sapiens
tttattgcagcactattcacgatagccaagacatggaagcaactgaagtgctcatcaacagatgaataaagagaaagtagtacacacacacgatggaatattattcagccattaaaaaaaaaagccaggagcgatrgctcacacttgggaggcagaggcaggataatctcttggcgcaagagttcaagaccagcctggacaacatagggagaccccatctctactatattaaaaaaaaaaaaaaaaagccaggcatgatggtgtgtgcctgtagtaccagctactctggaggctgaggggaggattgcttaaacctgggagttcaaggctgcaatgagccgtgattgcaccactgcactccagcctaggcagcagatcgagaaaaaaaaaaagaaagaaagaaagaaagaaagaaaagatcctgtcacttgcagcaacatggatggaactggaggttgttctgtaaagtgaaataagctaggcacagaaagacacatatcacacattctcactcatacatgggagctaaaaacgcggctctcatggagagagagtagaatgttggttaccagaggctggaaggggagcagggagggaggaataaaggggaaaaaaagaatataaatgtatttataaccactgaactgcatacttaaatatggtaaagaggtactgaccatttttgatatgggttaataaaaaggaataagagcaaaaaatttaaaaaatgataaagagagcaaattacataggtatattttacctcaataaaaagaaaaaagaaaaaaaacttgaaaaattggcttcaaatcaggatcc

SEQ ID NO: 551524 - DNA, 2572 bp, Homo sapiens
tgccagccttatatagggagaaccgggtgtccaatcctgcaaacacaacgctgtctgtccccagcatacccaaattttggatggtggctaagattgggaggaagtggttatttcatgctgcactttactgtaatcgttttactaacaaattaattggaataaaaatatatttagctgttagcaattattttttaatgcccgccccaaggggataggttaaaaatttgggggtgattttctggattttagaaattctttgaaagggggtgggggaggggagaccctctttcatatactctccagctgtctacgtaatgcaaaatgatacatgtccccacgaaggagggagagagccatacatctttccgaagtccccagctctgtctgatggtatttggaagacaggattgcaaaaattcccaagtattttctcaatggcatggttctttctgggacctgcctaggatgaacttaaattaattaggaattaataggcatccctgtataatctattatccctgatgcttctcttccagagataagtatggtgtagcctagttaatttccttaaaggtaaggaggtaggaaaagtacttgtcctgggtatactgatagcggcaagcatgtagcagtggggaaagtgaatgatttccacccgctcttaggataagtgcctgcatctcacttctaacacttcagagttggatcctaaaaaaagggatttttctaaactatctaataaataattgtttcaactcaccttttttctcttcggccatttccagtgtcccggaaaccttttgcaaaagggttgttgtctatttttaactgggttatctattggaagagacacaagcaagacagagacattgttctcattttctagaatgttttgagggtgtttttcccaactcaacaagtctagagatgtgactgccaacagaagtcatatagatatgccagggaaaggagataataaggaaactgtggcagggcttgtatctcctatatgaggccaaaccagggatttggggatgaaattattcaaagaaattcttttctttgggcagccaacagtttgggtttagacatggaagtgttgtcaaagtcatcaagagggaaaacctgtagatcttaaaattatgctttcattttgatttttatacagtgcaattaatcataaattatagcatactcccttcacacacacacacacacacacacacacacacacacactccttttccatgaatccaataaatgatttatggggtttcactacccttgtgcgggagtgagtgcgggagtgagtttaattttttttttctttgcctggggggtggtttgaggaaattacaatattgacagttacagtactgaatgaccactggaaacatctgttttcatttatatgctctgccatggccattaggtggagaaggcccatggcctttttgtctgatcaaaaatgctacattttattattacattaacaacttcatttcacaggattctgggtctagagggcacatgcattttgcactttgagaaaaatgctatagtgtgtaatctttcaaatcccttccccttggtgggaagaagaagttatatacacagagttactcagaggtggaaagggggacccttggttggattcatgttcttggaataaattgctctattgaagacttcaggtttcacagggagagaagatcatgttttggtatacacactaaagaaatttagctggaacatccccatcatgaagtccacagaggacccaaggacagtgacaatgacagtgagttcaaaatgaagtgtgttgtcaggtaaaatggactctctttgaagtccaggattgcagagcaggggtcttcagtccctcctcccaccccataactgctaacagccaatctgggaactggtgaatcagcagtaagggtcactttttctgtgcccatgaccttcaggccaccatagctctagatatcaggtgctttcccttttggggatccttctaacctccagattcaggcctgggggagggggggaattcaaatgaagtggtgactttggccaccccaactcaaaagcctcagacaactcgattaatatgaccctgtgatcagggtaggtttttccaaccacacgcatgcatgcacacacatgcacacacacacacacatcataacacagcagcataaaaggtaataaaaaccagaccagctactcaggatttctggctaggggagaaaagctggtctctactaggattctcctcccaggatcccaaatggcttttgccttaaatttttagctggttccttttgaatgtgacttcttgatccttcttccccaaggggaagaagatgaaccttaaaacagacaggacaaagcccaagaggkggggaggagtgggtggcatcaatgacagcagttctaggagtttctctgtggcaaaattagtatggcgtttttttgctcagcattgttcctacctagtcaaggtgtttttctgtctcctcgaggtgtcattgtcctttccccccaaatgctccacaaatcacaaaag

SEQ ID NO: 551525 - DNA, 1153 bp, Homo sapiens
tgaactcagtagagcttttccttcctggtacctgacttgagactataagcaccctggctactcgattctcaccttcctcaaaattaattttgtttctactgtggctagaagatgaacatatttttaaaaactcaagttagtgattcatgctaaagaaaacaagccagttttcaaaaataatagtttcgtcatgagtcacagtgacatcagatggcataaatgctttgtcaagtggatcttactcaagagattccagcatcccctaaatgactcattgctcttgtgctgataaaacacagcccagcatatttctttccccacgttttttgagtttctcctgttgacttatacaaactgtctgaagtttttcttattttttatggttagtcattgattatgttattcatggatcgagaactgataaacatcttaatttcagaaaacactttcttkctccctatgccatccttttatatatttttttgagttggaatgttgtattttattgttgcagggtaaagaagcataaattctgtatgtatacattccaaaaatatttcaacttttaaaaattgtggatatcttttaaatataagtttataagttatttattctccaaacgtatcttttattacaatattaaatttattatcttctcatttaataaataaatgaaatgggaaactgccacaaatttagaatctaaagggtttattgtatatgcaggtacttatctaacataagaaatcatcaccagcacatggcaatatatcaaaattgaaatcctctccatttaaaattgtagtctgctcccagggcaggacagattttgtgggcatatgatctgtgcagttaaacagtccccacagttaaaaggtcatcatggtttatggctctgctgttgctgttttgaaattcttaataattgttaacaaggggtttcacattttcattttgcactgggtcattcaaattgtgtgtctggctctgatacaaaacaacacaaatatgagacatattaaattcttcgtttttgtgtaatttaatatattagcaatttaatttaaaaatatcagcttaataactaaatttgtgagatgaaagtctatcttgttttcatatttttttcttccatttatcctttattccaaat

SEQ ID NO: 551526 - DNA, 600 bp, Homo sapiens
tcaatgtagcagacagaaattggactcattaaaacaaaattctatgaggaatactgctcatccagtttattggtgaaaactccagacagcagaggtttgagtgtaattcaggagactttcgcccagttaacatatttaatgcataataatctttggagaattttgctaattcagaattttatgaagactacrggattagttacataagagtgaattcacattgaataacatgaacaagttttaaaaagttaatttaggcataatctatgcagcaaaacacaaaagatagttccattattcattcctagtttcttccttgcaaggaattgctgaaagccctgacctagaaacaactgagagatctttcttcacaccatttctggacctctctctttttggagttgcctggattttattgatgcttttcctaatgtttcctggcaatctgtctgtctcatgccacactgtcctgggaattgttatttttgtgtcagagtcctttattagtacttccagttttttcattctgcatctggaaatgttcacagtttatgctctgagttgtactgattttctcttaaatatatctcaaaggagtgc

SEQ ID NO: 551527 - DNA, 600 bp, Homo sapiens
tcaatgtagcagacagaaattggactcattaaaacaaaattctatgaggaatactgctcatccagtttattggtgaaaactccagacagcagaggtttgagtgtaattcaggagactttcgcccagttaacatatttaatgcataataatctttggagaattttgctaattcagaattttatgaagactacaggattagttacataagagtraattcacattgaataacatgaacaagttttaaaaagttaatttaggcataatctatgcagcaaaacacaaaagatagttccattattcattcctagtttcttccttgcaaggaattgctgaaagccctgacctagaaacaactgagagatctttcttcacaccatttctggacctctctctttttggagttgcctggattttattgatgcttttcctaatgtttcctggcaatctgtctgtctcatgccacactgtcctgggaattgttatttttgtgtcagagtcctttattagtacttccagttttttcattctgcatctggaaatgttcacagtttatgctctgagttgtactgattttctcttaaatatatctcaaaggagtgc

SEQ ID NO: 551528 - DNA, 1467 bp, Homo sapiens
caccaagccaggattcagccctcagcaggacagagagagtaccctggtcgtggagctagaaggcttccaggaggtgtgttcaaaatgagatttaagcaagagaagaatttttactacacacagaagcggaaggccaggggaaaggtgggcaaagaaattaggctatgagaagaccggggttggggtggtttaaaacatccccatgtgatatgggttggctgtgtccccacccaaatctcatcttgaattgtagttctcacaatccccactttatgggagggacccagtgggaggcaatggaatcatgggggtgcttaccctcatgctgttttcatgatggtgagtgagttctcacgagatatgatggtttcataaagggctttccccccttttgcttggcacttctccttgtggctgccgtgtgaagaaggacttgtttgcttcccttccaccatgattgtaagtttcctgaggcctccccagccctgtggaacggtgagtcaactaaacttctttcctttataaattacccagtctcaggtatgtctttattagcagggaacaaactaatataccatgcattcaggaagcgcgaatgccagagagctggatggttgttgagaaaggtatgctggctggcaggggcagcgggaaagggatggtgcagtgagggaggggcaggagagatgctggagccagaataggaagggatatttgcactgagctcttcagaatgttgacttctatcctgcatgctagaaggaacaactcaaagattttcaggagccattgttttttaggattacatttgagaagcacctctctggcagcaggatggaggactacctgcaattagtgtgaccaactctctagcttacccaggactgtcttggttttagccctgaaagttctgtatcctggcaaacccatcagtcccagggaaactttgatarttgctcacaactgcctggagtagggtgggcccaatgccaagaggactactttggagattgtctcagtgatctcccctgaactccagactgtatgtcaacaattacccacatgacagctccattatgatgtctaattgatatctcaaagtcaatgtgtttaaaacctcaggacctttgcacattctgttctctctgctggaaatggtgttccccaggatagctacgtggtacaccccttcacctccttcatgtctttacttcaatcctacctccttggtgagggcttttttgaaaccctctttataatcacaacccctacccgtgatgcttcctaatcttatccttgctttggtttttttcttagcgcttaccaccacccagcatacttaaaatttgttatttctgtgtgttctcttttccccactagagagaaagttcgtgagggcaggatttttgtttgtttcattcactgcgtctgggacagtgcctggcatttggtacacatcattttatt

SEQ ID NO: 551529 - DNA, 1467 bp, Homo sapiens
caccaagccaggattcagccctcagcaggacagagagagtaccctggtcgtggagctagaaggcttccaggaggtgtgttcaaaatgagatttaagcaagagaagaatttttactacacacagaagcggaaggccaggggaaaggtgggcaaagaaattaggctatgagaagaccggggttggggtggtttaaaacatccccatgtgatatgggttggctgtgtccccacccaaatctcatcttgaattgtagttctcacaatccccactttatgggagggacccagtgggaggcaatggaatcatgggggtgcttaccctcatgctgttttcatgatggtgagtgagttctcacgagatatgatggtttcataaagggctttccccccttttgcttggcacttctccttgtggctgccgtgtgaagaaggacttgtttgcttcccttccaccatgattgtaagtttcctgaggcctccccagccctgtggaacggtgagtcaactaaacttctttcctttataaattacccagtctcaggtatgtctttattagcagggaacaaactaatataccatgcattcaggaagcgcgaatgccagagagctggatggttgttgagaaaggtatgctggctggcaggggcagcgggaaagggatggtgcagtgagggaggggcaggagagatgctggagccagaataggaagggatatttgcactgagctcttcagaatgttgacttctatcctgcatgctagaaggaacaactcaaagattttcaggagccattgttttttaggattacatttgagaagcacctctctggcagcaggatggaggactacctgcaattagtgtgaccaactctctagcttacccaggactgtcttggttttagccctgaaagttctgtatcctggcaaacccatcagtcccagggaaactttgataattgctcacaactrcctggagtagggtgggcccaatgccaagaggactactttggagattgtctcagtgatctcccctgaactccagactgtatgtcaacaattacccacatgacagctccattatgatgtctaattgatatctcaaagtcaatgtgtttaaaacctcaggacctttgcacattctgttctctctgctggaaatggtgttccccaggatagctacgtggtacaccccttcacctccttcatgtctttacttcaatcctacctccttggtgagggcttttttgaaaccctctttataatcacaacccctacccgtgatgcttcctaatcttatccttgctttggtttttttcttagcgcttaccaccacccagcatacttaaaatttgttatttctgtgtgttctcttttccccactagagagaaagttcgtgagggcaggatttttgtttgtttcattcactgcgtctgggacagtgcctggcatttggtacacatcattttatt

SEQ ID NO: 551530 - DNA, 515 bp, Homo sapiens
agaggttgttagatgtgcagaatattgggtcccatctcaagcctacagaattagaagctgcattttcacaagatgaccaggtgacttcagttgcacattaaagtttgaaaagcactgagataaaagattttaaaaacatattcttaaaagcactgaaaaattgacaagatattaaggacttaccaggccaaaactgaaagggaaaactggaattcagagagacaagtgagcaaggaagccgcttctgccatttgcaaatgctaacaatttctttctttttttttttttttaatagatggagtcttgcccygtcacccaggatggagtgcggtggcatgatctcggctcactgcaacctccgcctcccgggttcaagtgattcttctgcctcagcctcccgagtagctgggactacaggcgtgcgccaccatgcccagctaatttttgtatttttagtagagacggggttttaccatgttagccaggctggtcatgaactcctgacctcaggtaat

SEQ ID NO: 551531 - DNA, 668 bp, Homo sapiens
tgcgaaggaaacactctgggtagaaagtttagaattaaggctcgggttgaggtagctctttggcatttttctgaataagtgaaacaaattacagactcagttgtagggttttttgtttttgtttttgtttttttgtattggtgtatgggcaatactggtcgtgaatagttttaggaaagtcatggatgaacactacttcagcatgagtctgaaagttgtgtgkgtgtgtgtgtgatgtctgtaagagccaaaagtgctgctgtgtgaaccctgctgtctagtcttaaaaatttgagttgacaaagaaaaaggagacattgatccatctttaatttgaaagatgtttgcgtgtatcacataatgttaacacttaaaacagttggcaaacttgaatatgaatcccgtgccaagaacttacacattttctgcttttcacttaagaatacaaccccacaccacctcattgtataatatcagttttgccaattaggtccctattgatgccatacgtctccctcactgccatccagctattcatttcagggcatgttttttgaaaagtgctagtgacctttgtccatttttattgtcattgcaatgataatgccagccttgcaaaattttctggcaggagaacgtcaaacaatgtgaggagaaagaagcgaaat

SEQ ID NO: 551532 - DNA, 551 bp, Homo sapiens
gaaacttctttctccatggacttgaatgtgattgggacagattagggcctgggagaatgccttggtgatgaacgaatttgaccattattaagtgcatttggagaatccatctctgaaaaagcaatttgcagccccagattccccagattctgatagttatattgaagccaaagtataactcttgttcttatatctctcaactctggtatttcctgttgctttaagaccgctatattttggattgtgattaccattgccatccaaatgaatcaggaccaggaaattatcacttcrtagtagaacagttcaccacagaatgcatacatgataccccacctctcatctgtggacaggttttcttgcccagatttctgtggtgagtgagtttgaagtctgttggccagctgcagaatggagaatactcattactcagccctatagaaataaacatctggtgataccttgtttatccaagcatagcatgctttcaactgctttataactagagattttatatatgtgcatgtatagacttattctgtatctataca

SEQ ID NO: 551533 - DNA, 635 bp, Homo sapiens
gagttgtccataggtacgacatatatagaaaataaacatgcagcccagtattagtccagtatttttcaaaagcatccctcctccacatacaaatattccactttaaattaatcagagaaattagtttgatgacacatcattcacaaatcactttcccttattccaaaaccctgaaacaaacatatcataaatctacaaaggatttaaactccatcactgcatataatcattttaaatatcccccaaactattcaactatattatctaaaaacataatatgggcaatacattatccagtaatatatttactatattttgtatattatactaaaaaatatggcagtattttactctttttttgtccatctttatactgatcactcctctgaaaggaaatttagagtggaaaatatgtacatttataaaacatctttatttaaggaattcaaagcacctaacaaatatcccagtcattctttgtcacattcctgackggtcaaaataaatctaattaggagatgtcttactcttctccctccccctccaaatcaaagaagccttaggaagccactgagatgaacaacctagctgctgaagatcgctcaggaggcacttccgggttgggggtgggggtt

SEQ ID NO: 551534 - DNA, 547 bp, Homo sapiens
ggattggatttatatattacttttaggattggaatttagggtcataaaataatttggtttagaaaatgattaacagtatagaaaattaagttgggggcttagaaatgcttctccatttctacctgaataatgcagtcatcagcttgacaatgaaacatgctcagtggccattcttcacacagtgcatgtggtattttgggtccaagtcatcagtagctgagcagataatttttaaggacaaagtgtcattcttcaattttgggttaatttgtacatgccaggtttgattttgaatgcatggacttggtgaaaatgtaggtacatgtggcttaagctgtcacttgcagtaacactttctcatgtatatgttcctgaagtctcacatctataaactgcaaatgtggaacaaytgctctggcagtaattgctaaagcacacaggaaagtttctccttcagatattctcatttctctggtttccaggcagtctctcatccaccgcaccaccccaccccaccacattcattctcattctgcctcagatcgtt

SEQ ID NO: 551535 - DNA, 561 bp, Homo sapiens
cgtagtggctgtgaaatgctgtaaggaccctctgcaagtggccactgctctcttacctatgaccaaagacaaaggcagaagcgtgctttgctattctcatttaatactggggataaccaactgctcagctgccctggcctcatgacaatgctcaatccgtagttaatccttgctcttcttaatccctcatccaaaacagcatccaatccagactgatgcctgcttcccttcaaccctccttagaatccttgagcaggaacccaaatcttgcaagacagctgccctccttccggagatcctctggagtgctccaccttactgctcggaggaaagaaatctgaattcctcagactgtaggctcatttctggtggtctctggctgatcaggttttaaagaaactgtcagggactggaatagaggactgtaattggcagtcccaccagaaccatgggagaggsgtaggcaattccccaaaggaaaatggagtgctgtcatcagaaaaaggtgaaggtattgagcatccagacccaatggatggctcttggagtaggtgctcaatt

SEQ ID NO: 551536 - DNA, 534 bp, Homo sapiens
ggaagccagatggatttttcactgggaatgggagaaacacagactcttggttccgcctcacagctactctggtttttcctttactatgaatcgtgcttctgatggaaatttgaaattctagcctagccaggtggcctagtgtggaaggcatcggwtagatcacatgaccactctgagtgtcagttttctttttcttaaaatggcaataataacttgcagaagccacgtgatgagtaagtaaaatcacttccgaaaacaccgaacacaatggctggctcatactaggtgctccttaaggagtcactccttctctttttctcttctgggtcttcagaatgtctgaatgaagtccatcttggatcctggacacaaaagatctatgtgattcctttgtgttggactgctaatattagcatgccatgtctttaaaatgcctgaaactcctcgtgcctgtgagcgggtgctggttgtatctcacctgccttttgttcctgggaagaaagccctgtgtccagggaccaggggttgccatta

SEQ ID NO: 551537 - DNA, 597 bp, Homo sapiens
tccgcctaaaaaaaaaaaaaaaaaggggtgggctggaaagggtgaaaaggctaaaggaggtaagggaacaagctatgaggccatctggaagagggaacagacagcaaaaatgccccaaggtgggaccatgcctagcttgtggtagaaacagtgaggaagccrgtgtctacgcaattgagttagtgaagaggagagtaagagagaaggccagagaggtaaggggaggacactttttagagggctttataagactttggcttttattctgtgagggctgtgagcagggagaaacgtgaattgactgtgctgaactgctgcattaacagtagagtatggccaagcattgggtggctcacacctgtaatcccagcactcggggaagccaaggcgggaggatcgcttgagcccaggagactgaagctgcaatgagccatgatcacaccactgcactccagcttgggcaacagagcaagattctgtttcaaaaacaaggccaacaacaacaaacagtagaatatatgaaggcaggtttaggagcagggagatcaacaaactggctactgtgattatccaggtaagagatgaggatgctcagga

SEQ ID NO: 551538 - DNA, 597 bp, Homo sapiens
tccgcctaaaaaaaaaaaaaaaaaggggtgggctggaaagggtgaaaaggctaaaggaggtaagggaacaagctatgaggccatctggaagagggaacagacagcaaaaatgccccaaggtgggaccatgcctagcttgtggtagaaacagtgaggaagccagtgtctacgcaattgagttagtgaagaggagagtaagagagaaggccagagaggtaaggggaggacactttttagagggctttataagactttggcttttattctgtgagggctgtgagcagggagaaacrtgaattgactgtgctgaactgctgcattaacagtagagtatggccaagcattgggtggctcacacctgtaatcccagcactcggggaagccaaggcgggaggatcgcttgagcccaggagactgaagctgcaatgagccatgatcacaccactgcactccagcttgggcaacagagcaagattctgtttcaaaaacaaggccaacaacaacaaacagtagaatatatgaaggcaggtttaggagcagggagatcaacaaactggctactgtgattatccaggtaagagatgaggatgctcagga

SEQ ID NO: 551539 - DNA, 613 bp, Homo sapiens
caagaggacagcttcagttccctatgatttcatctcctacctaaccaatcagcactcctggctcactggcttcccgcaactcactaagttgtccttaaaaactctgatacctgaatgctcagggcgactgatttgagtaataataaaactctggtgtyctgcacagccagctctgtgtgaattactctttctctactgcaattcccctgtcttgataaattcgctctgtctaggcagcgggaaaggtgaacccattgggccgttccagggtctcccagtacacagcttcatcacaacataaatgaatgcggcttgagtaggggcttgtatgtagaattcgaacccacaaagttgaaaatctttccttttcaataggctctgcaatttgcctgatagcagattacaaggaccactaagaacactacttccaacccaacattataagctacttaacagactaaatatgttatgaacataataaatttaaaataaacatatgagaatctgtatgacaaatgcataacattcctttgaaagttttttattttgtgatttggggtgggtgggtgttcacttacaccactgatgttggaaatgtgagaacgttttgaaa

SEQ ID NO: 551540 - DNA, 632 bp, Homo sapiens
tgcacgaaaaaaatgtaagcgtagggctttacatttatttcagttaaaatttttattaagtttggcttatcgttagagcctttggatcttcactctgccatattaaatatattggctacctttcccagcagtcagagaagtgcattagcaagccaactgtacactcaactatttactcaatgaacaggacaagtctgcaaacagaattcctttacactagaaactctgggctgacattgattcataattagcacctatctttgtgatcatctgggccacattcttctgtcttgttcacaaggtaaaagtctctgtcaaatgctgagttcaaatggtgaagctgcgtattgacagctycttctgatttgtcagtctggcagagtttggataaaaacagaagtcctgttaattcattagtcatgactttccctatctgaatcttatgcacaattaaatactcccctttcttctctccatgttcaaggtggtgttagacaacctgcctgagaattgcactattgattcctgccccagtttctagaattctttgtgataacgaacagcagctcattttgtcaccaatctcttctaggtataggctaggatgtagtttgttggggccaggaggtttg

SEQ ID NO: 551541 - DNA, 632 bp, Homo sapiens
tgcacgaaaaaaatgtaagcgtagggctttacatttatttcagttaaaatttttattaagtttggcttatcgttagagcctttggatcttcactctgccatattaaatatattggctacctttcccagcagtcagagaagtgcattagcaagccaactgtacactcaactatttactcaatgaacaggacaagtctgcaaacagaattcctttacactagaaactctgggctgacattgattcataattagcacctatctttgtgatcatctgggccacattcttctgtcttgttcacaaggtaaaagtctctgtcaaatgctgagttcaaatggtgaagctgcgtattgacagcttcttctgatttgtcagtctggcagagtttggataaaaacagaagtcctgttaattcattagtcatgactttccctatctgaatcttatgcacaattaaatrctcccctttcttctctccatgttcaaggtggtgttagacaacctgcctgagaattgcactattgattcctgccccagtttctagaattctttgtgataacgaacagcagctcattttgtcaccaatctcttctaggtataggctaggatgtagtttgttggggccaggaggtttg

SEQ ID NO: 551542 - DNA, 609 bp, Homo sapiens
gcaggagaatcacttgaacccgggaggtggaggttacagtaagctgagatcgcaccactgcactccagcctgggcgacagagagactccatctcaaaaataaaaaaaaaaaaaaggaactcccaggagatccataggcacagggaaactctagccgaatgccacactcaatggttggtgctgaaaggtcagaggacaatcctgagatcacacaggtgtgagaggtaaagctgtggggaggagccacatttctggtctcagttcactgtgcttttttctgtgcctctataactttaggaatgcccactgtgttcatcatgagaggcaaattttatattataaaaccctaaaaattgaaagaaaccactgctgaagttaacaatcatcgtttttgaacttacttgttatagagcagcagtccgcaatctttttrgcaccagggaccagtttcctggaagacaatttttccatggacatggaccgtggggagggggagtatggttttaggatgaaactgttccacctcagatcatcaggcattagattctcataaggaacacacaacataaatccctcaaatgtgcagttcacaatagggttcatgctccta

SEQ ID NO: 551543 - DNA, 681 bp, Homo sapiens
tcaatagagaaaaatctatgaaaatttgtacttgtgccaatagcaaaataacaatagtctgaacacagacaacaaatgaaataaacgcgttgttttatgtccactgaagccaggaagaaaaatacagtcccataccacataatgacatttcagtcaacaaaatggtatatgggaccacatatacaatggttgtcccacatattataatgtattttgctgtaacttttctgtttaaatatataaataccattgtgttataattgccttcagtatattcagtatagtaacatcactgtatgggttggtagcttaggaggaataggccataccacataggcaaactgtatacagtacattataccatctaggtttstaacagtatactctataatgctcacacaaagacaaaattgcctgatgacacatatctcagaaatgcattcctattgttatgcaatgcagaccacaaaaaagaaaagggagccttatactcctaaaggtattggtctacttatttactttagaaacaagtagaacattagtttccacaaaaatgctcaaaataattaaaagtatttcaaatttaaggaaacaagaggtcctctgaagcttcatttacaaatgtatctgcattccaaatactccacaacaattaaaacttcatagagataccgtatctcc

SEQ ID NO: 551544 - DNA, 681 bp, Homo sapiens
tcaatagagaaaaatctatgaaaatttgtacttgtgccaatagcaaaataacaatagtctgaacacagacaacaaatgaaataaacgcgttgttttatgtccactgaagccaggaagaaaaatacagtcccataccacataatgacatttcagtcaacaaaatggtatatgggaccacatatacaatggttgtcccacatattataatgtattttgctgtaacttttctgtttaaatatataaataccattgtgttataattgccttcagtatattcagtatagtaacatcactgtatgggttggtagcttaggaggaataggccataccacataggcaaactgtatacagtacattataccatctaggtttctwacagtatactctataatgctcacacaaagacaaaattgcctgatgacacatatctcagaaatgcattcctattgttatgcaatgcagaccacaaaaaagaaaagggagccttatactcctaaaggtattggtctacttatttactttagaaacaagtagaacattagtttccacaaaaatgctcaaaataattaaaagtatttcaaatttaaggaaacaagaggtcctctgaagcttcatttacaaatgtatctgcattccaaatactccacaacaattaaaacttcatagagataccgtatctcc

SEQ ID NO: 551545 - DNA, 965 bp, Homo sapiens
cttaaccctgaattagtggtaattccagcagtttagtggcataaaatactgatacccccacctgaaaatctcattgccatcaccaatttttgattcagtagtaccaggtagtaaaatttaaaaacctacaaggagggtcaggtgcggtggctcattcctgtaatcccagcactttgggaggtttaggcatgtggattgcctaaggtcaggagttcgagactagcttgaccaacatggagaaactctgtctctactaaaaatacaaaattagccgggcatgatggtgcatgyccataattccagctactctggagggtgaggcagtagaatctcttgaacccaggaggcagaggttgcagtgagctgagatcacgccattaaactcctgcctgggcaacaagagtgaaattccatctcaaaaaaaaaacaaaaaacaaaaagaaacctacaagttgaaagtattttctatatatttagaagtttctgttataacttagtattttggtaataatttactagtgttgcaggaagtcagggaccccgaatggagggactggctgaagccatggcagaagaacataaattgtgaagatttcatggacattttttagttccccaaattaatacttttataatttcttatgcctgtctttactgcaatctctgaacataaattgtgaagatttcacggacacttatcacttccccagtcaatacccttgtgatttcctatgcctgtctttaatctcttaatcccatcatcttcataaactgaggaggatgtatgtcacctcaggaccctgtgttgattgcgttaactgcacaaattgtttgtggagcatgtgtgtttgaacaatatgaaatctgggcactttggaaaaaagaacaggataacagcaatgttcagggaacaagagagataaccttaaactctgaccgccagtgagccgggtggaacagagcca

SEQ ID NO: 551546 - DNA, 965 bp, Homo sapiens
cttaaccctgaattagtggtaattccagcagtttagtggcataaaatactgatacccccacctgaaaatctcattgccatcaccaatttttgattcagtagtaccaggtagtaaaatttaaaaacctacaaggagggtcaggtgcggtggctcattcctgtaatcccagcactttgggaggtttaggcatgtggattgcctaaggtcaggagttcgagactagcttgaccaacatggagaaactctgtctctactaaaaatacaaaattagccgggcatgatggtgcatgtccataattccagctactctggagggtgaggcagtagaatctcttgaacccaggaggcagaggttgcagtgagctgagatcacgccattaaactcctgcctgggcaacaagagtgaaattccatctcaaaaaaaaaamaaaaaacaaaaagaaacctacaagttgaaagtattttctatatatttagaagtttctgttataacttagtattttggtaataatttactagtgttgcaggaagtcagggaccccgaatggagggactggctgaagccatggcagaagaacataaattgtgaagatttcatggacattttttagttccccaaattaatacttttataatttcttatgcctgtctttactgcaatctctgaacataaattgtgaagatttcacggacacttatcacttccccagtcaatacccttgtgatttcctatgcctgtctttaatctcttaatcccatcatcttcataaactgaggaggatgtatgtcacctcaggaccctgtgttgattgcgttaactgcacaaattgtttgtggagcatgtgtgtttgaacaatatgaaatctgggcactttggaaaaaagaacaggataacagcaatgttcagggaacaagagagataaccttaaactctgaccgccagtgagccgggtggaacagagcca

SEQ ID NO: 551547 - DNA, 965 bp, Homo sapiens
cttaaccctgaattagtggtaattccagcagtttagtggcataaaatactgatacccccacctgaaaatctcattgccatcaccaatttttgattcagtagtaccaggtagtaaaatttaaaaacctacaaggagggtcaggtgcggtggctcattcctgtaatcccagcactttgggaggtttaggcatgtggattgcctaaggtcaggagttcgagactagcttgaccaacatggagaaactctgtctctactaaaaatacaaaattagccgggcatgatggtgcatgtccataattccagctactctggagggtgaggcagtagaatctcttgaacccaggaggcagaggttgcagtgagctgagatcacgccattaaactcctgcctgggcaacaagagtgaaattccatctcaaaaaaaaaacaaaaaacaaaaagaaacctacaagttgaaagtattttctatatatttagaagtttctgttataacttagtattttggtaataatttactagtgttgcaggaagtcagggaccccgaatggagggactggctgaagccatggcagaagaacataaattgtgaagatttcatggacattttttagttccccaaattaatacttttataatttcttatgcctgtctttactgcaatctctgaacataaattgtgaagatttcacggacacttatcayttccccagtcaatacccttgtgatttcctatgcctgtctttaatctcttaatcccatcatcttcataaactgaggaggatgtatgtcacctcaggaccctgtgttgattgcgttaactgcacaaattgtttgtggagcatgtgtgtttgaacaatatgaaatctgggcactttggaaaaaagaacaggataacagcaatgttcagggaacaagagagataaccttaaactctgaccgccagtgagccgggtggaacagagcca

SEQ ID NO: 551548 - DNA, 965 bp, Homo sapiens
cttaaccctgaattagtggtaattccagcagtttagtggcataaaatactgatacccccacctgaaaatctcattgccatcaccaatttttgattcagtagtaccaggtagtaaaatttaaaaacctacaaggagggtcaggtgcggtggctcattcctgtaatcccagcactttgggaggtttaggcatgtggattgcctaaggtcaggagttcgagactagcttgaccaacatggagaaactctgtctctactaaaaatacaaaattagccgggcatgatggtgcatgtccataattccagctactctggagggtgaggcagtagaatctcttgaacccaggaggcagaggttgcagtgagctgagatcacgccattaaactcctgcctgggcaacaagagtgaaattccatctcaaaaaaaaaacaaaaaacaaaaagaaacctacaagttgaaagtattttctatatatttagaagtttctgttataacttagtattttggtaataatttactagtgttgcaggaagtcagggaccccgaatggagggactggctgaagccatggcagaagaacataaattgtgaagatttcatggacattttttagttccccaaattaatacttttataatttcttatgcctgtctttactgcaatctctgaacataaattgtgaagatttcacggacacttatcacttccccagtcaatacccttgtgatttcctatgcctgtctttaatctcttaatcccatcatcttcataaactgaggaggatgtatgtcacctcaggaccctgtgttgattgcgttaactgcacaaattgtttgtggagcatgtgtgtttgaacaatatgaaatctgggcactttgraaaaaagaacaggataacagcaatgttcagggaacaagagagataaccttaaactctgaccgccagtgagccgggtggaacagagcca

SEQ ID NO: 551549 - DNA, 2352 bp, Homo sapiens
aagagtttcagcggtttcacatcttctctaacacttgggagtgtcagcctccctcaactaaaatgtgcrtgcatttatatgaaatgagtgtacaacattattacagtcatgtgtcatttaactgagaaatgtactattaggcaactttgttcttttgtgaacataacagaacatacttacacaaacctagagagtatagccaactatacacctggcctatatggtatagcctgttgatccttggctataaagttgtacactatgttactgaatagggtaggcaactgtaacacactggtaagtatttgtgtattcaaacatatctaaacacatagaaggtacctagaaggtacaaggaaaatataatattataatcttatggaaccattgtcatatatctggtcagttgttgaccaaaacatttttatgcatgcatgcctgtgttacagtacttgtattagtgtgatagaattatagattatttccttgataatgataatgctctaatgttatttcacatgaaaaaataaatattatttttcaataagcaggtaaataatttttttaatctatcgttgtaactttgaattatacaatggtgttaacaacccggagaaaaaggagcataattaatatatccttaaaatagaacaatgcatttcaagatgaatactaaatctagaatattattaacatcatatattcatagatagacaagaatttttctttttctttcattttctagctctttttatcactctactttgacccctctagattgtcaaaaattttctgatattaagtaaattcttatactaatgcagaaaatggtaagttcatataaaatagatctaatattaaagccttactagtataaggcatacaaaagatattacttccaggtctatgagtaattataactattttatggtatattaatttgatgctggcagttaaaagcgataaattaatattttggttcatattgtacttgcaattagtgtgaccatatgatttatttacttatttattttttttttgagacggagtctcgctctgtcacccaagctggagtgcagtggcacgatctcggctcactgcaacctccgcatcccgggttcacaccattctcctgcctcatccttctgagtagctgggactacaggcgcccgccaccacgaccggctaattttttgtatttttagtagaaacggagtttcaccgtgttagccaggatggtctcgatcgcctgacctcgtgatccacccgtctcggcctcccaaagtggtgggattacaagcgtgagccacttcgcccggccatagtgtgatcatatgattttttttaataaaatatttttcattcaaaatgattttgaatattttttcaaaatgtaatatattttgattattaatggtagtaatagtttcagtatactatatttacctttcttggaaattaatcaatacattctctgacaatgactaaaattattcatttttcagtccatctatcaatataatttaagaaagactgaatttggatggtagaaacctataagataaaaataattactttgtcctgataccataatttttcacacatttatcttgtttgctctgcacacacttatgcagttttacatcagtaaaatttatatatacagttatcccttgaaccacatggttttaaatgtgtgagtccattgatacacagatgttcttaaaaaataaaagttacattgagtgtgcctgcttctcctgcctcccctttcacctcctccacctcttctttttttgctgtttctgagacaacaaaactactccccctcttcctcctcctcagcttatgcaacatgaaaatggcaaggatgaagacctttatgatgatccatttccatttaatgaatagtaagtatattttatcttccttacgattttctcagtaacacctttttttctctagcttactttattgtaagaacacagggtataatacataggacatacaaaatatgtattaatcaatcatttatgttattcctaaggcttctggtcaacagtagattattagtagttaagttttgggggagtcaatggtatatgcaaattttcaactgtgcagagggttggtgcctctaaatgctgcatttgttcaaggatcaactgtatatatcgggttctgtaagttctttcgaaaatatcgtcttcctcagaattttaatctgatatgtgatagtttcttttcataatgaaaaatataatttgtgcacttctcttcgattcctttattctgagagcaataaatactattgaatgtgtttatataaggaagcctcaaaagtaggggata

SEQ ID NO: 551550 - DNA, 2352 bp, Homo sapiens
aagagtttcagcggtttcacatcttctctaacacttgggagtgtcagcctccctcaactaaaatgtgcgtgcatttatatgaaatgagtgtacaacattattacagtcatgtgtcatttaactgagaaatgtactattaggcaactttgttcttttgtgaacataacagaacatacttacacaaacctagagagtatagccaactatacacctggcctatatggtatagcctgttgatccttggctataaagttgtacactatgttactgaatagggtaggcaactgtaacacactggtaagtatttgtgtattcaaacatatctaaacacatagaaggyacctagaaggtacaaggaaaatataatattataatcttatggaaccattgtcatatatctggtcagttgttgaccaaaacatttttatgcatgcatgcctgtgttacagtacttgtattagtgtgatagaattatagattatttccttgataatgataatgctctaatgttatttcacatgaaaaaataaatattatttttcaataagcaggtaaataatttttttaatctatcgttgtaactttgaattatacaatggtgttaacaacccggagaaaaaggagcataattaatatatccttaaaatagaacaatgcatttcaagatgaatactaaatctagaatattattaacatcatatattcatagatagacaagaatttttctttttctttcattttctagctctttttatcactctactttgacccctctagattgtcaaaaattttctgatattaagtaaattcttatactaatgcagaaaatggtaagttcatataaaatagatctaatattaaagccttactagtataaggcatacaaaagatattacttccaggtctatgagtaattataactattttatggtatattaatttgatgctggcagttaaaagcgataaattaatattttggttcatattgtacttgcaattagtgtgaccatatgatttatttacttatttattttttttttgagacggagtctcgctctgtcacccaagctggagtgcagtggcacgatctcggctcactgcaacctccgcatcccgggttcacaccattctcctgcctcatccttctgagtagctgggactacaggcgcccgccaccacgaccggctaattttttgtatttttagtagaaacggagtttcaccgtgttagccaggatggtctcgatcgcctgacctcgtgatccacccgtctcggcctcccaaagtggtgggattacaagcgtgagccacttcgcccggccatagtgtgatcatatgattttttttaataaaatatttttcattcaaaatgattttgaatattttttcaaaatgtaatatattttgattattaatggtagtaatagtttcagtatactatatttacctttcttggaaattaatcaatacattctctgacaatgactaaaattattcatttttcagtccatctatcaatataatttaagaaagactgaatttggatggtagaaacctataagataaaaataattactttgtcctgataccataatttttcacacatttatcttgtttgctctgcacacacttatgcagttttacatcagtaaaatttatatatacagttatcccttgaaccacatggttttaaatgtgtgagtccattgatacacagatgttcttaaaaaataaaagttacattgagtgtgcctgcttctcctgcctcccctttcacctcctccacctcttctttttttgctgtttctgagacaacaaaactactccccctcttcctcctcctcagcttatgcaacatgaaaatggcaaggatgaagacctttatgatgatccatttccatttaatgaatagtaagtatattttatcttccttacgattttctcagtaacacctttttttctctagcttactttattgtaagaacacagggtataatacataggacatacaaaatatgtattaatcaatcatttatgttattcctaaggcttctggtcaacagtagattattagtagttaagttttgggggagtcaatggtatatgcaaattttcaactgtgcagagggttggtgcctctaaatgctgcatttgttcaaggatcaactgtatatatcgggttctgtaagttctttcgaaaatatcgtcttcctcagaattttaatctgatatgtgatagtttcttttcataatgaaaaatataatttgtgcacttctcttcgattcctttattctgagagcaataaatactattgaatgtgtttatataaggaagcctcaaaagtaggggata

SEQ ID NO: 551551 - DNA, 566 bp, Homo sapiens
ctggctttagatcaacttataggtcttccacatatattatttttcatgcagcaaggaactggatttgtgatccaaataggtcacaaggaacatattgttaagaatttcagtctcagaagcagcatctcccataaacagtgacaatatcaggcagtaagacacttstagtccatcctggttcatccaaagcatttataaaaatggcagcaaactacttcttgtgcatagagcaattctgagtcattaagcaaagtgttaggtgcactataaatggggtgttgaggggaaaagataagaaataaaagtgaatgttgggtatgcttttaagttatcctcaatgactgctggaggtttctagtttttattggccttaggtcagcacatgttgcccttgcctatcactcttggtgatggttggagcaactgctgctcctgctgaaagaaatcagcatcaccaggaagagtactataaaagcaatcacagagccgggcctagtgacatgcatagtcccagctacttgggaggctgaggcaggaggatcgcttgagcccaggagttccaggtt

SEQ ID NO: 551552 - DNA, 566 bp, Homo sapiens
ctggctttagatcaacttataggtcttccacatatattatttttcatgcagcaaggaactggatttgtgatccaaataggtcacaaggaacatattgttaagaatttcagtctcagaagcagcatctcccataaacagtgacaatatcaggcagtaagacacttctagtccatcctggttcatccaaagcatttataaaaatggcagcaaactacttcttgtgcatagagcaattctgagtcattaagcaaagtgttaggtgcactataaatggggtgttgaggggaaaagataagaaataaaagtgaatgttgggtatgcttttaagttatcctcaatgactgctggaggtttctagtttttattggccttaggtcagcacatgttgcccttgcctatcactcttggtgatggttggagcaactgctgctcctgctgaaagaaatcagcatcaccaggaagagtactataaaagcaatcacagagccgggcctagtgayatgcatagtcccagctacttgggaggctgaggcaggaggatcgcttgagcccaggagttccaggtt

SEQ ID NO: 551553 - DNA, 945 bp, Homo sapiens
ttttctggttctccatgttattctctaagacaggtattaggaagtgaaataagtcagcaaaagtagaaataacctggaaaaaaattcatctgtgratgaacagtgaccactcttggattctgatgcttttgtggtatattcatcaataacaaaaaaaaacaaagacaaacaaaaaaccctacccttctgagaatgaacatgaaggctattgtactattgtattcattgacaattatatctccttgcaggactctggctctccagcacccaggttaggaactttcattagcaaggaatctaacttgtaactctaaggactctccaaatggaggtttaaagaaagagccctgcttgcttttttttttttttcttaattcatgctctaggctatgatatcaaacagattaaagagaataggaaagaagcacaaaactattctagcttgttggcagattcagagagctccgtcttcaaatccagcaagtccatttgtattaagtggtggggctgttaacagtgtacttgccaagcccactgccaattagacaccactatcagcatttttcttttaatttaaataggcaatttaggaacagcaactttgagaatttttttttttttttttgcaattagaattctcttttcttgccaagatcgagtttgctttaaaagatttcatcttctttaaagatctttggtttctattaactttggtggctttagcatgatgatcatgtacaaaatcatcgtagattggtttaatatcatcttaatccaaaagtgccctctggccagaaattgataaagaaaatgatatattcttggagattcactaaccacaagagtagtctgttttctgaatttttttaagtgtctggttctgttgcaaagagcattctggaaggcacataatagaaattatttgataaagtaatcttagtggac

SEQ ID NO: 551554 - DNA, 1457 bp, Homo sapiens
tcatctctctattccacagacagctatgaagcccctgctgggtcccctgctctgcgctaaggctgaggtggggacaaaaaacaatcagataggctgtaaagctcctgggtcacatctggctaatgccttccattcaagtcccagctcaattgtcaccttttctgtgaaggctttcttgactagtactccctcctctttgaccccatagccctctgttcatatttctgtatggtgctcatcccgtgataggatttaagggaaactacaaatgycacccctccactgtgcttttggaatcaattgagaaatgcacatgagtctgagagatggagctcacaatatcagcttcattacttaacagataaagctggacatggaaaagcgatgcacctgcagccaaacgagcttcctaatatgccacacaaccccagtacgctcaccctgtctttgtcctgacttattcacctggtcacccggagctgctggagcacttcaggcctcccatgacagagtaaatctcttgtcacacagaggagaatgcatgcgtgcatacctgctaagaggaagctgttttcaaagagaaggaaaagggccatttgagaatggagacctttaatttaatacatccttctttcccacgtggagcagtgggtgttaatttctccccttcccagcaaacaggtaagtcactcctcctgctccaggaaaaaggaggtgagaggtggcaggcagggcagaatatctccaatatcctcgagaaggctggggcagagacagaaatgtaagaaaatagtcaacacacacacgtacacacgcacacagccctagggactataattttctgcataaaattctgcttcttatgctggactttgagcttctcaagggcaagaactaactcattcatttttgcataaaaggaaaatgaaaaaaaaagtcttggctgtcacagaggcttatttgatagaacttgctggataaataaatgtggaacaccctgtctcctgtcctttaggctatttgcccacctatgggagggaggtaagtcagtgacctcagtgctaatgaggtctgaagggatgagaaatcctcttggccatagctggtctgtagattccctccacatctgctggcatcccaagataaccagggtccttctaactgtcttggctgaacctcatgaagtgactgggactctgtcaccttcttcccctcccacaatggtaatccgcaaggagcgatctttgatgttactattatttttattttggggcatcacaaactgtactcatataagatggtaaacttactcagtaaatgttgtctgtgttctgactgttccactgaccggcaattcccctatctctcccctctcctctggtctccctattccctgagacacaacaatactgaaattaagccagttaataatcctataatggcttctaattgttcaa

SEQ ID NO: 551555 - DNA, 1457 bp, Homo sapiens
tcatctctctattccacagacagctatgaagcccctgctgggtcccctgctctgcgctaaggctgaggtggggacaaaaaacaatcagataggctgtaaagctcctgggtcacatctggctaatgccttccattcaagtcccagctcaattgtcaccttttctgtgaaggctttcttgactagtactccctcctctttgaccccatagccctctgttcatatttctgtatggtgctcatcccgtgataggatttaagggaaactacaaatgccacccctccactgtgcttttggaatcaattgagaaatgcacatgagtctgagagatggagctcacaatatcagcttcattacttaacagataaagctggacatggaaaagcgatgcacctgcagccaaacgagcttcctaatatgccacacamccccagtacgctcaccctgtctttgtcctgacttattcacctggtcacccggagctgctggagcacttcaggcctcccatgacagagtaaatctcttgtcacacagaggagaatgcatgcgtgcatacctgctaagaggaagctgttttcaaagagaaggaaaagggccatttgagaatggagacctttaatttaatacatccttctttcccacgtggagcagtgggtgttaatttctccccttcccagcaaacaggtaagtcactcctcctgctccaggaaaaaggaggtgagaggtggcaggcagggcagaatatctccaatatcctcgagaaggctggggcagagacagaaatgtaagaaaatagtcaacacacacacgtacacacgcacacagccctagggactataattttctgcataaaattctgcttcttatgctggactttgagcttctcaagggcaagaactaactcattcatttttgcataaaaggaaaatgaaaaaaaaagtcttggctgtcacagaggcttatttgatagaacttgctggataaataaatgtggaacaccctgtctcctgtcctttaggctatttgcccacctatgggagggaggtaagtcagtgacctcagtgctaatgaggtctgaagggatgagaaatcctcttggccatagctggtctgtagattccctccacatctgctggcatcccaagataaccagggtccttctaactgtcttggctgaacctcatgaagtgactgggactctgtcaccttcttcccctcccacaatggtaatccgcaaggagcgatctttgatgttactattatttttattttggggcatcacaaactgtactcatataagatggtaaacttactcagtaaatgttgtctgtgttctgactgttccactgaccggcaattcccctatctctcccctctcctctggtctccctattccctgagacacaacaatactgaaattaagccagttaataatcctataatggcttctaattgttcaa

SEQ ID NO: 551556 - DNA, 1247 bp, Homo sapiens
ataaccttaggaagttcacttaatctttctttgccttatctgycaaatggaaacaatgatagtacctacttcacagggttcttgtgagaaataagtgaatacgtacaacatgcttaacacagtgcctcctggcgcacagtaagtatgcactaaatgctgtctattattattatcacacatgtggtcacccaaatattcttcctcctaggtcctcccatctcagaggatgcatcctcatgagtgcaggtttctgccatcgatggaattcataccttcattccctttctgatcttgagagttccaactaaccctcctgagttgagaccatcccactttaatctgggaagcattaagcctccaatcctaatctttgtttaaaacgtctgtttggaagttgtcttctgggtatcctgctgcttgcagcttctcttttctactctgaactacaccaatcctcatgggggtcaagaaagtccacacttcaaggacatgaagcctggttctctcctgcccctcgccccagggatgaaatgcctttcattctttttaggtgagcctgcagctgagaaaaactagacatggttatttcctcaataggtcattctgctacaattaattctcaataaatcttcaccatgagactgaattcctcggctatgttttattcagtgtgtacctccagcacttagggcagaacccacacttagtaggtgcttgataaatgtgtaaatgaatgaatgaagaatatgaatcacagggtgggaacaattttcaaactatgggtggagaaatcaacatgatcattcactgtgtgcccagcctcctgcttgacactgaggtccaagcaagaaaagtaacaaggcacttggagcttgtagtcaagtcctcaaagactaaagtctacaaaggaaacagagctcaaccacacaaatcacttgctctgcccatcccacatcagagggaacccagtgaagtgttggttcagaagaggcaggatgtggcctaaggtctgaaggcacgggaggggccggggcagagggcacggggggcccagcttaccctgagataaggtgtcccagaacaccacgagcaagggcacagcacaggaatgagatggctatttgtggaaaataaccatgacaccagcctgagccatttgtagcacttgtgatagggagtcatgggggtaaacttagctatttcaggctgtgggctcagtgttgagacctggaggttaggctgggagt

SEQ ID NO: 551557 - DNA, 629 bp, Homo sapiens
ctatccagagataaaatatataagctttagggaggctgaggtgggcggatcgcttgaggccaggagttcaagaccagcctggctaacatgatgaaaccccatctgtactaaaaatacaaaaattggctgggcatggtggcacacacctgtaatcccagcactagggaggctgaggcacaagaatcacttgaacccagaggtggaggttgtagtgagctgagatcacgccactgcatgccagcctgggtgacagagcaagactctgtctcgaaaaaatatatatatatacgtgtgtgtgtgtgtgtgtgtgtgtgtgtgtgtgtgtgtgtgtrtatataatagatatataagctttagacttatatatgtaagtttaacatatatataagctttatatatatgtataataaattatatatgtaatatgtatataaagcttatatatatatataagctttaactataccaagtatatcctttggggtctaagctctattccatatagctgaacttgccatatctattaatttacagatatatgacattggtgcaaaaggaattgtggttttggccattactttcaaaataaattaataaatgttaataaaggtacaaccaacttacaatta

SEQ ID NO: 551558 - DNA, 595 bp, Homo sapiens
agaattattccatggttcacaaatcttaccaacaatgaaaaaaaaaaagaatctcctgagaccatgccccggggaggaaaaaaaaaatcaaaactacagtaataaataaaggactgcctttggagatgtacttaatgaagctgaagtagcaaagaacaaattgtgaaataatttgatcctgatctttaaaacttattttttctctttgaactaaagaaaatcaactctctcctcgggtttccggtcattacgtgagacagcataggcaatctaaacatcaatatatatttaggatatacctaccaacaggattaccaaatttattcaatatatattcaaaagtacagtattgtatttcacctccctgtaccgcaaaaataccgggaaaaaaastaaacagaaaaagactaaaacaccactgaaaaaaactttgggtttactgctatcaaaactagtccccattggttcagaagtgttcatagctctgactggtggaatgtctgccatgcttcatgaatcctgcccccacagatgtaggcagaacctatcactatttatgcagaaccgaccaaaaacatttgggacaacacaaaaa

SEQ ID NO: 551559 - DNA, 2646 bp, Homo sapiens
ggcctctctgaagtagccagccccataggttgggagtagtggttgccttctggtgggggtgcttaaatgggagaaaaactttttactgaaaactctttgtttcctttgaactttgacgtacctgttgagtagatgaataaaataaatttcctaaaaagaaggacaactttgagccagcgagtccacttcacaggcccacagatgagtcaaatgtgtctgcagagtcatttgatgcaatgttgttaatagcagaaacctggaagccctcagcatcaatgacgaggcactgggacaccaatggtgcagagcccccacgtggacactggccagcaaaggggctgaagcagctcgctgtgtcctggagtccagtgaccaccaagaaagaaacgcaaggtgtagagaagaatgtgcattctgctgccattgtgtacagggggaaaatacacaggcttggagacatgtgcttttgaatttatgtaaagtaactggaaggatacagaagaaattgacagttttggttgcctctgaggagggcatctatgtgggctggccagtgttaacaaggagattttaaatacagatgctcttcagcttacgatgggattatgtcttgataagcccagcattagttgaaaatgtcctacatcaaagtgcattaagtacacctagactaccttcagcatgctcagaacacttccatgctacagttgggaaaatcatctggcaacacagtcccctgcagagggttggttgtttacccttgtgatcgtatggctgttggagcaactcggccattgccccacatcacaaggatatcgactacagatcaccagcccaggtagagatcaaaatccaaagtacagtttctattgaatatgtgttgctttcctaccatcataaagccaaaaaatcatgcgttgagaattgtaagtcaggggccctctctattaaaacatggtaatcttagctctattcagttaacaagtgagtagtgaataagtgctgcgaaagagatatctgtatctctgtgagcccagaggacaaaattattaatgggcatccgcaagtctgggattgtgtatacacgcgcttcaccctagcaaatggcactccattcccagagcacttctcaggaagtgggtttgggacgtctctgttctcgctcacttcaacgaatgctgcacagcctggggtggagggtgaggggcttgactcctggctctgccgcggtggcctgtgtgcctccacaacagcccctttgacccccgcctctggggttcatgtcctggtgcattctcctgtgtgtgtgggctgcaccttgtgacttgcttctgatgyatagaatgacgatggggcaaaacttccaatgagattatacagaagactctgacttccatcttgttggtgatactcttgtgctgtgtcggggttcccaagacccacccgtgggtttggtgaagactcccaggactcagcacctagtcctactctgctatgatgtattacacaaaaggcttgtgactgcagcaaagggaaaggcacatggggtaacatctagaaaaaaacaggtgcaggcttccgagagtcctctcccagaggaatcaaacaggacagacttgattgacccagtgagttgtgattacacatgcaaagtgttgtctttcagggaagctcattaaagactcagtgctcagggagcttacaggggtcatgtgggcacctgtctggcacctccaacattccagactcccgcagggaaagcaggcactcagtgtattgtttgcataaacagtttaggcacattgaaccactcttacccgttgggatgttgggaacactcccaaaatccaggttcccagaggccaactaagggccagtcttgcattcaggcctttttagggagagtggccttgggcctgctgggtaaagtcctcacacctgccttactgcaatgaattaagtgcagcattggaaaagcaaggaactgaggcccttagtccagcaactgccttggaccctaatccagccaacaaccccatacatgagcttggaaacagatcctgccctagttgaggcttgagtcaacccacttcttgagagatgttaactttaaaaatacaaaagcactgtattagtctgttctcatgctgctaatacagacatacctgagactggctaatttataaaggaaagaggtttaattgacccacagttccacatgactggagaggcctcacaatcatgacggaaggtgaatggggagcaaagtcacgtcttacatggtggcaggcaagacagcttgttcaggggaactccgacttataaaaccatcagatcttgtaagacttattcactaccatgagaccagtgtgagaaatcaccacccccatgattcaattacctcccacaaagtcccgcccacaatacatgggaatgatgggagctacaattcaagatcaggtatcatatcaaccacaattaatacatttagaaaacagaggagactttatttcttgtaaaggtttcagcctgcaaggtggccatcctgcagcctgggaagcacagcctccagccaagaccagagagaaacaccatggaggaagagaagctgggacaggagctttatgccgaactggttggctaaac

SEQ ID NO: 551560 - DNA, 546 bp, Homo sapiens
cttcctcaatttaagtcagctcaggacatggagctttttgcycccacctgagcttgtcatatagctgagggcaagtcagtaaatatttatgcagatggctgatatacctttggcatagcacacaattttggtatgttatagaaacaccaaaggtttctcatttctagtgggaacttcatcaaaaatagactccatgcggatgaactcctttccactatcctgttaccatcacagattgtcattattaagattgactctcatgcatataaaactgaacctgaacataaaacagaattctctagtaggtttttatgctcaatcgtttagtgctggaacggttagggtatgctttctgaatgaacctcctaagatcgatccaagtcaacttccttatgatgacctatttagaaaacagtataatgcacttgatttggagaaacaaaagtgatctctgaaaggacacaaattcattgttaaaaaaggatccaaattcattgttaagcatggactcacagagggcccagatggccacctggtccttcctga

SEQ ID NO: 551561 - DNA, 1569 bp, Homo sapiens
ataaaaaattaaaaatatatattaataattaaattaagcaataaagttggaaatgaaatggtaaggttctatctcagygatctttcatcttgcatcttgcttcaggtcctggaacttctgaaagttacattgagtggttgagtgagttgtcttcactgccagctgggagcatggtatgatttttttcatgctttagcccatcaaaagccacatgggctgattcttgattcctagatttttttgggcctcagtttccttaccagtaaaatgcatgtcattgtttgtaccattgaggattgatgtgatcactaaatgagattctgatataaacactgtattaattaccttgaactgctataacaaaataccatagactgggtgatttaagcagcatttatttctcatggttctagaggctggaaagttcaagataaagctgctgtcagatttggttcctggtgagagtctgctttccggctgtagatacctgcgttccagctgtgtgctcacatggtctttcttcagtgcttgcacatcggggagagagatctctgtcttcctcttcctataagagcactgatccttgcatgaaagtcccaccataatgacttaatgttaaccatcttacttcccaaaggctccacttccaagtacaatcatattgggggttaggtcttcaatatataaatttggcaggggacataaacattcagcccatacagttaacatctaggaagtgttcataagtgtagcctttactctctttatttctgagaagcctagggtgtttattcctttacttattcattcatcacttacttagcttctattatgttccaggcagcataactatgctcattttctattactgtataacaaactaccctcgaaatttaataacttaaaacaacagacatttattatcccacaattcctatgggtcatgaattcaaggaattagctggatggttttgccttaggatccctaaagaggttgccattaatatgtggactctggctgcagtcatctgaaagcttgactggggctgatggaactacttccaagatggctcattcacatggctattggcaacagatcttagcttcttgccaaatggggctctctatacagtgtcagtatgaattaaccactggtttcccctaaagcaaggagagagagagacagagagagagagagagagagagagagagagagagagagagagagaaaacctagtctccaagctcctattttatttgtccatcactgagacaagtttgcacccaggggaaggtatacataaaagcatgaatgccaggaggtggaatccttggagggcattttgaagactggctgacacagtgccttagtaagagttttggggatatagccatgagctaaagggccatctaacttatagtctaagaggagagacagacatatataaaatcattatgtacctaaatacataccaaccaactaggctaagacaatgaagaaaaggtacagtatgtatgagagacatttaacaggagaccttaggaggaagtggaagggacagggatgca

SEQ ID NO: 551562 - DNA, 621 bp, Homo sapiens
tccagcagcccaagctactgctctgcctatggagcagccaatcttttattcctttaatttcttaataaacttgctttcactttatggattctcctccaaattttttcttgcatgagatccaataaccctcttttggggtctggatcaggacccctttccagtaccactgatgctgagtcaaagaggatttatggataaaaaaagaaaaatgatgtaaataaatggaaatgagatacagaaacagctcgattggttacaacttggcgtttgccttatttgaacttggtttaaacagttggcttcctttaattgcctgaaacttggtaattgctacaagagtagggtacaggttgtttgtacattcagattggctatagtttgcttttacaaaraaatctttatgtcaatcttaaaatatataaggaagcaactttaggctaaattcaatttaacactttttatagcttaatattaaatggggcaaagttaatatccttaagtctatcaacttctagattgttcttctgatccattatattgaaaatacataataataaatagaaattcacattcatctgagtatgatggaggaaaaaacaaaatttggctagctttgcccat

SEQ ID NO: 551563 - DNA, 1298 bp, Homo sapiens
ataactaattcagaagatggtctttaaagggcttgaagaataactagttcacaaggcaaatagaggagaaaattccagacgtgtgtgtgtgtgtttgtgtgcacgtgcgcgtgtgtgtgtttagaatgaagtgggaaggttgcaagtacaaagaccagaaaatatatgactagagaaaagttaaagggtttggtaaaatcattttctatgcttaatcttgtttcatatgtattatataaagggttttgcatatataggtgtttacaatttatttttaaaccattaaaatattttcatgaatgtttaaagacatttcattcaacygttaataacatgtttctccaaagtgagtaaacttgcagaatttgggacaatgtttagcactgaagatttctatctcagagagccctagctagttatagaatgaactctgctccagtctatcttgtctcccacttagtctggttgataaaggcaagacatcaatcaggaaagagcataactatctagtgctttagggagaaatatggacaccttagcaagaacatgaaactgttatggaataatttgagtttggatgaacatagatcaaaaacataacttcttggaaaatgtcactgtcatagaaatcagaccttacactgaagggatgtagtttccttaaaagtttcgaacttgattccttttaacaaacactaaaatgttaaacatacccttaaaagccatgatatttaaatgcacaaaatctaaatgttcaataaaaacaaattttagttacataaatacatgcgtgacacatccaactgctctgtcaacattctctttctctgtaaatggtaccaacattcatcctgttaatcaaggtgacctccaacagtgctgaatcatagctcttcctcctataaccctctttcctccagcaaaaatctttcctcctttccattccttttcatagctcatccccaaataagcaaagtatgtagctgatatggaagacaggtggctaaaagctgtgtttctggatagtgtagatggggacttcaatcttgatctgctactcacctgccatacgaccttgaaaatgactaattcacccttctgagtctttttttttatttcttgaaatgcggtttcactctgtcaccaaggctggagtgcagtggcacaatctcagctcactgcaaccttgtctcccaggttcaagtgatcctcccacctcagcctcccaagtatctgggattacaggcatgcaccaccacacctggctaattttgtatttttagtagaaaccaggtttc

SEQ ID NO: 551564 - DNA, 1221 bp, Homo sapiens
aaagtatcatagaaaatatctttctctgtaaatgttaaagcctctaccaaaaaagttggtcataaaaccattttaggcagatataaagtcccccttttttttwaaaaaaagtaatacctccttaattatacagaaagttttatactattttacatacaaatcactttatatttttcctttcatgtgtttttatatattatattgaagcttaatactgcaataaaagtctgaaaaatataactgcagtacttgaagccgcctcctcactgcaacccaaaggaaacatacatgtgtaatgacaacccagatcaagatacagcatgttactggcacccataaacctcgctagtacttactaacagttcactactcccctgaaaatttaaccaatattctcacttgtatcactttgcagtaggggagtaatgattcccaaagacgttgatgtcttcttccctggtgcttatgaatatgttgttccatggcaaatgaggattaatcatgaagaattcattcaggtttgctcttcagctcaccttaaaataagtagaatatcctggattatgcagtttgtccctgtgtaatcacaagggtggttacaaatggaagagggatgtaaaagagtcagagaaagagaaagagttgtggcaacagaagcaaaaatctgaacaatcattggcttttgagatggaggagtggaggcacaaacccaggaatgaaagcatcctctacaaaccaagaaaggcaaagaaatggaatccccttggagtctccagaaagaatgcagcctactgacacattaatttttcctcagtgacactcctttcaaactcccagagtccagaactgtaagagaatatttttgtgttgtttaagcaagtaaatttatggcgattggttacagcagcaataggaaactaatacacacttagattacttctttttgaattttatataaattgagaatacaatctgtactttttgtgtccaatttccatcacatagcattataatactgatagtgatgtatagggctacttcattcaattcactactgtttagtattccattataataaaacaccagaatatactggaaaatttgtgtctcttctagtattgttgacctttgtggagtgtgatggttaatactgagtgtcagggaaacaaagtgttgaccctgggtgtgtctgtgagtgcattgccaaaggagattaacatt

SEQ ID NO: 551565 - DNA, 1221 bp, Homo sapiens
aaagtatcatagaaaatatctttctctgtaaatgttaaagcctctaccaaaaaagttggtcataaaaccattttaggcagatataaagtccccctttttttttaaaraaagtaatacctccttaattatacagaaagttttatactattttacatacaaatcactttatatttttcctttcatgtgtttttatatattatattgaagcttaatactgcaataaaagtctgaaaaatataactgcagtacttgaagccgcctcctcactgcaacccaaaggaaacatacatgtgtaatgacaacccagatcaagatacagcatgttactggcacccataaacctcgctagtacttactaacagttcactactcccctgaaaatttaaccaatattctcacttgtatcactttgcagtaggggagtaatgattcccaaagacgttgatgtcttcttccctggtgcttatgaatatgttgttccatggcaaatgaggattaatcatgaagaattcattcaggtttgctcttcagctcaccttaaaataagtagaatatcctggattatgcagtttgtccctgtgtaatcacaagggtggttacaaatggaagagggatgtaaaagagtcagagaaagagaaagagttgtggcaacagaagcaaaaatctgaacaatcattggcttttgagatggaggagtggaggcacaaacccaggaatgaaagcatcctctacaaaccaagaaaggcaaagaaatggaatccccttggagtctccagaaagaatgcagcctactgacacattaatttttcctcagtgacactcctttcaaactcccagagtccagaactgtaagagaatatttttgtgttgtttaagcaagtaaatttatggcgattggttacagcagcaataggaaactaatacacacttagattacttctttttgaattttatataaattgagaatacaatctgtactttttgtgtccaatttccatcacatagcattataatactgatagtgatgtatagggctacttcattcaattcactactgtttagtattccattataataaaacaccagaatatactggaaaatttgtgtctcttctagtattgttgacctttgtggagtgtgatggttaatactgagtgtcagggaaacaaagtgttgaccctgggtgtgtctgtgagtgcattgccaaaggagattaacatt

SEQ ID NO: 551566 - DNA, 1221 bp, Homo sapiens
aaagtatcatagaaaatatctttctctgtaaatgttaaagcctctaccaaaaaagttggtcataaaaccattttaggcagatataaagtccccctttttttttaaaaaaagtaatacctccttaattatacagaaagttttatactattttacatacaaatcactttatatttttcctttcatgtgtttttatatattatattgaagcttaatactgcaataaaagtctgaaaaatataactgcagtacttgaagccgcctcctcactgcaacccaaaggaaacatacatgtgtaatgacaacccagatcaagatacagcrtgttactggcacccataaacctcgctagtacttactaacagttcactactcccctgaaaatttaaccaatattctcacttgtatcactttgcagtaggggagtaatgattcccaaagacgttgatgtcttcttccctggtgcttatgaatatgttgttccatggcaaatgaggattaatcatgaagaattcattcaggtttgctcttcagctcaccttaaaataagtagaatatcctggattatgcagtttgtccctgtgtaatcacaagggtggttacaaatggaagagggatgtaaaagagtcagagaaagagaaagagttgtggcaacagaagcaaaaatctgaacaatcattggcttttgagatggaggagtggaggcacaaacccaggaatgaaagcatcctctacaaaccaagaaaggcaaagaaatggaatccccttggagtctccagaaagaatgcagcctactgacacattaatttttcctcagtgacactcctttcaaactcccagagtccagaactgtaagagaatatttttgtgttgtttaagcaagtaaatttatggcgattggttacagcagcaataggaaactaatacacacttagattacttctttttgaattttatataaattgagaatacaatctgtactttttgtgtccaatttccatcacatagcattataatactgatagtgatgtatagggctacttcattcaattcactactgtttagtattccattataataaaacaccagaatatactggaaaatttgtgtctcttctagtattgttgacctttgtggagtgtgatggttaatactgagtgtcagggaaacaaagtgttgaccctgggtgtgtctgtgagtgcattgccaaaggagattaacatt

SEQ ID NO: 551567 - DNA, 1221 bp, Homo sapiens
aaagtatcatagaaaatatctttctctgtaaatgttaaagcctctaccaaaaaagttggtcataaaaccattttaggcagatataaagtccccctttttttttaaaaaaagtaatacctccttaattatacagaaagttttatactattttacatacaaatcactttatatttttcctttcatgtgtttttatatattatattgaagcttaatactgcaataaaagtctgaaaaatataactgcagtacttgaagccgcctcctcactgcaacccaaaggaaacatacatgtgtaatgacaacccagatcaagatacagcatgttactggcacccataaacctcrctagtacttactaacagttcactactcccctgaaaatttaaccaatattctcacttgtatcactttgcagtaggggagtaatgattcccaaagacgttgatgtcttcttccctggtgcttatgaatatgttgttccatggcaaatgaggattaatcatgaagaattcattcaggtttgctcttcagctcaccttaaaataagtagaatatcctggattatgcagtttgtccctgtgtaatcacaagggtggttacaaatggaagagggatgtaaaagagtcagagaaagagaaagagttgtggcaacagaagcaaaaatctgaacaatcattggcttttgagatggaggagtggaggcacaaacccaggaatgaaagcatcctctacaaaccaagaaaggcaaagaaatggaatccccttggagtctccagaaagaatgcagcctactgacacattaatttttcctcagtgacactcctttcaaactcccagagtccagaactgtaagagaatatttttgtgttgtttaagcaagtaaatttatggcgattggttacagcagcaataggaaactaatacacacttagattacttctttttgaattttatataaattgagaatacaatctgtactttttgtgtccaatttccatcacatagcattataatactgatagtgatgtatagggctacttcattcaattcactactgtttagtattccattataataaaacaccagaatatactggaaaatttgtgtctcttctagtattgttgacctttgtggagtgtgatggttaatactgagtgtcagggaaacaaagtgttgaccctgggtgtgtctgtgagtgcattgccaaaggagattaacatt

SEQ ID NO: 551568 - DNA, 1221 bp, Homo sapiens
aaagtatcatagaaaatatctttctctgtaaatgttaaagcctctaccaaaaaagttggtcataaaaccattttaggcagatataaagtccccctttttttttaaaaaaagtaatacctccttaattatacagaaagttttatactattttacatacaaatcactttatatttttcctttcatgtgtttttatatattatattgaagcttaatactgcaataaaagtctgaaaaatataactgcagtacttgaagccgcctcctcactgcaacccaaaggaaacatacatgtgtaatgacaacccagatcaagatacagcatgttactggcacccataaacctcgctagtacttactaacagttcactactcccctgaaaatttaaccaatattctcacttgtatcactttgcagtaggggagtaatgattcccaaagacgttgatgtcttcttccctggtgcttatgaatatgttgttccatggcaaatgaggattaatcatgaagaattcattcaggtttgctcttcagctcaccttaaaataagtagaatatcctggattatgcagtttgtccctgtgtaatcacaagggtggttacaaatggaagagggatgtaaaagagtcagagaaagagaaagagttgtggcaacagaagcaaaaatctgaacaatcattggcttttgagatggaggagtggaggcacaaacccaggaatgaaagcatcctctacaaaccaagaaaggcaaagaaatggaatccccttggagtctccagaaagaatgcagcctactsacacattaatttttcctcagtgacactcctttcaaactcccagagtccagaactgtaagagaatatttttgtgttgtttaagcaagtaaatttatggcgattggttacagcagcaataggaaactaatacacacttagattacttctttttgaattttatataaattgagaatacaatctgtactttttgtgtccaatttccatcacatagcattataatactgatagtgatgtatagggctacttcattcaattcactactgtttagtattccattataataaaacaccagaatatactggaaaatttgtgtctcttctagtattgttgacctttgtggagtgtgatggttaatactgagtgtcagggaaacaaagtgttgaccctgggtgtgtctgtgagtgcattgccaaaggagattaacatt

SEQ ID NO: 551569 - DNA, 498 bp, Homo sapiens
agccacttgggaggctgaggtgggaagatcacttgtgcccaggagttcaagtctgcaatgaactctgatcaccacwacactatagcctgggtgacacagtgaggccctgtctccaagaaaagataaaaatacgtaagtctctaacattgacaatcttacattaaattcctataaatttgaaagttataggttataggtgctctctcattagtcaatataattttctttttccctgatttaccaaaaatgtgatataaatgatgccaaattatgaattcctaaagaagtgatttaagatttgtgttctggtgggagaccaagcatatttttcttggccaaactttccttggctggacagctaacattagagtgtccagatctctataataagtcccctttccttcttaaactgcatactggctgattcttttcatcacttctaattaaatcattgtccagacaatgtcactgccctatttataatccttaaataacttc

SEQ ID NO: 551570 - DNA, 522 bp, Homo sapiens
aggcgatgggggttagagcaggagcaaggagatcagttaagaggcccttgcaggggaccttgcaattaagaggtctaggtgggaaatgatgggggcttgtgctatgatgacagcaatgaagccaatgaaaagactttggacccacgatgcattttgaaggtgagagactgggttttgaggatggataaggtggggagccaagtctgaactctaaggcttttatatcaggaattgcgtggaaagatgatggtaagcccatgtgtttgctaatttcctgcttgtaagtttcctttggatgaaagcaggatccatgcctcataatgaggtatacccctagcagggacctgggtcccagctggtgctgcattaaataccrgggacatgagcagccaggactgtggatcagtaacactgagcctgccccccagttccttggcatcagcatcctgggagaggtggtttgggtgctcttgaggcatgagatttttgtgagggtggcctttctgcatcactcagctgtca

SEQ ID NO: 551571 - DNA, 522 bp, Homo sapiens
aggcgatgggggttagagcaggagcaaggagatcagttaagaggcccttgcaggggaccttgcaattaagaggtctaggtgggaaatgatgggggcttgtgctatgatgacagcaatgaagccaatgaaaagactttggacccacgatgcattttgaaggtgagagactgggttttgaggatggataaggtggggagccaagtctgaactctaaggcttttatatcaggaattgcgtggaaagatgatggtaagcccatgtgtttgctaatttcctgcttgtaagtttcctttggatgaaagcaggatccatgcctcataatgaggtatacccctagcagggacctgggtcccagctggtgctgcattaaataccggggacatgagcagccaggactgtggatcrgtaacactgagcctgccccccagttccttggcatcagcatcctgggagaggtggtttgggtgctcttgaggcatgagatttttgtgagggtggcctttctgcatcactcagctgtca

SEQ ID NO: 551572 - DNA, 780 bp, Homo sapiens
acgtggtgagctgggagtgtttttggatgacagatgaggccacgggattgaataataggtatccttatgaagactgagaaaaggagagggctgggggccaagccctgggacagtgcaaccttcagaggatgggsgaggagggccctgcccaagagacagagaggaagtggcccgtgaggtagggggaagtccaggagaggacagtgtggtgaatacctaatgctttactcattcactggtgaatgaatggatggatggatggatggatggatggatggatgaatgcatgaatattccttaataatatggttggccatggtccatccatatgactcctacggacaccatgttaccatttcacactcgtcttctatttaggagaaatcagacgaaactgtcatcttatatataggtcaaaaatggtttccataaccacccacctcacatgcttactgaaattcattaagtaatagatggggtggggggcgggaggtttacaggtcggcaaaggaggcaaggctagagtgatccatgtggcagtggattagagtggcaggcatcagtatgaacacatgtttagctcaatatagatacagatggctacatagagaaatatttatggatatgtgcatatacacaaattagtaagacacacattactaatcctggctgtcagcgaagagagcctagaagcaaggataccccagtagcaacaaacctctggtgcccaggtctctgttctccaataaacaccattctccagtaaaaggaaccaggctt

SEQ ID NO: 551573 - DNA, 780 bp, Homo sapiens
acgtggtgagctgggagtgtttttggatgacagatgaggccacgggattgaataataggtatccttatgaagactgagaaaaggagagggctgggggccaagccctgggacagtgcaaccttcagaggatgggcgaggagggccctgcccaagagacagagaggaagtggccmgtgaggtagggggaagtccaggagaggacagtgtggtgaatacctaatgctttactcattcactggtgaatgaatggatggatggatggatggatggatggatggatgaatgcatgaatattccttaataatatggttggccatggtccatccatatgactcctacggacaccatgttaccatttcacactcgtcttctatttaggagaaatcagacgaaactgtcatcttatatataggtcaaaaatggtttccataaccacccacctcacatgcttactgaaattcattaagtaatagatggggtggggggcgggaggtttacaggtcggcaaaggaggcaaggctagagtgatccatgtggcagtggattagagtggcaggcatcagtatgaacacatgtttagctcaatatagatacagatggctacatagagaaatatttatggatatgtgcatatacacaaattagtaagacacacattactaatcctggctgtcagcgaagagagcctagaagcaaggataccccagtagcaacaaacctctggtgcccaggtctctgttctccaataaacaccattctccagtaaaaggaaccaggctt

SEQ ID NO: 551574 - DNA, 659 bp, Homo sapiens
tcacaaatgtaaagtaatatgatgattttaacaactcaacttaagacatggctgcattcaaagtatcaggaggttaaataactaccctcctgcttaaaccaggagatactaaaacaacatcattgttttaatactgttattaaaacaataacctggtataagttgcaaatgcatcaccagcctccttatcattatattcagtcactgggcctgattacatctgtgagtcccaatcagagattattttgtcccatataggacatttggcaatgtctggagacatttttggttgtcacagtttggtgggtggtgggaagaagagtgsatcctactggtactagtaggtcaagggcagggatgctgctagacatcttaccatgtacaggacaatctccaaacaaagaatttgccagcccatgtcaatagtgctgacattgaaaagctctattttagcctgcgatattcgaagcagcacctaacacgtgatgggcaaagtgtctccaaactctgctttatattttggggaaaaaatagaatttttatctaactcagactgctgactcaaatgaagtaccattcatcttttttaaaatgtccttttgctctagtgtcattatttctcaattcaccaaatagttacgcaatgctaatgacatgtc

SEQ ID NO: 551575 - DNA, 519 bp, Homo sapiens
acaccggggcccaggttagggagagcattaagacatatagctaatgaatgcggggcttaaaacctagatgatgggttgataggtgcggcaaaccaccatggcaaatgtatacctatgtaacaaacctacactttctgcacttgtatcccagaatgtaaagtaaaataaaataaaataaaataaaataaaataaaataacagaagagtaaatctgaaaaatattgtgtcactggccaggtactccctttagaagtagacaagaggcaaggcaaggtggctcaaaatcaaaaaagaaaagaagtctcttgttccactgctcctctgtctttctattcatgtttaaggaaaatttaatataatttattttgtgctattagcttatgtcttctgttgcctcaactttgaaagcttcccaggaagtaagcatctgaaatttgtcatgacrtgacacatatcacacatgtgaaatcaagcctttaataatctttgaacaggaacttttacctccattggcaaatc

SEQ ID NO: 551576 - DNA, 1101 bp, Homo sapiens
tctccataagaaagagtttggtggccggacgcggtggctcacgcctgtaatcccagcactttgggaggccgaggcgggcagaycacgaggtcaggagatcgagaccttcctggctaacacggtgaaatcccatctctactaaaaatacaaaaaattagccggccgtggtggcaggctcctgtagtcccagctacccgggaggctgagacagcagaatggcatgaactcgggaggcggagcctgcagtgagccgagatcgcgcactacagcctgggtgatagagcgagacaccgtctcaaaaaaaaaaaaaaaaaaaaaaaaaaaaggaaaaagaaaaaaagaaagagtttgatcaaatgtgtctaaaacgttctctacacgaccaatcttaaaagctcaggaatgacaattctgagaagacttaaaattaaaataaccgtttaatgcttaccctttccaaacttatctaagcacatgactacagaatccaatttagaagacattgtagtagaaaataaaaccaatatttggcctaatggatttcttaggaaaaggagaaaaaaaaaaaaacctaagacaattaagactaaagcccagtgaagattccatactgtggccttcatagaaaagcatataaccaggagggtactctttgttaaacttaccttccatcccacaagcctaagtacatgggatatgggttaaagggaagtcaggtgagtgccatatatccctcaccttttaaggaaggcagaaccttatcatgagaggctattactgctgcaaagaacacaagtgttttgagtatggacgtggagtacagtgaaaccttctcataaagtttcataggaatgagattttagatataattggatttgatcttgaatctcatcttccacccagcaggcttggtaatggcaaaaaggaggtagaaagtagatccctgcctccacagtatcctgtctacctgatccagattggaacaacaaaatgggcagtgtaattcattttgtgaatcactcccataggaccattaacagcctccattagtatataaaccagagcgcacaaacaccacccaggtgttgtcaaaccattacc

SEQ ID NO: 551577 - DNA, 1073 bp, Homo sapiens
atgaatgagttattcccagaagaaaatggttaaaatgtaaagcagagatagatagatgagctggtagaaatacactgtgtcttgtcttgctgtgcaccccgcagggaggatctgagaacataggatcctctgaagtccattggagctctctgtgtcaagataaccccaaggacttgggtaaattatctttaatagcattaaagaggattctattttttttgacaaatttttctcttgaaaaatgttagttatccttagtatatagaaaagcactatactttgaaatgaatctgaatatcttgatttcctgggaaaaaaattaagtaaaatttaactaactgcattattttagaattcattaattattaaagttattaggttaaataaactgtaccttgaaaacaggaatgataatgctgacttagctcaaaaaggaaaatgaatttataaaaaatattgtaagatttacttataatttataaattcttttggatttctgtcactttatatatatggagaaattggtaatactagaataaaatacaatctaatatatacacacatatataagaaaattcaaggatgcagttggaagctgcatatttcacacagtcaaacaaaagagtaaaatgaaccctcttattcttgtgtaacattcataccccctgtggtatataaggtaccatgagagaagcagcgtatctcagactcagttagggtgctttaaatctttgctgcacatttgccatatatcatttcttgatttataattctgaaagtctggctaacttcaaacctgattcctaactcaaaatattgatttttaaatacttacaatttgaaagtaacattgcattgctaatgtttaaatacacacaaaatacttccagtgttattatttctgttttacatgcaacctcttcatagcatggtggctcagcattatactcttctgtgtgtgtgtgtatgtgtggtggggacgggtatttaaggacactaacaggaagattgaaaggatacattcaacatacaaaactgagataaaatcagatctctgraacctattcctattc

SEQ ID NO: 551578 - DNA, 1073 bp, Homo sapiens
atgaatgagttattcccagaagaaaatggttaaaatgtaaagcagagatagatagatgagctggtagaaatacactgtgtcttgtcttgctgtgcaccccgcagggaggatctgagaacataggatcctctgaagtccattggagctctctgtgtcaagataaccccaaggacttgggtaaattatctttaatagcattaaagaggattctattttttttgacaaatttttctcttgaaaaatgttagttatccttagtatatagaaaagcactatactttgaaatgaatctgaatatcttgatttcctgggaaaaaaattaagtaaaatttaactaactgcattattttagaattcattaattattaaagttattaggttaaataaactgtaccttgaaaacaggaatgataatgctgacttagctcaaaaaggaaaatgaatttataaaaaatattgtaagatttacttataatttataaattcttttggatttctgtcactttatatatatggagaaattggtaatactagaataaaatacaatctaatatatacacacatatataagaaaattcaaggatgcagttggaagctgcatatttcacacagtcaaacaaaagagtaaaatgaaccctcttattcttgtgtaacattcataccccctgtggtatataaggtaccatgagagaagcagcgtatctcagactcagttagggtgctttaaatctttgctgcacatttgccatatatcatttcttgatttataattctgaaagtctggctaacttcaaacctgattcctaactcaaaatattgatttttaaatacttacaatttgaaagtaacattgcattgctaatgtttaaatacacacaaaatacttccagtgttattatttctgttttacatgcaacctcttcatagcatggtggctcagcattatactcttctgtgtgtgtgtgtatgtgtggtggggacgggtatttaaggacactaacaggaagattgaaaggatacattcaacatacaaaactgagataaaatcagatctctgaracctattcctattc

SEQ ID NO: 551579 - DNA, 1073 bp, Homo sapiens
atgaatgagttattcccagaagaaaatggttaaaatgtaaagcagagatagatagatgagctggtagaaatacactgtgtcttgtcttgctgtgcaccccgcagggaggatctgagaacataggatcctctgaagtccattggagctctctgtgtcaagataaccccaaggacttgggtaaattatctttaatagcattaaagaggattctattttttttgacaaatttttctcttgaaaaatgttagttatccttagtatatagaaaagcactatactttgaaatgaatctgaatatcttgatttcctgggaaaaaaattaagtaaaatttaactaactgcattattttagaattcattaattattaaagttattaggttaaataaactgtaccttgaaaacaggaatgataatgctgacttagctcaaaaaggaaaatgaatttataaaaaatattgtaagatttacttataatttataaattcttttggatttctgtcactttatatatatggagaaattggtaatactagaataaaatacaatctaatatatacacacatatataagaaaattcaaggatgcagttggaagctgcatatttcacacagtcaaacaaaagagtaaaatgaaccctcttattcttgtgtaacattcataccccctgtggtatataaggtaccatgagagaagcagcgtatctcagactcagttagggtgctttaaatctttgctgcacatttgccatatatcatttcttgatttataattctgaaagtctggctaacttcaaacctgattcctaactcaaaatattgatttttaaatacttacaatttgaaagtaacattgcattgctaatgtttaaatacacacaaaatacttccagtgttattatttctgttttacatgcaacctcttcatagcatggtggctcagcattatactcttctgtgtgtgtgtgtatgtgtggtggggacgggtatttaaggacactaacaggaagattgaaaggatacattcaacatacaaaactgagataaaatcagatctctgaamcctattcctattc

SEQ ID NO: 551580 - DNA, 1344 bp, Homo sapiens
tgcaccattagttatttagcaagatatttagacttggtaaaatacagtacatgactttgagctagtcacttaaccactgtgcctcagtttcctcattggcaaaagggaaagattactgcatagagtagatgtgtawgttaaattgttcctggcacaatgtaagtgctcagcaaatgttagctatcctgattaattatttcaggaacactaaaaggacactccaaatcactcattcacttattttttcattctttcttgtaagtcataaaatgcaaatacttcagggagagaggaccacagactggtggtcacactcaggtataaagactaatagaggaagaggggatggatcacaatgcacaaacagtatacaatgatggaaaaagtagttgggccaaatctaggagggaaaaggataggactgaggtcagaggtatgttctccttcctcaatttttctcagtgttgaatccaggtttgtttcccctaaggacctgatattactctttgcttagaaattgaacatcctcagcaggcttcagccctaaacggcatcaggcattcacagacagcctcatgaatggaagaaattggacactgggaaggcaccagaaggaaggagccaaaacagatgacggaaagaagccaaaggccagcttttgtctcctcatccttctgagcattcaagcatggaagaacagaagcaggggactgaaaatcctaaaagcttaacaaccactcttaaaaacccgataccacactgtggaaatctcttcttttttcccctttgacaactgtttaattatgtgtcagtaccaccttcattgttagcatcattatctttaaattagtgtggccatttttctaatggagcctcattttattctcctaggtaaacttcaaaaaaatttagccagggagaagcagaggagaaatacttaatggaaaaagtataagcctcaaaggcacaagagctttaagaataggctcagccatgtgctaactgagtgaccttgaacacgtcatttaatctcagtgaggtgcatctgcaaaatggagataatgccccttaccttacctagtgaaagaagttgccatgaataccaacttaaatacatacgtgacagtgttcaacaaaagtaagtaattaaaaagacaaaacagccattaaaaattaacatttacatttcctttttccaaacaatctcatgtgttgggactctatctgaccaaaaaataagcacctgtatagaaggaaacagttcagcgggtccaagaaggaaacagttcagcgggtccaagaaggaagggaaagagggagaaaacaaacttgaaaattatttga

SEQ ID NO: 551581 - DNA, 1344 bp, Homo sapiens
tgcaccattagttatttagcaagatatttagacttggtaaaatacagtacatgactttgagctagtcacttaaccactgtgcctcagtttcctcattggcaaaagggaaagattactgcatagagtagatgtgtaagttaaattgttcctggcacaatgtaagtgctcagcaaatgttagctatcctgattaattatttcaggaacactaaaaggacactccaaatcaytcattcacttattttttcattctttcttgtaagtcataaaatgcaaatacttcagggagagaggaccacagactggtggtcacactcaggtataaagactaatagaggaagaggggatggatcacaatgcacaaacagtatacaatgatggaaaaagtagttgggccaaatctaggagggaaaaggataggactgaggtcagaggtatgttctccttcctcaatttttctcagtgttgaatccaggtttgtttcccctaaggacctgatattactctttgcttagaaattgaacatcctcagcaggcttcagccctaaacggcatcaggcattcacagacagcctcatgaatggaagaaattggacactgggaaggcaccagaaggaaggagccaaaacagatgacggaaagaagccaaaggccagcttttgtctcctcatccttctgagcattcaagcatggaagaacagaagcaggggactgaaaatcctaaaagcttaacaaccactcttaaaaacccgataccacactgtggaaatctcttcttttttcccctttgacaactgtttaattatgtgtcagtaccaccttcattgttagcatcattatctttaaattagtgtggccatttttctaatggagcctcattttattctcctaggtaaacttcaaaaaaatttagccagggagaagcagaggagaaatacttaatggaaaaagtataagcctcaaaggcacaagagctttaagaataggctcagccatgtgctaactgagtgaccttgaacacgtcatttaatctcagtgaggtgcatctgcaaaatggagataatgccccttaccttacctagtgaaagaagttgccatgaataccaacttaaatacatacgtgacagtgttcaacaaaagtaagtaattaaaaagacaaaacagccattaaaaattaacatttacatttcctttttccaaacaatctcatgtgttgggactctatctgaccaaaaaataagcacctgtatagaaggaaacagttcagcgggtccaagaaggaaacagttcagcgggtccaagaaggaagggaaagagggagaaaacaaacttgaaaattatttga

SEQ ID NO: 551582 - DNA, 1344 bp, Homo sapiens
tgcaccattagttatttagcaagatatttagacttggtaaaatacagtacatgactttgagctagtcacttaaccactgtgcctcagtttcctcattggcaaaagggaaagattactgcatagagtagatgtgtaagttaaattgttcctggcacaatgtaagtgctcagcaaatgttagctatcctgattaattatttcaggaacactaaaaggacactccaaatcactcattcacttattttttcattctttcttgtaagtcataaaatgcaaatacttcagggagagagraccacagactggtggtcacactcaggtataaagactaatagaggaagaggggatggatcacaatgcacaaacagtatacaatgatggaaaaagtagttgggccaaatctaggagggaaaaggataggactgaggtcagaggtatgttctccttcctcaatttttctcagtgttgaatccaggtttgtttcccctaaggacctgatattactctttgcttagaaattgaacatcctcagcaggcttcagccctaaacggcatcaggcattcacagacagcctcatgaatggaagaaattggacactgggaaggcaccagaaggaaggagccaaaacagatgacggaaagaagccaaaggccagcttttgtctcctcatccttctgagcattcaagcatggaagaacagaagcaggggactgaaaatcctaaaagcttaacaaccactcttaaaaacccgataccacactgtggaaatctcttcttttttcccctttgacaactgtttaattatgtgtcagtaccaccttcattgttagcatcattatctttaaattagtgtggccatttttctaatggagcctcattttattctcctaggtaaacttcaaaaaaatttagccagggagaagcagaggagaaatacttaatggaaaaagtataagcctcaaaggcacaagagctttaagaataggctcagccatgtgctaactgagtgaccttgaacacgtcatttaatctcagtgaggtgcatctgcaaaatggagataatgccccttaccttacctagtgaaagaagttgccatgaataccaacttaaatacatacgtgacagtgttcaacaaaagtaagtaattaaaaagacaaaacagccattaaaaattaacatttacatttcctttttccaaacaatctcatgtgttgggactctatctgaccaaaaaataagcacctgtatagaaggaaacagttcagcgggtccaagaaggaaacagttcagcgggtccaagaaggaagggaaagagggagaaaacaaacttgaaaattatttga

SEQ ID NO: 551583 - DNA, 1481 bp, Homo sapiens
ttgtttgtttgtttgttttagtagaaatgggatttcaccacgttggccaggctggtctcaaactcctgaccccaggtgatatgcccgcctcggcctcccatagtgctgggatgacaggcgttaagagtaaacatttttaaattggcctctcatttagatataaggcaggatccctgaaaaaatctccctcaaagcaactgttgctaaataactatagctatgctagtgcaaattttcttttctcttgaccacaataatgactacataagtgcaaatttttaatatgtagcttaaaaatccaagggtcacactatttaggacagaacagattccacagtatagtttgtgttacatgctttactggctgtcactatggatagcacactatttctttgctctcattattctcccaatacaccctaagagctaccttctctgtcctagtcccccaaaacacaaagtcctgttcataaagtcgaaaaagggctgctcttactcggaaagggctgagagataatctggtttttcaccacaatgtgagggacttgtgatttaatttgaacagcttcccgagagagctgtgcaaaaatttctttacataagagaacattctgtgccgcttctaattttgtctgccaatgtggggaacctgaaagacaagaaatatatgtatcaattatctaaccatattatgcattaactagtttaaatggtgatctgaatacatatgacaaaagtttaggaaaacactacattacggtatattcttttttttcctattcagtctctatagagactgtcaaaaattgccaatgccaactgtgttacaaatcatcccggcagggtattgagaagttccccaccaccccaatctttcattcctgaagaggaaagtttaaattcctgtagagggaagtatcaattagcaataatcatgccacagataaacctcactgggtttgatactgccactgtgcaaagctatattctttccaaaatataaaaatctcacttctttaacacaaaaaaccagtaaataagtccaatcttaaaaaaaggtgctggtggctcatgcctgtaatcctagcactttgggaggctaaggcgggtggattacctgaggttgggtgttcgagaccagcctgaccaacatggagaaaccccatctctactaaaaatacaaaattagccaggaatggtggcgcatgcctgtaatcccagctactcgggaggctgaggcaggagaatcgcttgaacctgggaggtagacgttgcggtgagccgagactscgccattgcactctagcctgggcaacaagagagaaacttggtctcaaaaaaaaaaaaaaaaaaaaaattgcacagctattcactaatagtttattgataaattttagaagtatattttgaattgttcttacttcaaactatctatttttcctacctatatttatcttcagtttattttaaaatgtcagctc

SEQ ID NO: 551584 - DNA, 881 bp, Homo sapiens
ctttaataaatgtcctcccattttcccccagccaagaaggaaagctcaagcagcatgtatcatctaagtgactcaccagccaaacttgagcagatggaggtagcccccaaatctagttgaaccaattctattctctcttccagagcttcagaattgtgatttaaaggtgacagctcatctgctctggtggctgaagctggactttgccaatcggggagccacaggatgtccttagtctttttgagtcaactaaggagtscccaaatctgattttcagggagagggaaagaagcagaggtgccaatgggagcaaggattggaaactaagcatgcatgctgggttactgctcacattccagatctttatttctgatttccccatggtctaggagtgacattcctggccttgggctttctcaggaattcttgtattcttataataatttccttatttttgcctaatctagcacagggtgatttctatttgttacaagcaaaatggccttatcaaattaatacactggtgtagagagccagtgggatggagcgaaggatgccctatcatcttatggagttgattaggcagaaaaatagccaattggaaagcccgttcatcattggtggatttccattcactgatttcgcttaggttcccaaatacctgaaaatactcaaatctaatggacatttttcactctgacttttttgagctctctgcacatcttactcaattctttcttttttcctacaacagcatttctatttgctttatactttaatatgtgtatggctttaagttataattgatgtataataaactgcacatatttaaagtgtataatttgatgagttttgatatctgtatatgtctgtaaaaccat

SEQ ID NO: 551585 - DNA, 637 bp, Homo sapiens
acaaggaattcccaaactctccctaaagtattaatcttgagttcctgagaggcagagcttgtcacagaggcttgcaggggatcttaatgacctggcaagagagtacctgttatgggatgataactagacagagaaatgcctccaggtcattgatagcaggaagtgcagtggagactcgactcctacaccttatatatataacaaggttaagctgagactcatccaacacatgatctctatttctcctcatccacccaccccccaccttaaacaaatgcaaaaggaaagaaatgtgaacagttctttaaaaaaaaaaaaacactcttggcaggaaasttttcaacaataactttaccattgcaaaaagcaaggaattacatattctttttgactgaagcatgaggtttcaaagaatacttatgagagttgatcaagaatccatttaatatgcatgactgaacaattagataaatattttagctgcatttattttttttctttctgtccttcatttattgtaactatgtgttacattctaaagactgtccttttgtgcttacagtctgtcagtggatttttttttggagggaatgatctttcaggaactctgaaataagcattgaggtattgcagtcaa

SEQ ID NO: 551586 - DNA, 625 bp, Homo sapiens
cagacaaattcatgtcagtgtcagcattgacgatattctcccaagagggaaagtctttagagaagatgtcatcatcatttacaaggcaaaacatagaggtgggccatggagagctctgaattcttcccactgtgcaccacctgccgagaggctctggctcctgcctcctgtgcctttggtccacgctgcatgctggtgtgggtggsgagtgaagagtggaggaaactttcataggggcaaggcccacctgtctctgtggaatatgattcacatagttgtaggtagatgctgaggaggcccgggtagcacaggaagtaccagaccctgagcacctaccattaccaggcccctcgctgaccttcacaacactcactgagcggggctgaggaagccgaagggcctttgtatccattacaaagataacaggtagaagagctgggaatgaaatacaagtcctgtggctgctgagtcctagaggctggggacggtgaggggagaggctttctaaaggaggtgaggtgcaggcggtggggacacaggcagtgtggggtgcagtgtcaggagggatgagtgggggttgaggtgagaggtgaggaagagaggttgaccaaggctgggagatgca

SEQ ID NO: 551587 - DNA, 2189 bp, Homo sapiens
atgaacaggcaagtgcatttgttaaaactgccccagcacattgattttaggaatctctgcattattgatctgataggatgaaatgcaatggggatccatttaaaccaagggcttttattttcagctttcatttcccctcagttctctcaagaacagaagcaaggggaatctctgtctacatgggctagtgtgcttccccttgggccctttcagactgtggagttcatatgacattctgtttgctgcaggtcctgcagattawcatagaacttttagcttcgaaagtgaactttgcaatcattagacactatatatgtgtttgaaaaatgtgcacatagatcaagataggatctgatgatttcgatatggttaaattttccctcttatcccattgttaccgctatatccattatttctgaaatgttccatattcctattgttgtgtatcaaatcaccccaaatttagtagcataaaattataaccattctattatgcttatgattcatggggccaggtatgtgtccagggtcagtgggaatgacttgtctgtactccacagtctgagaactcagctgggaggactccgacagctgatggggagcaggggtaactagagcaattgaggactgaaacagctggggctggaagatccacttccggatggctggactcggatgggactgttagccagagtgcttactagtggcctctccagcatggaagccttagggtagtcgagggctctttacctggtggctctgtttcagcaaacaaggcacaagctgcatgttcttttatgactgaaccgtggacattacatagtgccacttccgatagattctaatgatcaaagcagtcacaatcctgcccagatgcaagtggagggcacagacaccgcctcaaggggaacagtgtcagagaatttgtagcagtttttaaaaactgccgcacaaagaaagctgaatttatacaataattttctattatcagggttaaagatagctggagtaataacatttattaagcacctactatgtgctagttaatcaattttatgagggatgtcctattattatctccatctcactgaagaggaaaatgaggtgtagcgaggttaaggaactggtcacatcctaatgaacatgagaatggagatttgaaccaaggctgtctgactacagcatgtaggagcttagccactggcctatagaattccccctcagctaactagagtaaggccttttaagaactgttaaacaaacattttaaagctataggcactcaccaaatattaagaaatgttttgaataaaattgttactaaaattgatttggtggtcttgaacccatggtaattgacaaaaatgtctcacctctacatagacacctgtacattggcagagtattttcctaacaggattgggcaaacttgaactggcagagctggaaccctccccacgaagaatgaggtgagtcactaggcctgagggttactggattgtgactgttgggaaatcagacattcctccttggctctcttctttttttttttttctttaagagagacagggtctcacagtctcactctgtcacccagcctggagtgcagtggtgtgatcgtagcccactgcagcctccaactgctgggctcaagcaatcctctggctttggccagagagtagctaggactacaagcacacaccaccacatctggctaattattataaaattttgtagagacaggatcttgctgtgttgcccaggctggtcttgaaatcttggccccaagaggtcatcctgacccggcctcctgaagtgctgggattacagatgtgagccactgtgcctgccccagcctgtccttgactcttagttggatatcattccatagtttagaaatgttttttcatccacagtttggctgttatcaagacatattctaatgtaaagttgtttcacctttcaggacgattagaaagtagatagctaaaacataaaaatacaaagttctcatttcctgaagtcaattttcacacatcagaccaagttatctggtgggctcatgtgctacaaaaaatataaaattacaaagagatgcacttctgtgatgaattaaaaacctgtgtcctgcaggagccctgctttttactaaaatacctcagcatgcagctgagagtataactcttggg

SEQ ID NO: 551588 - DNA, 640 bp, Homo sapiens
atggtgtgaaaccacttgagtgagttaaagcactgttctctaggtgacaaggctctagtgcacattttcagagatggggtctggttcctcctgaccccccaggttctggtgtccacggtccccagttcccacagcctccttctgcagcccctgatgcctgttctaggggccgagggctagaggtctggctgccagggtgaggtggtgcttcttagaatagggtcccttgtcttctgctgcttcccagacatggagatctctttgatcatggaagatgggctaaagatgcttgtatctttgaatttttggttatagtccttttggacctcgggrcatggaagacagaagaagaactggcttattcatggggaggcagcacagacatccaggctgctatttttacacttggaaaatggatgagagggaggttggttaaatgatctgttaggaacctcctggctgagggttggctgcagacatccctggtgcatctcctgcaggaggcaggcttctctgggtccctgtccacccagaggattgcaaaccccacaaagcccaagcccagaaagatttgagtgaccagccccttagaaaaatcaggatcagagaaggaaagtggtttacccaagaccacacagga

SEQ ID NO: 551589 - DNA, 640 bp, Homo sapiens
atggtgtgaaaccacttgagtgagttaaagcactgttctctaggtgacaaggctctagtgcacattttcagagatggggtctggttcctcctgaccccccaggttctggtgtccacggtccccagttcccacagcctccttctgcagcccctgatgcctgttctaggggccgagggctagaggtctggctgccagggtgaggtggtgcttcttagaatagggtcccttgtcttctgctgcttcccagacatggagatctctttgatcatggaagatgggctaaagatgcttgtatctttgaatttttggttatagtccttttggacctcgggacatggaagacagaagaagaactggcttattcatggggaggcagcacagacatccaggctgctatttttacacttggaaaatggatgagagggagrttggttaaatgatctgttaggaacctcctggctgagggttggctgcagacatccctggtgcatctcctgcaggaggcaggcttctctgggtccctgtccacccagaggattgcaaaccccacaaagcccaagcccagaaagatttgagtgaccagccccttagaaaaatcaggatcagagaaggaaagtggtttacccaagaccacacagga

SEQ ID NO: 551590 - DNA, 1588 bp, Homo sapiens
tgcctgcggtaggtgggcggggttggcatccccatctgtggataagggagcagctctgcagtgtttcccaaggtcatgtggcagatacccggcagagccaggggtgggagccaagggccggctctgtgattctgagtccagtacttcttatccctcccatgtgggagccccagtgtgcagggacagggccacaggtagagaaaggagctccagactgggaatcttaagktctccacttcatgcttagcccaagctgcctgtgccacctgccatctcttgctctctctgcctcctctgaaaaacgcagtgatctcaaagttcttctcatgcacagtgatattgctctggggtaacagactggagtagagggagccttgaggcagtccaggttgaaagatggtgcagggagcttcatgtgacactttttcggatgccagagtgccaggcagattctccctggccaggcgctgctgtaccagaaaccccaggcctgcctgcaccccactgaggagcagaggggctggcctgtgtgagggatggagccatggcagtgggtctcaatacactggaaccccctggagaactgaagaaaccctgatgcccaggctgcaccccagaacaactcatcagggtctctggcagtgggggccgggcatcaacaactttcagaactcctagggtaattcctgtgtgcagccaaggctggggaccaccactctagggcatttaggagatggcagaaaaaaccttggccctcaggtaggctttccagggcctgtgacctcctgaaactggaaggaagtatgtgcctgcccgtctgtgtgcatctttctagggagagttcacagcttctgtcagcttttctgacccaaaggagattaaaatccttacttgaacccaggcatttgagacaagtctgggcaataaagtgagaccccatttctacaaaataatcagccaggcatcgtggcgtgtacctgtggtcccaactctatgggaggctgaggcaggaggatcacttaagcccaggaggttgaggctgcagtgagctgtgtttacaccattgcactccagccttggtgacagagcagagtgaggtcctgtctcaacaaatatatacattttaaaaaatcctgtcttaggaggaagcaacccatctctaccccaatccagcgatatcattctaaggatcagaaacctccagctgcaggatcaattctggtctaagaaatctttcctgatctctctagacctcccttttctctcctgcttcctaaaaacatacattgagagcttcttatacacaaggcactgttctaggctctgggaaacagggtgagtggcacaggtgcagcccctccccttgaggagcccatattctagtggcggatgcagatacactagtgaacaaataggctaactgcagtgagggtgccgtgtaacaacccagatgtcaactcgggctgcttctttgagtctcctggggagcccagccctacccctagagatcctgatgacttggttggggcagggggcctgggcatggcctatgttgattgtaatgaggagctggagttgaggccttctg

SEQ ID NO: 551591 - DNA, 1588 bp, Homo sapiens
tgcctgcggtaggtgggcggggttggcatccccatctgtggataagggagcagctctgcagtgtttcccaaggtcatgtggcagatacccggcagagccaggggtgggagccaagggccggctctgtgattctgagtccagtacttcttatccctcccatgtgggagccccagtgtgcagggacagggccacaggtagagaaaggagctccagactgggaatcttaagttctccacttcatgcttagcccaagctgcctgtgccacctgccatctcttgctctctctgcctcctctgaaaaacgcagtgatctcaaagttcttctcatgcacagtgatattgctctggggtaacagactggagtagarggagccttgaggcagtccaggttgaaagatggtgcagggagcttcatgtgacactttttcggatgccagagtgccaggcagattctccctggccaggcgctgctgtaccagaaaccccaggcctgcctgcaccccactgaggagcagaggggctggcctgtgtgagggatggagccatggcagtgggtctcaatacactggaaccccctggagaactgaagaaaccctgatgcccaggctgcaccccagaacaactcatcagggtctctggcagtgggggccgggcatcaacaactttcagaactcctagggtaattcctgtgtgcagccaaggctggggaccaccactctagggcatttaggagatggcagaaaaaaccttggccctcaggtaggctttccagggcctgtgacctcctgaaactggaaggaagtatgtgcctgcccgtctgtgtgcatctttctagggagagttcacagcttctgtcagcttttctgacccaaaggagattaaaatccttacttgaacccaggcatttgagacaagtctgggcaataaagtgagaccccatttctacaaaataatcagccaggcatcgtggcgtgtacctgtggtcccaactctatgggaggctgaggcaggaggatcacttaagcccaggaggttgaggctgcagtgagctgtgtttacaccattgcactccagccttggtgacagagcagagtgaggtcctgtctcaacaaatatatacattttaaaaaatcctgtcttaggaggaagcaacccatctctaccccaatccagcgatatcattctaaggatcagaaacctccagctgcaggatcaattctggtctaagaaatctttcctgatctctctagacctcccttttctctcctgcttcctaaaaacatacattgagagcttcttatacacaaggcactgttctaggctctgggaaacagggtgagtggcacaggtgcagcccctccccttgaggagcccatattctagtggcggatgcagatacactagtgaacaaataggctaactgcagtgagggtgccgtgtaacaacccagatgtcaactcgggctgcttctttgagtctcctggggagcccagccctacccctagagatcctgatgacttggttggggcagggggcctgggcatggcctatgttgattgtaatgaggagctggagttgaggccttctg

SEQ ID NO: 551592 - DNA, 1588 bp, Homo sapiens
tgcctgcggtaggtgggcggggttggcatccccatctgtggataagggagcagctctgcagtgtttcccaaggtcatgtggcagatacccggcagagccaggggtgggagccaagggccggctctgtgattctgagtccagtacttcttatccctcccatgtgggagccccagtgtgcagggacagggccacaggtagagaaaggagctccagactgggaatcttaagttctccacttcatgcttagcccaagctgcctgtgccacctgccatctcttgctctctctgcctcctctgaaaaacgcagtgatctcaaagttcttctcatgcacagtgatattgctctggggtaacagactggagtagagggagccttgaggcagtccaggttgaaagatggtgcagggagcttcatgtgacactttttcggatgccagagtgccaggcagattctccctggccaggcgctgctgtaccagaaaccccaggcctgcctgcaccccactgaggagcagaggggctggcctgtgtgagggatggagccatggcagtgggtctcaatacactggaaccccctggagaactgaagaaaccctgatgcccaggctgcaccccagaacaactcatcagggtctctggcagtgggggccgggcatcaacaactttcagaactcctagggtaattcctgtgtgcagccaaggctggggaccaccactctagggcatttaggagatggcagaaaaaaccttggccctcaggtaggctttccagggcctgtgacctcctgaaactggaaggaagtatgtgcctgcccgtctgtgtgcatctttctagggagagttcacagcttctgtcagcttttctgacccaaaggagattaaaatccttacttgaacccaggcatttgagacaagtctgggcaataaagtgagaccccatttctacaaaataatcagccaggcatcgtggcgtgtacctgtggtcccaactctatgggaggctgaggcaggaggatcacttaagcccaggaggttgaggctgcagtgagctgtgtttacaccattgcactccagccttggtgacagagcagagtgaggtcctgtctcaacaaatatatacattttaaaaaatcctgtcttaggaggaagcaacccatctctaccccaatccagcgatatcattctaaggatcagaaacctccagctgcaggatcaattctggtctaagaaatctttcctgatctctctagacctcccttttctctcctgcttcctaaaaacatacattgagagcttcttatacacaaggcactgttctaggctctgggaaacagggtgagtggcacaggtgcagcccctccccttgaggagcccatattctagtggcggatgcagatacactagtgaacaaataggctaactgcagtgagggtgccgtgtaacaacccagatgtcaactcgggctgcttctttgagtctcctggggagcccagccctacccstagagatcctgatgacttggttggggcagggggcctgggcatggcctatgttgattgtaatgaggagctggagttgaggccttctg

SEQ ID NO: 551593 - DNA, 1176 bp, Homo sapiens
taaaagtgtatttttctttatactgggttgtccagtaactattcctaacctccttccccatcctcttccttcctcagtgctcatcttcaaactctatcagcgggcaaagcatgtgtacagcgaggctgcgcgagtgctccagtttaagaagatatgtgaagaagcacctgaaaacatggtccagctgctgggagagttgatgaaccagagccacatgagctgccgggacatgtatgagtgcagctgccccgagctggatcagctggtggacatctgtcggtgaggcagcctggtgggggccaagggatgccatcaaataatattgtttaaattaatggaaaaaaatgcaacatttcataatctacgggaatgaagatcattccccacttcctatatgaggagtctctgatgatacagagctacacttgttcccttctaaatacctgtaggatgaaagatttgctacctggctccatgattttatgaggctctgggtttggagtcagtttggagtcagctctttacatcatgagaaagacctttccgtctttggatgattaggcctttcaggatggtaactttgctcagagctgggccctgttaactttcttatgatatgttttattatactgctgctctgccagaaactcctgtccagtgtcctaattaagtttagtagttctactcagaagaagggagaaaactgacagaggatctcaagcttgatgggagcatgtggggagatttgctgaaggaatcacccagaaagccagcatttcctgccttctaggtttagtttaggcagtttgaggaaataaaggctgaagaaagcccaggtgatacatggttaatagaggcagaaatgtaaagaggacaactctttcacaaagcctaaaatcagctttcctaaaattgtgaaagaatggagataacagagttagtcctcttacccaggaaggagctcagtgaccctgggagaactgaaactgggaaagttctcaaacgctagatgttacttcactgtgagaacacaatgctacactacaattagtaatggaaatgtaattaaccacttggcacttgtggcttgcctcagtcattgccacactcccagcctgaaaagtttaaaccaagtractccagtgatcacaaatggcctgggtaatccagcttgtc

SEQ ID NO: 551594 - DNA, 1413 bp, Homo sapiens
gacaaagatgaaaacttcgtgaggaatgcaaatctatttctagaagagaaaatacattggaaagtgatgaatatatgagaatgtcacgtcaaggaatgctgactaaagtacacccagaaatcctgattaatactgaaattcaggggtaaatgataagatattaactagcagctcactgtacaatgaaatactgagtagggacaagttgcactgaagtacattaagtttaaataactttattttaagaacaactcaatgctaaacctggatgtaatatgtgagatgatgtaatactcatataaaacaaaagtgtcgtgtcaaagaggtttgattttcatttgtggaattgtttttatatgatttgtatgacttggaaagcaaagtcagtttgatgtttgttcttttagttatagctgcaggtataaataacaatatttttagcagaagcatctttgaataaaacaatgaataatgtgttttatggttcattaaccatgttaatacatattttgccagtcaatttgaaaaaacagattaaagcagggtttactgatttattttacaaaacttgatcaggaaataagagcatgttttgattacagtgtccaaccttacaacaaataaattcttttattctttgcatttttatatgccagattttctttagcatttctctcagatattttcctagtcatagtagtcttttatttgtttgtttaaatttttatggttcaggctgggcgcagtgggtcacgcctgaaattccagcactttgggaggctgaggcaggtggatcagaaggtcaggagttcaagaccagcctggccaagatggtgaaaccctgtctctactaaaaatacaaaaattagccgggtgcagtggcaggtgcctgtaatcccagctactcgggagactaaggcagaagaatcacttgaaccagggaggcggaggctgcagtgagccgagattgcaccactgcactctaacctgggcracagaataagactccatctcaagaaaaaaaaaaaattatggttcaatacaaatcaggatgatttaagacaaattacatagcaataaaatacattgcaaaacggaaaagtgattttcctcattatcctaattattacttcaaacgctttcaattaggcttttaatatcattaattttattcttgatttttgttttaatttcttttttcatttagttctatatattaagaataaatagataaagcaattaagaattcagaaagtcaactaaacgaagacatgagccaaagggaaacttccaagaaccatgtaaagtaacttttatgaaaggcaatacatagacatgaacacctctcttactttttatccaactacaatgcatccacagtccgtttttcaaattctattgtggtctagcagc

SEQ ID NO: 551595 - DNA, 1040 bp, Homo sapiens
ggcgattctcactgcaggctgccctgtggctgatccaggagcaaggccttaaccatgtcatccccaagcgattgcttgtaaactttcttctgtgcagccttcaacccttattatgattttcttctcaggaaccaaactgctgtattcaagaaaggcagctttgtgtaatcatttatcataaatatcttaagaaaaatcctagagattcctaattttaggaaatgggagacctatggtactgatataatgtgggctgggcttgttttctgtcatttgctagataaatgaacttgagagcctactgtaaaatgtggaagcttctagattgcagaagggctggaaagacactgttcttttctcccgartgatgggatctgtccagtatttagagctgcctctgaggccatctgattctaggagactctgcctcgttgaggatattttgaggcctaactacacattcctgcccccagagaggtcacagcctatagcaggctgatgtttctcatgtcacatggcacagaaaggcacattttcgttctcaggctaacaaagagcttcaaaaactattagaagggacagtggctataagagaagaacctcagtcaatgtgtgaaattaactaggaacctggctcctgtttcttttaggtcatgtttttcagcttaggtaaaactagaggctttgataaagcatgacctctagaaatcattgcttttcataaatggaagtgggtttgagttttttctactgattgttagtgcaggtgatgtctacatgcccccagaacatattccatgcaacaaaaaaagcccaggtcaccgtctttgctgggaacttgacttttgtgctcactgaattttaagctttctgacagcagcctggaatcatggagggataaagtacctattagtaagatggaaaaaggtgtttcaggttggagctgcagtctgttgagagtaagctatgggaaggcctgtatacgaggggtggacttttcttctgtaagtgtccagagaccaggcctcctgaagagggca

SEQ ID NO: 551596 - DNA, 1040 bp, Homo sapiens
ggcgattctcactgcaggctgccctgtggctgatccaggagcaaggccttaaccatgtcatccccaagcgattgcttgtaaactttcttctgtgcagccttcaacccttattatgattttcttctcaggaaccaaactgctgtattcaagaaaggcagctttgtgtaatcatttatcataaatatcttaagaaaaatcctagagattcctaattttaggaaatgggagacctatggtactgatataatgtgggctgggcttgttttctgtcatttgctagataaatgaacttgagagcctactgtaaaatgtggaagcttctagattgcagaagggctggaaagacactgttcttttctcccgagtgatgggatctgtccagtatttagagctgcctctgaggccatctgattctaggagactctgcctcrttgaggatattttgaggcctaactacacattcctgcccccagagaggtcacagcctatagcaggctgatgtttctcatgtcacatggcacagaaaggcacattttcgttctcaggctaacaaagagcttcaaaaactattagaagggacagtggctataagagaagaacctcagtcaatgtgtgaaattaactaggaacctggctcctgtttcttttaggtcatgtttttcagcttaggtaaaactagaggctttgataaagcatgacctctagaaatcattgcttttcataaatggaagtgggtttgagttttttctactgattgttagtgcaggtgatgtctacatgcccccagaacatattccatgcaacaaaaaaagcccaggtcaccgtctttgctgggaacttgacttttgtgctcactgaattttaagctttctgacagcagcctggaatcatggagggataaagtacctattagtaagatggaaaaaggtgtttcaggttggagctgcagtctgttgagagtaagctatgggaaggcctgtatacgaggggtggacttttcttctgtaagtgtccagagaccaggcctcctgaagagggca

SEQ ID NO: 551597 - DNA, 1064 bp, Homo sapiens
cagaattctagagtctggcattgtggccacgctgtcaacacttctgtcgtggccactgagcacttccggcagtgcagtcacattgagaagccaccagcaggccgtgtagttattcctggggcctgataccacaacctcatggccactttaataacagcaaaggaatcaagcaaygtctttagtcagttatttcatcagtagcactcttctggaaaatcaagatgccactctcctctttccctgtggccacaagtgtctgtagcaattagggaaacatagaaatggacccctgcccttaagccgttttactgccagaggtttggaggtggggtggagggaggtgtgggaacctcacttatctaatgtcattctcaaccctatcttccagctcatccagacaggaaagggggaagccatccgcatcaggtccatcctgcgctccctggtccccacagaagacctggttgggatcatcagcatccccttgaaactgccctccctcaacaaaggtaaggggagtgactgcaggctgcagcagcagtctcccagcagccactggctcggggcaggactctgtccccagcacagtggcccccaggccctgacttgcagggcgggctgcacagggcaagtgtctcactctttttcctgtgatgagttttctcctctaggctctagccagctgctctcttgtcttctcaagaagcaatctcaaaacaataaatcgactcctgattcctagcatttgcccatttctgtggtataaactttctcaccatgaccaatttcaagccaccaatgtaatgtcactgaacacagagttgggaagaaaatggacatggcacaccattagattgtattcccaaccacacaaatacaactgatgcaaaaaacctcaagagtatagttcatagtgaaataatttggaagtaatgacttcaatctgctctcttgtctgtgtcaggacaattgtaccctgtgtcccacagggtacagacagaccttgctgtcctcctatgagcatgccaaccctctgagggaggctgatggaatgggacaagcga

SEQ ID NO: 551598 - DNA, 577 bp, Homo sapiens
tttcccacttagaacttcaagagagaagagcaaaattttgtgattcagaatgaaattaataatttggcatttttaactggagacagcaaaagcaagatgtcaaaagtaagtccttagaaatcaattccaaaaactcttcaaccctaacctcagccatgacttggatctgtttcatactttctggggattaacaccgtactgcatttaggtcaaactacatgaccaacagtctctgctgctgtttctttgagaacgagccagaagaaactgctctcaaataagcatggtcatcacattttatgaataaatagctgcttgtatgtcaaaaagcttaagtttcaagacttgcctaaggcatttgagaggtctccaaaacaaaagctgctgttagtgattttaaaatagaactwcttcctgtgtagtgaggatacagcaatacacatgcctagaaccaccttttgatagctaggaaaaaattaccttgctttgtagattttgacagcacgtactcttacatcatgcttgttttcctcctatctgtaatatccaatacctgttttatttcagctgtgttgat

SEQ ID NO: 551599 - DNA, 1603 bp, Homo sapiens
ggtttacaaaagagtaagctaataacgtggtcttgaatgtggccacatatacatgtctcttcatttgctccttaatgattaaaccttcccaccctctggtatccggaaagcatctctgattgccctgttcttcctagaagccatctcagtccataaatccactgggtagtgcacatctgctttgtccaagacaaacaatggtctgatttctctgtctcttgcagcatcgagctccctttcactgatttcaatacaacacagctgttctgataatgatatagccaggtacgaggaaaactgcacagagtgttatggctcctacctgaactcccaagagctctgagaccctgagcccaacacatcttcaatggagacctcagttgcctcattgaagcagaatgctggaccagctctgataatctctgacttaagttctttctttcttttttgagatggagtctcactctgtcacccaggctggagtgcagtggtgtgatctcagctcactgcaacctccgcctcctgagctcaagctattctcctgcctcagccttccgagtagctgggattacaggcacatgccaccatgctttgctagtttttctatatttttagtagagagggggttttgccatgttggccaggctggtctcaaactcctgccctcaggtgatccacctgccttggcctctcaaagtgctgggattacgggcatgagctaccacactcagccttgacttaagttcttttgtttttgagatggagtctcactctgtcacccaggctgaagtacagtggcacgatctcggctcactgcagcctctgcctcttggattcaagcagttctcctgcctcagcctccccagtagctgggacaaaaggcacccaccaccacgcctggctaatttttgtatttttagtagagatggggttttaccatgttggccaggctggtctcgaactcctgatctcaggtgatccaccctcctcggcctcccaaagtgctggaattataggcgtgagtcaccacactaagccttaagttcttaatacatgaactcctgtgtcacttggcattgggttctttgcagatagaaacccctggatcccccaggcccagcacagggcctggtcatctcaggtccccctacakgccagtgaagggatcctgtgattataagagggtagaaggtaagctgtagggcagggggtgtggaggaagaggtcttagggcaaggcctttaagaagagggaagtggaggttggaaaacatggggaagagggagggcataaggaagagatgttattccattctgctttcaacataatatcacagctctgtttattctgagaagcaaccagctgcagctccaaaatagagatgctgagaaatgcctctgatgacagagactgctgctgagggaacaaggttagaacagcccttcacaagggctggagtgagagaggtcctgagaggggagacactcctggatctctttccacttccgccctgcccacccctgcttcctccttcctagcccaaggcagccctagttcttctttccagggtctccggggcccagggcaggcacatgacagagca

SEQ ID NO: 551600 - DNA, 1565 bp, Homo sapiens
ccagactcagttctttttcttctcctggctgcttacttttactgccttagtgatcatacctagcctcaggctttacatacaatctgtgctgctgattcattcttttgccttgtaccttcagattcttcctccagcctcctcggcctagttcatgccacaggaagctaaggctgcagatcacgctacccaggcccccgtgccaactggctcctgtctgctctgcccatagacagaaactgcaggagcgggagttttccagggttctaactctcactgcttcagacacactgttccctctcggcttcttcaacccgaaacgtggtaatggcttttccacctctgctgttcgctgggtgcccaccattccttgtaaatcccttctatcctgccaacatccctttagacagccccygatttgattcttttccgttggagcttttgaatgtgtccctgtttctgcaggagctggcctgataacgctagctgtgtgcagatgactccggggcctgcagcgtccgctctgatgctcagacttctcttctaaactccagagtcatggatcaaatggaatacttaaaaacttcctttgggtgcctaatagttatttcacatatcacgtgtttcaacgggagcatctgatattgaccccaaacctactaatttctttgtcttccccttctcagtagagacaacaccatcctttcagatgttcattcccaaattcctaggcatctctgactcactcctctccttctctctcactctgcatcctacatcaaacccatcaaggaaacatattggttctaaccttaaacgaaatgcagaatttgagcaattttcctctcatgtccattactgctacctcagggcaagccgccgtccttttttgcctggacattgtgatgacctcattatgatgggtttccttgctttctctcttgtctctcaacggcacaacagccagagaaattctttgcaaaaagtaagctcaggccaggcacaatggctcatgcatgtaatttcaacactgtggaagtcccaggcaggaggatggcttgaggctaggagtttgaaactagcctgcaaaacacagtgagaacccatctatacaaaaaatgtaaaaaattacccaggcgtgatggagcatgcctgcagtcctagctgctcaggaggctgaggcaggaggattgcttgagcccaggaggtcaaatctgcaatgaggactgatcaccacaactgcactccagcctgggcaacgaagtgagaccatatcttatttaaacaaaaaagaagaagaaagaaggaaaggaaggaaggaaagaaggaaggaaggaaggaaggcaggcaggaaggaaaatgattggtccatgaagcagtatagcacattggttaagagaaagactgaacctggaattatgctaccctgtctcaaaaacaaacaaacaaacaaaaaaacgaaataagtttgggtcttgccacttccctgctggggaccttgcaatagctccccattttccactatggtctaagagtcccttcgtgatatagatgcttatgatcctctg

SEQ ID NO: 551601 - DNA, 1565 bp, Homo sapiens
ccagactcagttctttttcttctcctggctgcttacttttactgccttagtgatcatacctagcctcaggctttacatacaatctgtgctgctgattcattcttttgccttgtaccttcagattcttcctccagcctcctcggcctagttcatgccacaggaagctaaggctgcagatcacgctacccaggcccccgtgccaactggctcctgtctgctctgcccatagacagaaactgcaggagcgggagttttccagggttctaactctcactgcttcagacacactgttccctctcggcttcttcaacccgaaacgtggtaatggcttttccacctctgctgttcgctgggtgcccaccattccttgtaaatcccttctatcctgccaacatccctttagacagcccccgrtttgattcttttccgttggagcttttgaatgtgtccctgtttctgcaggagctggcctgataacgctagctgtgtgcagatgactccggggcctgcagcgtccgctctgatgctcagacttctcttctaaactccagagtcatggatcaaatggaatacttaaaaacttcctttgggtgcctaatagttatttcacatatcacgtgtttcaacgggagcatctgatattgaccccaaacctactaatttctttgtcttccccttctcagtagagacaacaccatcctttcagatgttcattcccaaattcctaggcatctctgactcactcctctccttctctctcactctgcatcctacatcaaacccatcaaggaaacatattggttctaaccttaaacgaaatgcagaatttgagcaattttcctctcatgtccattactgctacctcagggcaagccgccgtccttttttgcctggacattgtgatgacctcattatgatgggtttccttgctttctctcttgtctctcaacggcacaacagccagagaaattctttgcaaaaagtaagctcaggccaggcacaatggctcatgcatgtaatttcaacactgtggaagtcccaggcaggaggatggcttgaggctaggagtttgaaactagcctgcaaaacacagtgagaacccatctatacaaaaaatgtaaaaaattacccaggcgtgatggagcatgcctgcagtcctagctgctcaggaggctgaggcaggaggattgcttgagcccaggaggtcaaatctgcaatgaggactgatcaccacaactgcactccagcctgggcaacgaagtgagaccatatcttatttaaacaaaaaagaagaagaaagaaggaaaggaaggaaggaaagaaggaaggaaggaaggaaggcaggcaggaaggaaaatgattggtccatgaagcagtatagcacattggttaagagaaagactgaacctggaattatgctaccctgtctcaaaaacaaacaaacaaacaaaaaaacgaaataagtttgggtcttgccacttccctgctggggaccttgcaatagctccccattttccactatggtctaagagtcccttcgtgatatagatgcttatgatcctctg

SEQ ID NO: 551602 - DNA, 1265 bp, Homo sapiens
actagactctaagttccagaaagacattgattacgtgtattttttaacctctggattcctatcatctagtataatgtttgaaacatggtaataacttaggaaatgtctacggaaggaatgaatttgtctgaggatgtagagtaaatcatggcagggctctcgtaacaaaccagctgacccggttcctggtgctctttgtccgaactatgtaacccatgtatagtaagtttgaaacaacttgaacttttagggtactttgctctgcatttggaggaaaatattcagatgcccaatatgccagattatacattttttctgccactacacttatgaacaaagatgttttgagttgctgattaaggaaaatagctcccttctctctgaaaagcatttcacctctatgggagtgggtgatactggatttcatctaaaaatattatagaggtcagcaacactagagaacattatattatatatatatatatatattatgatttgttgctgttggattcaaaatttgagaatcccctggagggtagtttgatttgaccagtttgattggacactttgtggtgtaatcatcaatatcatcagccattttgggtctgcagtggtcacacagttgcatgacagatgtcctgaaaaaatgtccattgcttgttgtcagcatcgtctccaggttcattattgttattctctgtgttgccattattagtgttcttgggctcaactttacttctaggagatattccctttattaatgcttttctaatgacacttctttccatcaccattatcaactgagacccccccattagagcttttttagtttttctgatggtaaaatacctttctttgcttttgtcctgggaaatatgttttaagaataaatgcaattaattagagatttaagtcccacagaggaaagcttctctatggaacaatttgtcttgcattatttctctaatttatcatattgtttagtrcatatttcttgagagcttcctagttgctcagaaatttccgagtactaggattactaaggtgaattccatgtgttttttgtcctcaagaaatatttttatgtagccaaaagagaagggggtaagaacatgtaagtgattagtgttatttattttatatttagtgctaagtgaatgattgggggaaagggataaagaaaggaaattactatttattaagcaccaactttgtactattctaaagggttaaagagtttgtctcaattaattctttatgtaacc

SEQ ID NO: 551603 - DNA, 1265 bp, Homo sapiens
actagactctaagttccagaaagacattgattacgtgtattttttaacctctggattcctatcatctagtataatgtttgaaacatggtaataacttaggaaatgtctacggaaggaatgaatttgtctgaggatgtagagtaaatcatggcagggctctcgtaacaaaccagctgacccggttcctggtgctctttgtccgaactatgtaacccatgtatagtaagtttgaaacaacttgaacttttagggtactttgctctgcatttggaggaaaatattcagatgcccaatatgccagattatacattttttctgccactacacttatgaacaaagatgttttgagttgctgattaaggaaaatagctcccttctctctgaaaagcatttcacctctatgggagtgggtgatactggatttcatctaaaaatattatagaggtcagcaacactagagaacattatattatatatatatatatatattatgatttgttgctgttggattcaaaatttgagaatcccctggagggtagtttgatttgaccagtttgattggacactttgtggtgtaatcatcaatatcatcagccattttgggtctgcagtggtcacacagttgcatgacagatgtcctgaaaaaatgtccattgcttgttgtcagcatcgtctccaggttcattattgttattctctgtgttgccattattagtgttcttgggctcaactttacttctaggagatattccctttattaatgcttttctaatgacacttctttccatcaccattatcaactgagacccccccattagagcttttttagtttttctgatggtaaaatacctttctttgcttttgtcctgggaaatatgttttaagaataaatgcaattaattagagatttaagtcccacagaggaaagcttctctatggaacaatttgtcttgcattatttctctaatttatcatattgtttagtacatatttcttgagagcttcctagttgctcagaaatttccgagtactaggattactaaggtgaattccatrtgttttttgtcctcaagaaatatttttatgtagccaaaagagaagggggtaagaacatgtaagtgattagtgttatttattttatatttagtgctaagtgaatgattgggggaaagggataaagaaaggaaattactatttattaagcaccaactttgtactattctaaagggttaaagagtttgtctcaattaattctttatgtaacc

SEQ ID NO: 551604 - DNA, 1794 bp, Homo sapiens
tttccattttccaagtaattatctgacgcttctggggtttagcagatttttctgctaaatttttattaagatgaaaaaagaaacatttgtaaatagcaccaaaggtaggatgtattaaaaagatacagagatgctcaaaaggcrctgaaataaactctgtttaatttctactggggtcttgcaagcttttggacacccgagtcaaatattaaaacaacattagggattttttcttaagttcagaaacccccaccatctaagcaaaacatttaaattctattttggcctttgttagagttggagcatcatcaaacagtactttttctaatctgacattttagaggttggcaaataatgaccatgagccacattcagcccactgtctgtttttctaaatacagttttattggagcacaaccacacccatttgtttatgtcttatctgtgggtgcttttcacacctcaatggcagagttgagtagttgcaacagagaccatatggcctgtggagctgaaaatgtttactatctggccctttacagaagaagtttgacaatgcctgctttaaataaaatatgcattctattagctggagctaggcttttacagattattaaaatataactaaatccaatccttaactttctgagctgccattactcccaaatatattccatttgtggctgataaaaacaatgtttttttattttctttacctctcaaaaaatgcactgaagaaaacctaacatatcagaagacctgtctatggaaaaatagggggaaaagtctcctaagaacaacctcagagggtttttagaagagcaaacattgcccaatttgttcccaaccagtcccatttctgttggtaaaataagctcacagcttcagtcattactctttgggccagcaagatcaaagatgtgtttatgtgaatgtgccagggaaggagacaaaaagcagaggttctccaccatggctgcatattggaagcacctgggagatgaagacagttcgaaagccaagtccctccccaggccaattaaatcagagtatgtggaaatgtggccagggcagcagaatgttttcaaattccccaggtggttctccattgcaaatagaactgagagtcgctgggttccagtaaggaagggtgctatatggaacaaggacgtcacttaaatttgggggttttcctttccactgtaaaatgagagggttgaaatgaagttctctgaggtcattcccgtctgtgattataagtgcagttcaattgaattaagttaatttccccaaaagaggaagcatggagcattttgacaccttctgttatgaagaaatatgtggaatggaaagtgttcagagcacgaatgggttcactgccgtgggaacatgggaaagaaggcttgacggtatttctgctactactctgtggttcagtacttcagaaagaagagaagccagaacttctctgggacctgtgtcagacgcatgctgttactcctgctggcctttgcaggcacctccagttctggtggttcacttttagttaacagacaataaccgaacacatggtctgaggctcacactgtgcagagagagggtgaagcttctcaagggtgaatattttctctagaggaaaacaatgatgggatagattctggttctgctgcttaccagctgtgaaagatgggatttattcattctctctagacatcagttttctcatctgcacaataagagtaataatcatctctctattctggtatcctacagaggattaaataaaataatgca

SEQ ID NO: 551605 - DNA, 588 bp, Homo sapiens
caaggctggagtacagtggcataatcttggctcactacaacctctgcctcccgggttcaagtgattctcctgcctcagcctcctgagtatctgggattacaggcgcccaccaccasgcccggctaatttttgtatttttagtggagacggggtttcaccacattggccacactggtcttgaactcctgacctcaagagatccgcctaccttggcctcccaaagtgccgggattataggcatgagccgccatacctggcagactttgcaaagttatttaacatctctattatctgagttgtcaggcagggatagtcataacattgtatttactttttccagcagtcacagccagtcgtgacagcttctgacatctccaaaaggaagtgcacctcgtcctttgtagaaatgggatcacagggtaatggatctggaaatcccaccttcacacttaagttggaccctgagatgcagagaataggcaaccactcttcccatggccacatggcttggacagaactggagcagaagccccatttctagatggacgtggtttgctgggagggaggaatattgttaggcacaatgcg

SEQ ID NO: 551606 - DNA, 734 bp, Homo sapiens
tcctgcctcagcctcccaaagtgctaggactacaagcatgagccaccaaacttggcctcaatttttattgcattgagagcccaagacccccatggtaggtaacaaaacgaatacacatctctttaactctttgttctcagtcctytttctggtttcctcttcacaggcatactcctagtgcaatacaaagtttccatcctttgttaatactctccccttatactgtctccatgccatatcttggccaacagccttactttccaacccagtcatctgggaaagaagtatgggggttagcctggacactttcctctattccaaactccacattcaattagtcaccaagtcccatgggcacagcactttttccttataattatgtttcaagagaaataggagagtaacacttgcatatgattaaaaagtatacagcatgaatagagagacagaaaaatggaacagactagacatttccaaatagacccaagtatttacgtgttaaagaaaaatacaaatggaggctacagtttagatataccccaaggctaaccatctttaaccatataaccaaaactttattcatctcgattttctgaaatgctaatttctaatcataaataaaacacaaaacataactttatgtccttgccagtataattcagtgaaattaagccaatcagctatagataaattagcttgaatagcactatttgtcctaaaaagaatgttaatgt

SEQ ID NO: 551607 - DNA, 734 bp, Homo sapiens
tcctgcctcagcctcccaaagtgctaggactacaagcatgagccaccaaacttggcctcaatttttattgcattgagagcccaagacccccatggtaggtaacaaaacgaatacacatctctttaactctttgttctcagtcctctttctggtttcctcttcayaggcatactcctagtgcaatacaaagtttccatcctttgttaatactctccccttatactgtctccatgccatatcttggccaacagccttactttccaacccagtcatctgggaaagaagtatgggggttagcctggacactttcctctattccaaactccacattcaattagtcaccaagtcccatgggcacagcactttttccttataattatgtttcaagagaaataggagagtaacacttgcatatgattaaaaagtatacagcatgaatagagagacagaaaaatggaacagactagacatttccaaatagacccaagtatttacgtgttaaagaaaaatacaaatggaggctacagtttagatataccccaaggctaaccatctttaaccatataaccaaaactttattcatctcgattttctgaaatgctaatttctaatcataaataaaacacaaaacataactttatgtccttgccagtataattcagtgaaattaagccaatcagctatagataaattagcttgaatagcactatttgtcctaaaaagaatgttaatgt

SEQ ID NO: 551608 - DNA, 734 bp, Homo sapiens
tcctgcctcagcctcccaaagtgctaggactacaagcatgagccaccaaacttggcctcaatttttattgcattgagagcccaagacccccatggtaggtaacaaaacgaatacacatctctttaactctttgttctcagtcctctttctggtttcctcttcacaggcatactcctagtgcaatacaaagtttccatcctttrttaatactctccccttatactgtctccatgccatatcttggccaacagccttactttccaacccagtcatctgggaaagaagtatgggggttagcctggacactttcctctattccaaactccacattcaattagtcaccaagtcccatgggcacagcactttttccttataattatgtttcaagagaaataggagagtaacacttgcatatgattaaaaagtatacagcatgaatagagagacagaaaaatggaacagactagacatttccaaatagacccaagtatttacgtgttaaagaaaaatacaaatggaggctacagtttagatataccccaaggctaaccatctttaaccatataaccaaaactttattcatctcgattttctgaaatgctaatttctaatcataaataaaacacaaaacataactttatgtccttgccagtataattcagtgaaattaagccaatcagctatagataaattagcttgaatagcactatttgtcctaaaaagaatgttaatgt

SEQ ID NO: 551609 - DNA, 734 bp, Homo sapiens
tcctgcctcagcctcccaaagtgctaggactacaagcatgagccaccaaacttggcctcaatttttattgcattgagagcccaagacccccatggtaggtaacaaaacgaatacacatctctttaactctttgttctcagtcctctttctggtttcctcttcacaggcatactcctagtgcaatacaaagtttccatcctttgttaatactctccccttatactgtctccatgccatatcttggccaacagccttactttccaacccagtcatctgggaaagaagtatgggggttagcctggacactttcctctattccaaactccacattcaattagtcaccaagtcccatgggcacagcactttttccttataattatgtttcaagagaaataggagagtaacacttgcatatgattaaaaagtatacagcatgaatagagagacagaaaaatggaacagactagacatttccaaatagacccaagtatttacgtgttaaagaaaaatacaaatgsaggctacagtttagatataccccaaggctaaccatctttaaccatataaccaaaactttattcatctcgattttctgaaatgctaatttctaatcataaataaaacacaaaacataactttatgtccttgccagtataattcagtgaaattaagccaatcagctatagataaattagcttgaatagcactatttgtcctaaaaagaatgttaatgt

SEQ ID NO: 551610 - DNA, 1027 bp, Homo sapiens
caaagtttttgtatgcatcaatgcacttaatccttataacaaccttatgaggtagttctattccctttttatagctaaggaaattggggtacagagaagttagccccaaggttatatattgcaagtaagtggcagagcagggattcatacaaagaccttctcactcagcagtcttcactcttactattcctgccactaggtagaaaaagaaagatttcggccgggcacagtggctcacgcctataattcccagcactttgggaggctgaggtgggcggatcacgaggtcaggagatggagaccatcctggctaacacagtgaaaccccgtctctactaaaaataaaaaataaaaaaaaattagccaggcgtggtggcgggtgcctgtacgcccagctactcgggaggctgaggcgggagaatggcgtgaacccaggaggaggagcttgcagtgtgccaagatcgcaccactgcactccagcctgggtgacagagcgagactccatcaaaaaaaaataaataaataaaaaataaaagatttcattttatgtgaggaattattttaataaaaaaaagagggtttatgctctatagtaataaaatttaccagtaacacccaatcagaaaattttggttccttagtatttagggaagacttttgtttaaatctcttatggaattttacatgttttgatttagaaaagtagatgcaatataatatatttcaagttttatacatattagatgaattgcatggtattttaggcaacttaactataaacaaatttattcatagaagcattgttgccaacaatttagatgacctmgatgaaaaaacacaccaattgacaaaactggctcaaaaggaaataaaaaatccaaacagacctgtaacaagtaaagagattgaaccagtaatcaaaaatctcccaacaaagaaagtccaggactaaatgagtttactggcaaactatgccaaacatataaagaagaattaacactaatccttctcgaactctcccaaaaaa

SEQ ID NO: 551611 - DNA, 1027 bp, Homo sapiens
caaagtttttgtatgcatcaatgcacttaatccttataacaaccttatgaggtagttctattccctttttatagctaaggaaattggggtacagagaagttagccccaaggttatatattgcaagtaagtggcagagcagggattcatacaaagaccttctcactcagcagtcttcactcttactattcctgccactaggtagaaaaagaaagatttcggccgggcacagtggctcacgcctataattcccagcactttgggaggctgaggtgggcggatcacgaggtcaggagatggagaccatcctggctaacacagtgaaaccccgtctctactaaaaataaaaaataaaaaaaaattagccaggcgtggtggcgggtgcctgtacgcccagctactcgggaggctgaggcgggagaatggcgtgaacccaggaggaggagcttgcagtgtgccaagatcgcaccactgcactccagcctgggtgacagagcgagactccatcaaaaaaaaataaataaataaaaaataaaagatttcattttatgtgaggaattattttaataaaaaaaagagggtttatgctctatagtaataaaatttaccagtaacacccaatcagaaaattttggttccttagtatttagggaagacttttgtttaaatctcttatggaattttacatgttttgatttagaaaagtagatgcaatataatatatttcaagttttatacatattagatgaattgcatggtattttaggcaacttaactataaacaaatttattcatagaagcattgttgccaacaatttagatgacctcgatgaaaaaacacaccaattgacaaaactggctcaaaaggaaataaaaaatccaaacagacctgtaacaagtaaagagattgaaccagtaatcaaaaatctcccaacaaagaaagtccaggaytaaatgagtttactggcaaactatgccaaacatataaagaagaattaacactaatccttctcgaactctcccaaaaaa

SEQ ID NO: 551612 - DNA, 1259 bp, Homo sapiens
  misc_feature 357, 358, 359, 360, 361, 362, 363, 364, 365, 366, 367, 368,369, 370, 371, 372, 373, 374, 375, 376, 377, 378, 379, 380,381, 382, 383, 384, 385, 386, 387, 388, 389, 390, 391, 392,393, 394, 395, 396, 397, 398, 399, 400, 401, 402, 403: n = A,T,C or G
  misc_feature 404, 405, 406, 407, 408, 409, 410, 411, 412, 413, 414, 415,416, 417, 418, 419, 420, 421, 422, 423, 424, 425, 426, 427,428, 429, 430, 431, 432, 433, 434, 435, 436, 437, 438, 439,440, 441, 442, 443, 444, 445, 446, 447, 448, 449, 450: n = A,T,C or G
  misc_feature 451, 452, 453, 454, 455, 456: n = A,T,C or G
aaagatgaaatattctcattgtatgacattcattttaattcttttcagtattgttaatggaactattataaaatatctctcagattcttgctcagataatttatgataaatattttaaaattgataacatttatttaagtatctcttctatttttctttggaattgtagttatttatattttttattctctcccactaacttttcaagccaactgaggacaaggattctgtctattcattttttaactttcaactcctactggtatacctgggaaatattaactaatgaataaattaacccaagcgtatgaatttcagctgattgcatattaggcattgaaatattttttcaatatnnnnnnnnnnnnnnnnnnnnnnnnnnnnnnnnnnnnnnnnnnnnnnnnnnnnnnnnnnnnnnnnnnnnnnnnnnnnnnnnnnnnnnnnnnnnnnnnnnnncatgtgcacaacgtgcaggttagttacatatgtatacatgtgccatgttggtgtgctgcctgtgttatctctgactccaaggaacttatcataaattgtcaattttattatctctttctcctgctcaaaacattcaatgactctctcattcattttagcattcaagtcaaggctatctacagactgaccacaacttatatattgagactaatctcccactaattgatttctgtttgttttcttgtatattgtattcagttttatcttcctaaatggtgtaccctaggatactttactgttttttttttgcttctactacattatcaaraataacttaggactagaaatcttgactcctttctattttagttttataatttgcaaaatgaaattgatatttgcgtttctgacacgttattgaaatcaaatgaggcaatgtgtaggaaagttcttgagaaagaagaaagcacttttgaactgtaaattataagtattggctgtcattcaaatcctagtgtaaaccctccttgtttgaatagtttttcttgttcattttaggccatagtgatgacaataacgattaatactttgagaccaattactacaggccagacacatttcaactgcttcacatattttcatgtatttaaccttcacaacagtctttagaagtagtttatattctcacccccaatttaaagttgaagaaaccgagtcacaaagaggtcaataacttccctgaggtcattgacatatctgctaaatgatggaagagtaattcaaatccttgccatctgatatgg

SEQ ID NO: 551613 - DNA, 1035 bp, Homo sapiens
tttgagcggcattcattagcccaatgatttcctttattacaacgagggcaaagtcctggcatttttttctcttgagggggaactgcattataaaatcccttctgcccagaggtctggcggtgttcttttccaaaacgtccaatttttctacacttataacactttcccactttagggcttgacccttggcttcctttagatctgtcagctaccaaattagccattgccygagccaacactgcagagcaatgaagctcagttcccacatcctgacaggctccgagaaaacctcctaagtcctcggcacacctcacaggtgccaatgcatgtttacaatccacaaaagccaaagctaaagttagcctttccgtagccacagaagatggtacaagccaattctcattctccctctcctgttcaccacttttgacaggcgctgtaggtggggcaaaaatttttctcaaaccctgaaataatatggtatgtaccaaactcccaacaaaaaaaaaagagaaaaaacataaccaaattcttctccatgttaccctgattcaaaaacttcccattctttgtacctctagggcactgaccattaccttttcagagtactgatcttacgttgcttccggcagacttgttaacagggtttctcatttgtctggttggttttagtttctgttgcagcagaacttccttgttcaagtccctataggaccccatctgtccctgagagtttttgctggcctcttctagcttctacttttgtacctctttagggcactgaccttatattgctagcctttatctatccctatctgtccctatggtacctgttagttcctgcaagttcctgtcttcccctacctatctctacttacttttctctacttatctctacttaatttacttatctctatttacttatttctacttatctctacttgtccctgcaggcctcttcaggccccttcaggtctctaggtctctttttctccttgatagtcccttcagtggctgactatcactgctactact

SEQ ID NO: 551614 - DNA, 1184 bp, Homo sapiens
ctgcatgcacttactaggtcatgtcttttagccaaaggtaaaacagccagtatttataaagatgtcaggtatgccttcamggttgttcatgactttggtatctgtgtaaaatttgtccacaatacactactggcaaactgttgcatgcctccatgggccacttcccattgctgagtggtccctttaaagtatggcaacaagattttatttagctccctgcctcacaaggaaaccagcacgtactaattatgatttgcatgttttcaaactgggttaacaccttcttcttgataggtcacagcaatggcagtagttaaaccttactggaaaaattatatcaacctgggaagtctctcaagagcttcacagtgactaaggaactcattttacagggcaaattattcaaaatgtttataaaatttggcctattaacatccactggggtggtggaacagaccaacagaataataaaagcccaataacaaagacccgagtggcatttagcctgccttggccctaggccctttccttagtcttttttaaccttggtgggcattcaacaccctctctctggagttctgaattcatccagtcaggagaaaccacattgttttttttggcttgtttgtttgtttgtttttgtctgttcagcccccattcacctcctgggaaaggacttcttagaaacctgtcaggcccacatatccttctcccaaaaaaggggaaaataatacttgagttgtcctcaccaggagatctggccacagacagatcttatgcaaattcccatctattcagtcagtttcactaattctacgcctcctgctctccaagagctacctgagagtcttgaggcacacgccaacactgacaatgaccccatggattatagttggaggccactcatggatgtgatttgctgaaagggattaactctagtgaaggagctgcacaggaaggtttctgaggtcctggtttggactaggttctgtttggaatggtcagaaacttttctgcactgttaatagagctgcctgcttcaccactcatgccatcagggcacaacagagattcccctagactcccttgcttgtgtgatcctagacaaccacactgctttagattaacacctcactgcacagggtggtgtttctgctatcgctaatacttgctgctgtatctgg

SEQ ID NO: 551615 - DNA, 1184 bp, Homo sapiens
ctgcatgcacttactaggtcatgtcttttagccaaaggtaaaacagccagtatttataaagatgtcaggtatgccttcacggttgttcatgactttggtatctgtgtaaaatttgtccacaatacactactggcaaactgttgcatgcctccatgggccacttcccattgctgagtggtccctttaaagtatggcaacaagattttatttagctccctgcctcacaaggaaaccagcacgtactaattatgatttgcatgttttcaaactgggttaacaccttcttcttgataggtcacagcaatggcagtagttaaaccttactggaaaaattatatcaacctgggaagtctctcaagagcttcacagtgactaaggaactcattttacagggcaaattattcaaaatgtttayaaaatttggcctattaacatccactggggtggtggaacagaccaacagaataataaaagcccaataacaaagacccgagtggcatttagcctgccttggccctaggccctttccttagtcttttttaaccttggtgggcattcaacaccctctctctggagttctgaattcatccagtcaggagaaaccacattgttttttttggcttgtttgtttgtttgtttttgtctgttcagcccccattcacctcctgggaaaggacttcttagaaacctgtcaggcccacatatccttctcccaaaaaaggggaaaataatacttgagttgtcctcaccaggagatctggccacagacagatcttatgcaaattcccatctattcagtcagtttcactaattctacgcctcctgctctccaagagctacctgagagtcttgaggcacacgccaacactgacaatgaccccatggattatagttggaggccactcatggatgtgatttgctgaaagggattaactctagtgaaggagctgcacaggaaggtttctgaggtcctggtttggactaggttctgtttggaatggtcagaaacttttctgcactgttaatagagctgcctgcttcaccactcatgccatcagggcacaacagagattcccctagactcccttgcttgtgtgatcctagacaaccacactgctttagattaacacctcactgcacagggtggtgtttctgctatcgctaatacttgctgctgtatctgg

SEQ ID NO: 551616 - DNA, 1184 bp, Homo sapiens
ctgcatgcacttactaggtcatgtcttttagccaaaggtaaaacagccagtatttataaagatgtcaggtatgccttcacggttgttcatgactttggtatctgtgtaaaatttgtccacaatacactactggcaaactgttgcatgcctccatgggccacttcccattgctgagtggtccctttaaagtatggcaacaagattttatttagctccctgcctcacaaggaaaccagcacgtactaattatgatttgcatgttttcaaactgggttaacaccttcttcttgataggtcacagcaatggcagtagttaaaccttactggaaaaattatatcaacctgggaagtctctcaagagcttcacagtgactaaggaactcattttacagggcaaattattcaaaatgtttataaaatttggcctattaacatccactggggtggtggaacagaccaacagaataataaaagcccaataacaaagacccgagtggcatttagcctgccttggccctaggccctttccttagtcttttttaaccttggtgggcattcaacaccctctctctggagttctgaattcatccagtcaggagaaaccacattgttttttttggcttgtttgtttgtttgtttttgtctgttcagcccccattcacctcctgggaaaggacttcttagaaacctgtcaggcccacatatccttctcccaaaaaaggggaaaataatacttgagttgtcctcaccaggagatctggccacagacagatcttatgcaaattcccatctaytcagtcagtttcactaattctacgcctcctgctctccaagagctacctgagagtcttgaggcacacgccaacactgacaatgaccccatggattatagttggaggccactcatggatgtgatttgctgaaagggattaactctagtgaaggagctgcacaggaaggtttctgaggtcctggtttggactaggttctgtttggaatggtcagaaacttttctgcactgttaatagagctgcctgcttcaccactcatgccatcagggcacaacagagattcccctagactcccttgcttgtgtgatcctagacaaccacactgctttagattaacacctcactgcacagggtggtgtttctgctatcgctaatacttgctgctgtatctgg

SEQ ID NO: 551617 - DNA, 1578 bp, Homo sapiens
aaatcagttcctccatagagctccagagggagcatgagcctcaaggcaccttgatttttggcccagtgaaattgacttggacctctgacttacaacactgtaagagattagatgtgtgttgtgttaagccaccacgtttctggtaatttgctacagcaggcacaggacactctcagcaaataccaaggttcagggcttagctttcaggttgcagatttggaatccagctctcagatatcatgtcccttttttgggttacactcatgtgaatcaagataggagattgatgcatgaaattacaatgatgattcatcaacttccaatgagatgtagaactctcttgttggctggaagacatgtcaaactgaccagtccattttctgtctattgacagacaggcttaggaaatagtttgtaatcaagattccagtatactgattaataattaaaaataaaattctaacatataggtggaaatctttaacatttccccaagcaccttcttttccaccagccaacagacaaacctggaaagacaaatcacagctgaaggtagtttcgagaacactgactctgaacaagggcagttagattaatgctttgctgaatggcaacaggatgagacaccctgagacatatctttgggactggagaatgcgaagtgctttggctggaatcctattgtccaccttccctttggggaaggacttggcaatgtgaccaggacagctgtgcttatttgataaggatccctttccctcgttcatgcctggatattcactgccaagttaatctctgccattgttctttctcacatggtgactatccctatatccctttttgggatatgtggatgctttccttctaagtaaaaacaagtcttgccagcaaggatccatttagtttcttttggcattgcatatctcattatgtattgatgtaataataaatggattattatattttccttcttaagttatagttgagaaatgtactttaacattttttcataaactgataaattttgtgtcacacaaagatatatatatattatatataatctttgcatcttgcatagagtatgtgcacataagttgtagtttattgttatatatatatatatatttagctgtgttccatatagaggacaatcaataaatayaatttctcatgcctgtgttcctcagatgtctggagtgtggtaaggacatgtcacaaggttaaaattcagaatggaaacctcagaacctgtcattctctgcagatctgtaacatctcagggaagcagaaaattccagcatttagagctctgtttctttgttcttttgatgaaacacttattgttcatggaaaaacatctatttttgttttcatttcgctcttgtctgtctacagagatactttcaggcagaggcaagatttcgttatttcagagacctgtgagattctcagtaggcaaacacatctttaaaagacaatatttcagttttgcgtgttaatatattgcagaaaaagaaaattcaatgataaatatatttcattgaactcaaaggtttgtaaatcagattattgtatgat

SEQ ID NO: 551618 - DNA, 1313 bp, Homo sapiens
ttggtaagtgcggctgctctgtcactattatggaaaaagttccatttgccaggaaaataaccatgcccctttgccatttacaagcatcttacactttggggtgttttggtatagaaggctatttaatcaagcacttctgttgcatttaggatgtgaagtaataaacaacaactgtgattatttaactgctgtagtggaactgaatcagtttaattaatcacaaaagacatttcctgcaagtaagcctcaaaagcaaagagattattgtgattatacaaaataggggaaaccagagattgttgctattaacttctttgggagtggtttgaaagccctagttatttaatgtgcatatttcaggaatatactaaaggcaatcagtgatgtaaagctggtagtgatgagtgcagatcataagacttttcatcagggtagagattttcttactcttactccataattcaaaatcaagagtagagatgagtcatcctggggagcatcttgagaaaatgctgatggtttggtaaactgatggagaatgaggacaagggaaaagagaatctctcactgtcaaggtattatttaggaaagtatctcataggaagacagcatgagactggccttagaggtagaattcacagataaacttgaattttggggaaaaaaagcagttatctgttgtttatctgaatttatcagatttaacctggtgtcctgtatttttatttatttatttttttgtcatacctgaaaaccctacttagaggtcactgcatctaactgaatgactacatttactgaaagagtttatataatgcttatttcagcaagttccaraaatagcacctgtcacaaaacaacaagcagagaaatatcccatgtccctgatgaagtaagcgaagggaccccactcaagttacctaaccatctagtgtctctcttggtgggaacatcttatagttagggtaagtaggcaatctcctgagttgagaggcatgagagatgttttcttcctattcctggacttcatactctaacttccataaatgcaaccataattgcaaaaagttacacctagagaatctggccacataccccataagagaaaagcagggaaatcacaaaaaagaactcaaggcctcctggtgcagctcataggctgagaaaaagaaagaaagttgggtgcaaggagaaaagtaatgcacctccatgatatcagcaaaagaaagatcaggctgcagaaagtgcagaagaaaacgctctccgtgaaggtagaatgaacagtctgctgcagaacaatgtagagggaacat

SEQ ID NO: 551619 - DNA, 2073 bp, Homo sapiens
gaagtatatattgcatgtgtataaacactttaaaataattatactctttattattttcaaggtgtcacaaacagaatatattattgaaaagaatttccctatataaaaatattattgccacttcccaaaattagcagtcatattttttttctagttattttgactgctggaaaaaatcagaatgagcaccataagactttaggtaattctgggcaatatcttcatatgatcagtctctgccactaaatctaataggtgttgcattttgcacctatgaacagacctcacatattaagaacttaagaaaagctaacttgccagtaaattgcaattaccatatgagcactaaggtgcagtctgttcagaagctttatgtcataatttccatagataagataaaatgatatttaatttgtattttttattttattaataggatattttatagatgccattccttcccacactctaatttatctcattttatagtgctttccttaaggccctggagacaacctacttattttttaagactgtttcctaaatatttgggaatgctgttattattttctcagtgaatcagagggtagcttgtaacataaactatgtttgtagtttatgctgctaaaatctttggtgctttggtttggcaagcaaaagggcatgggcccaatgagaataactagaaaggctatggggattgctactgctaatgtcacacatgagcgcacacacacacacacgcacacacatgtggatatatatatacacacacatatacactcatatatgtggcatatatatggctttgtatggtattaatatgaagttctttagataatattttaagcattgaccatcatcaaaagaagaaaatatagatccatcagaacaccatggatttcataatttgtaaggaaagctggaacaggatgaatgtagtgagaaattcatgtattcattcaacaaatatatatgtgtatatatatatatttgcacgtgtgtgtgtttgtgttaaacatcttagaaagtgaagcaacctagtctaaggttttaatgttgaaatcaagttcttatcaaaattttacaactgcaacatccctttctycctaaaaagccaaaagccttggaaagcattctgggaaactgaggtaattttagaatagaggtcatgaaaacatatttttataaaaggggtgattatgtcatcctattggaaaaattatttagaagaaaatcttcaacatactagtcagtatagtagatgataaaataaaccattactttcagattatttacaatatttatttaatatcaaaactgctggtggtcattataataaatatcatctacttttatagttgccttctattttgttccaatgtttggggctttagatactaaaaagacttttagtgaacctgtgagaatttacttaaagctgttagtgtatgtgcgtgtttctttccattgcaggttatgagaacatatttaaagtatcccattacttttcttgtttaataagaaccagtattattttgtgggcataatttagaaactctattacagacatgtttgctgggagttgaaaatgttaattaaagttcttaaatatctggttgttattttattaaatgtaaaagtgtcaatgtcatagactgtatgtttcttataagaaacataaagaacagaaccattacccatatagtctacttttaatgaaatgatattaattgattctttgtatataataaacatttaatattaatgcaaacttaactcatggtaccaaactaagtggttgtagaaaaatgctggctttatttgaaagatgttgaattgcagtgggaaaataaaaaaacaaaacaaaacaaaacaaaaaaaacaaaaaacaaaaaaacaaagactaaatatcagtagacatatttctaggttagaatctgctttaattagcttttattgtaaatgagatatttggcttttgggatctcagtttcctcagctataaaatgatttctttcttctttttatttgtatatatttgtggggtacctgtgcaattttgttacatgc

SEQ ID NO: 551620 - DNA, 628 bp, Homo sapiens
ttattttgatagaatcgtggtataagaaattctgtagtatataacaaatcaataaaaaagtcactatagatgatttaatatgtactaaatataaatttaaaattagacttactgtgctttcttttgtttttttaaatttctatggtagtcgtgaaaatgattttatcggagcatgaagagaaaaatacttataatctttcccaaagatacatgtgcaaaatattctgcagtaatcagaaattataacataaaggatttaatcaagctacagtactagtagtttagcattcatcgaacaagtggactttgatttttaactatctgatcagcaaatttgaaactgaaaaattcaagagaaaagaataagaagaccacataactctacaaagtcagagaacttttccccagagtgtgagaagcttccctacagaattctgctatgctgattctatagtagcggtttacaagctcttttttttttwaattttttttacatatacatccatataaatggctcatgcttaatgtttaaataacaataataaagcactcacctatgttcctatcagagtttaagaaatgagagcaatggtttaaagcctcagttactccttcacaaatgcacctt

SEQ ID NO: 551621 - DNA, 628 bp, Homo sapiens
ttattttgatagaatcgtggtataagaaattctgtagtatataacaaatcaataaaaaagtcactatagatgatttaatatgtactaaatataaatttaaaattagacttactgtgctttcttttgtttttttaaatttctatggtagtcgtgaaaatgattttatcggagcatgaagagaaaaatacttataatctttcccaaagatacatgtgcaaaatattctgcagtaatcagaaattataacataaaggatttaatcaagctacagtactagtagtttagcattcatcgaacaagtggactttgatttttaactatctgatcagcaaatttgaaactgaaaaattcaagagaaaagaataagaagaccacataactctacaaagtcagagaacttttccccagagtgtgagaagcttccctacagaattctgctatgctgattctatagtagcggtttacaagctctttttttttttawttttttttacatatacatccatataaatggctcatgcttaatgtttaaataacaataataaagcactcacctatgttcctatcagagtttaagaaatgagagcaatggtttaaagcctcagttactccttcacaaatgcacctt

SEQ ID NO: 551622 - DNA, 652 bp, Homo sapiens
ataaactcagaaaggctaagtataataacctaattatatttatctaatattaaaagaggacttgaacccaattcttctgacactaaatccggggctcttagcaaaaatttaatgatacgtgtgtataggttatcttggtaaataaatacttgataaaatttcactaaaaattcactaaaattttttatataaatttttgcattataaaacacacaacatagtgttacatatctatgcaaatttttttttctttcagactgtgaagaatgcttggtacgtgtctaaatttaggcacctyttgccataaatccaaagacgccctcaaattccttgaccttaaagtagggaacatgattagtttagagtctaatcacttcagttttgagttactctgtattataatgcagtagttaatttgctctatttataaaagacatcaatcctttgagaagacaatctctttatagtaatattcaaactggaatgtcaaattctgtttcatatgtgagatattatctttccaaaaaaccatatgaatgcataaatcagaaaatctcacacctaaccaagaaaagagattatggtcagatttctgcttagtgctctcaggaagtctttcattctgctctgggaaaaacactaggtctcctta

SEQ ID NO: 551623 - DNA, 652 bp, Homo sapiens
ataaactcagaaaggctaagtataataacctaattatatttatctaatattaaaagaggacttgaacccaattcttctgacactaaatccggggctcttagcaaaaatttaatgatacgtgtgtataggttatcttggtaaataaatacttgataaaatttcactaaaaattcactaaaattttttatataaatttttgcattataaaacacacaacatagtgttacatatctatgcaaatttttttttctttcagactgtgaagaatgcttggtacgtgtctaaatttaggcaccttttgccataaatccaaagacsccctcaaattccttgaccttaaagtagggaacatgattagtttagagtctaatcacttcagttttgagttactctgtattataatgcagtagttaatttgctctatttataaaagacatcaatcctttgagaagacaatctctttatagtaatattcaaactggaatgtcaaattctgtttcatatgtgagatattatctttccaaaaaaccatatgaatgcataaatcagaaaatctcacacctaaccaagaaaagagattatggtcagatttctgcttagtgctctcaggaagtctttcattctgctctgggaaaaacactaggtctcctta

SEQ ID NO: 551624 - DNA, 640 bp, Homo sapiens
tgggtgtaaaagttctgggttttgctattaattactagcttgagtgcactgcagtcagtaaatgtagcctctagtgtttctaatgtttaatatagtaaggatttctttaggcctgatataatggttgactttgtaaaaacttgtstttatggtacaaagtccaatatgtaactatgagaatatctatattaattttattattctgatttttacagcattacttacttttcatctacttgatatgtcaggggctgaaagatgagacaaaattttttactaatgctgaattgccaatcattattactatacaatatgttttttggtacacaaagttttgtaataattatatatttgttgtggaatttaccctttatcattaaactgaaaattgcagttgcttccctaatatcattcaatctttctccaattacgtagaagctatatatagatgctacatagtttaggtggaattgagtcacgatccagctccatggatgatacctgattaatctaaatcagtaattctcagaatttatggcatcaggtcccctttatactattaaaaattatcaaaaactccaaaattattttgtttatgtgagttatatctatcagtgtttgctatattagaaattaaaat

SEQ ID NO: 551625 - DNA, 952 bp, Homo sapiens
ctgttcttgcacccagcatgttggacagtcaagttcccccgctgagcaatccacacataaggagggagtcaacaccattgctatgtcggatcagctccagcgtctccaatatcagttttatcagatcccaggaacctgcctgctcccagaggtgacagagaaaaatcaaggaaggatctgtatggtcactgacctggatgaaacccttgtgcatagctcctttaagccaatcagcaatgctgactgcctagtgcctgtagagcttgaggggaccatgcaccagatccatgtgctcatgaggccttatatggatgagttcctgacatgaatggaggaaatgtttaaatgtgttttcgtcattgctctcttcttcccagcctgaacaagtaggcagatcctgtgacgggtgagctggacgggtatgggatggtctggggctgcctgtcccatgagtcatgtttgtttcaccagggctgctatgtcaaggacgtcagccatctggggagggacctgaggaaaactcatcctggacaactcgcctgcttcttacatcttccacacagagaatgcagtgcctgtgcagtcctggtttgataacattccagacagcagctgctgcacctgatatcattmtttgaggagatgagtggaggagcagagggtgtctacactagccttgggcagcagtgggcccttaaccttccctgcttcccagcaatggccatcacagtaggggattttcccacactgtgcctttatgaacagcctgaaagagtgaaggctggaacacctacccacatgggcctggaaacagtgagaagtgattgaaaagagctttaggacagcttagatgcccagtgggtgaatgccagaccaaggatacccagagctacctgccatcaagttgttgggttcccgagatgggggtgtgagagaaagaaagacagcatgt

SEQ ID NO: 551626 - DNA, 952 bp, Homo sapiens
ctgttcttgcacccagcatgttggacagtcaagttcccccgctgagcaatccacacataaggagggagtcaacaccattgctatgtcggatcagctccagcgtctccaatatcagttttatcagatcccaggaacctgcctgctcccagaggtgacagagaaaaatcaaggaaggatctgtatggtcactgacctggatgaaacccttgtgcatagctcctttaagccaatcagcaatgctgactgcctagtgcctgtagagcttgaggggaccatgcaccagatccatgtgctcatgaggccttatatggatgagttcctgacatgaatggaggaaatgtttaaatgtgttttcgtcattgctctcttcttcccagcctgaacaagtaggcagatcctgtgacgggtgagctggacgggtatgggatggtctggggctgcctgtcccatgagtcatgtttgtttcaccagggctgctatgtcaaggacgtcagccatctggggagggacctgaggaaaactcatcctggacaactcgcctgcttcttacatcttccacacagagaatgcagtgcctgtgcagtcctggtttgataacattccagacagcagctgctgcacctgatatcattatttgaggagatgagtggaggagcagagggygtctacactagccttgggcagcagtgggcccttaaccttccctgcttcccagcaatggccatcacagtaggggattttcccacactgtgcctttatgaacagcctgaaagagtgaaggctggaacacctacccacatgggcctggaaacagtgagaagtgattgaaaagagctttaggacagcttagatgcccagtgggtgaatgccagaccaaggatacccagagctacctgccatcaagttgttgggttcccgagatgggggtgtgagagaaagaaagacagcatgt

SEQ ID NO: 551627 - DNA, 952 bp, Homo sapiens
ctgttcttgcacccagcatgttggacagtcaagttcccccgctgagcaatccacacataaggagggagtcaacaccattgctatgtcggatcagctccagcgtctccaatatcagttttatcagatcccaggaacctgcctgctcccagaggtgacagagaaaaatcaaggaaggatctgtatggtcactgacctggatgaaacccttgtgcatagctcctttaagccaatcagcaatgctgactgcctagtgcctgtagagcttgaggggaccatgcaccagatccatgtgctcatgaggccttatatggatgagttcctgacatgaatggaggaaatgtttaaatgtgttttcgtcattgctctcttcttcccagcctgaacaagtaggcagatcctgtgacgggtgagctggacgggtatgggatggtctggggctgcctgtcccatgagtcatgtttgtttcaccagggctgctatgtcaaggacgtcagccatctggggagggacctgaggaaaactcatcctggacaactcgcctgcttcttacatcttccacacagagaatgcagtgcctgtgcagtcctggtttgataacattccagacagcagctgctgcacctgatatcattatttgaggagatgagtggaggagcagagggtstctacactagccttgggcagcagtgggcccttaaccttccctgcttcccagcaatggccatcacagtaggggattttcccacactgtgcctttatgaacagcctgaaagagtgaaggctggaacacctacccacatgggcctggaaacagtgagaagtgattgaaaagagctttaggacagcttagatgcccagtgggtgaatgccagaccaaggatacccagagctacctgccatcaagttgttgggttcccgagatgggggtgtgagagaaagaaagacagcatgt

SEQ ID NO: 551628 - DNA, 952 bp, Homo sapiens
ctgttcttgcacccagcatgttggacagtcaagttcccccgctgagcaatccacacataaggagggagtcaacaccattgctatgtcggatcagctccagcgtctccaatatcagttttatcagatcccaggaacctgcctgctcccagaggtgacagagaaaaatcaaggaaggatctgtatggtcactgacctggatgaaacccttgtgcatagctcctttaagccaatcagcaatgctgactgcctagtgcctgtagagcttgaggggaccatgcaccagatccatgtgctcatgaggccttatatggatgagttcctgacatgaatggaggaaatgtttaaatgtgttttcgtcattgctctcttcttcccagcctgaacaagtaggcagatcctgtgacgggtgagctggacgggtatgggatggtctggggctgcctgtcccatgagtcatgtttgtttcaccagggctgctatgtcaaggacgtcagccatctggggagggacctgaggaaaactcatcctggacaactcgcctgcttcttacatcttccacacagagaatgcagtgcctgtgcagtcctggtttgataacattccagacagcagctgctgcacctgatatcattatttgaggagatgagtggaggagcagagggtgtctrcactagccttgggcagcagtgggcccttaaccttccctgcttcccagcaatggccatcacagtaggggattttcccacactgtgcctttatgaacagcctgaaagagtgaaggctggaacacctacccacatgggcctggaaacagtgagaagtgattgaaaagagctttaggacagcttagatgcccagtgggtgaatgccagaccaaggatacccagagctacctgccatcaagttgttgggttcccgagatgggggtgtgagagaaagaaagacagcatgt

SEQ ID NO: 551629 - DNA, 952 bp, Homo sapiens
ctgttcttgcacccagcatgttggacagtcaagttcccccgctgagcaatccacacataaggagggagtcaacaccattgctatgtcggatcagctccagcgtctccaatatcagttttatcagatcccaggaacctgcctgctcccagaggtgacagagaaaaatcaaggaaggatctgtatggtcactgacctggatgaaacccttgtgcatagctcctttaagccaatcagcaatgctgactgcctagtgcctgtagagcttgaggggaccatgcaccagatccatgtgctcatgaggccttatatggatgagttcctgacatgaatggaggaaatgtttaaatgtgttttcgtcattgctctcttcttcccagcctgaacaagtaggcagatcctgtgacgggtgagctggacgggtatgggatggtctggggctgcctgtcccatgagtcatgtttgtttcaccagggctgctatgtcaaggacgtcagccatctggggagggacctgaggaaaactcatcctggacaactcgcctgcttcttacatcttccacacagagaatgcagtgcctgtgcagtcctggtttgataacattccagacagcagctgctgcacctgatatcattatttgaggagatgagtggaggagcagagggtgtctacactagccttgggcagcagtgggcccttaaccttccctgcttcccagcaatggccatcacagtaggggattttcccacactgtgyctttatgaacagcctgaaagagtgaaggctggaacacctacccacatgggcctggaaacagtgagaagtgattgaaaagagctttaggacagcttagatgcccagtgggtgaatgccagaccaaggatacccagagctacctgccatcaagttgttgggttcccgagatgggggtgtgagagaaagaaagacagcatgt

SEQ ID NO: 551630 - DNA, 627 bp, Homo sapiens
ggcctaggtatgaacatgacaggtacacaagggttccaacacctgacaatctgcttcagtaaaagaagagtgccctccctcttgctccccatacaactcatggtactaagaaatggtgtgggacttcccagatgagttgacaagagaggcctggctctggggcctgtcctgagctgccctgtgttatttgtaggtgcacccrgccaatagccaggggcatcaatgatgaggcctgagttgacatccgtgttttcagataaggcttttacactgagcctttgtaaagtcaaaactcagaaatttcagggcacaatgaaagaacatctcactctcttgagcatctctcactaacagaggtggatacagagctgtctcaagaatgtgggttcctggtttcttaactgatgttgggttgtcaccaagaaagtgtgttaaactcttcaaggttccatctactgggtcccttctttctgtaagacctacccaaaagccccactatgctactaattgctcagtctcctcttccatgtcaactcttcatttgtacacaagtatgcaaacacaacttccccttaattccctggaaagaactaaatgcagcctgggttccaggatataagagacagc

SEQ ID NO: 551631 - DNA, 627 bp, Homo sapiens
ggcctaggtatgaacatgacaggtacacaagggttccaacacctgacaatctgcttcagtaaaagaagagtgccctccctcttgctccccatacaactcatggtactaagaaatggtgtgggacttcccagatgagttgacaagagaggcctggctctggggcctgtcctgagctgccctgtgttatttgtaggtgcacccggccaatagccaggrgcatcaatgatgaggcctgagttgacatccgtgttttcagataaggcttttacactgagcctttgtaaagtcaaaactcagaaatttcagggcacaatgaaagaacatctcactctcttgagcatctctcactaacagaggtggatacagagctgtctcaagaatgtgggttcctggtttcttaactgatgttgggttgtcaccaagaaagtgtgttaaactcttcaaggttccatctactgggtcccttctttctgtaagacctacccaaaagccccactatgctactaattgctcagtctcctcttccatgtcaactcttcatttgtacacaagtatgcaaacacaacttccccttaattccctggaaagaactaaatgcagcctgggttccaggatataagagacagc

SEQ ID NO: 551632 - DNA, 627 bp, Homo sapiens
ggcctaggtatgaacatgacaggtacacaagggttccaacacctgacaatctgcttcagtaaaagaagagtgccctccctcttgctccccatacaactcatggtactaagaaatggtgtgggacttcccagatgagttgacaagagaggcctggctctggggcctgtcctgagctgccctgtgttatttgtaggtgcacccggccaatagccaggggcatcaatgatgaggcctgagttgacatccgtgttttcagataaggcttttacactgagcctttgtaaagtcaaaactcagaaatttcagggcacaatgaaagaacatctcactctcttsagcatctctcactaacagaggtggatacagagctgtctcaagaatgtgggttcctggtttcttaactgatgttgggttgtcaccaagaaagtgtgttaaactcttcaaggttccatctactgggtcccttctttctgtaagacctacccaaaagccccactatgctactaattgctcagtctcctcttccatgtcaactcttcatttgtacacaagtatgcaaacacaacttccccttaattccctggaaagaactaaatgcagcctgggttccaggatataagagacagc

SEQ ID NO: 551633 - DNA, 887 bp, Homo sapiens
gtgcgcgtaactgcagaatgaggcggcattgtgcacgcctcgctggacttggtgggatatgtattctcataaacatacccaaccctttggtcatagggcgggaagactacaatcccagcatgcacctggctaagagacagttcctgtcactggaggaagaggcggaagactacaatcccagccagcaccgggctcagggaaattgtgcgtcagtggaggaagaggcggggttgtgtgctactcgccaggcttgctgggagttgtattctcataaaacctcccagccctttcatcacagggctgaaggactacacttccagccccagcatgcactgggctcagggacagcgcgcgtcactggaggaagagggagggctttgcgcttctagctgtgattttttgggagatgtagtctcattaacgctcccagccctttggtcasagagatccaggactgcaatcccaacatgcacccagctcagggatagtgcgctaatcactgcaggaagaggcagggctgtgtgcacctcctgggcgtactgggagatgtattctcataaacactcccatccctttggtcataaggctgcaggactacaatcctagcatgcactcagctcagtgacagtgcgctagtctaaggagaaagaggcagggcagtgtgcgccttgctgggcttcctgggagatgtagtcccatggcctctccctgccctatggtcacagtgctataagactacaatcccagcatgcacggggctcagggagagtccacatcactgcagaaagaggggcaggttgtgcgcacctcgctgcgtttgctgggagatgttgtttcataaagactctcagaccttttgtcacagggctacaggactacaatcccag

SEQ ID NO: 551634 - DNA, 887 bp, Homo sapiens
gtgcgcgtaactgcagaatgaggcggcattgtgcacgcctcgctggacttggtgggatatgtattctcataaacatacccaaccctttggtcatagggcgggaagactacaatcccagcatgcacctggctaagagacagttcctgtcactggaggaagaggcggaagactacaatcccagccagcaccgggctcagggaaattgtgcgtcagtggaggaagaggcggggttgtgtgctactcgccaggcttgctgggagttgtattctcataaaacctcccagccctttcatcacagggctgaaggactacacttccagccccagcatgcactgggctcagggacagcgcgcgtcactggaggaagagggagggctttgcgcttctagctgtgattttttgggagatgtagtctcattaacgctcccagccctttggtcacagagatccaggactgcaaycccaacatgcacccagctcagggatagtgcgctaatcactgcaggaagaggcagggctgtgtgcacctcctgggcgtactgggagatgtattctcataaacactcccatccctttggtcataaggctgcaggactacaatcctagcatgcactcagctcagtgacagtgcgctagtctaaggagaaagaggcagggcagtgtgcgccttgctgggcttcctgggagatgtagtcccatggcctctccctgccctatggtcacagtgctataagactacaatcccagcatgcacggggctcagggagagtccacatcactgcagaaagaggggcaggttgtgcgcacctcgctgcgtttgctgggagatgttgtttcataaagactctcagaccttttgtcacagggctacaggactacaatcccag

SEQ ID NO: 551635 - DNA, 887 bp, Homo sapiens
gtgcgcgtaactgcagaatgaggcggcattgtgcacgcctcgctggacttggtgggatatgtattctcataaacatacccaaccctttggtcatagggcgggaagactacaatcccagcatgcacctggctaagagacagttcctgtcactggaggaagaggcggaagactacaatcccagccagcaccgggctcagggaaattgtgcgtcagtggaggaagaggcggggttgtgtgctactcgccaggcttgctgggagttgtattctcataaaacctcccagccctttcatcacagggctgaaggactacacttccagccccagcatgcactgggctcagggacagcgcgcgtcactggaggaagagggagggctttgcgcttctagctgtgattttttgggagatgtagtctcattaacgctcccagccctttggtcacagagatccaggactgcaatcccaacatgcacccagctcagrgatagtgcgctaatcactgcaggaagaggcagggctgtgtgcacctcctgggcgtactgggagatgtattctcataaacactcccatccctttggtcataaggctgcaggactacaatcctagcatgcactcagctcagtgacagtgcgctagtctaaggagaaagaggcagggcagtgtgcgccttgctgggcttcctgggagatgtagtcccatggcctctccctgccctatggtcacagtgctataagactacaatcccagcatgcacggggctcagggagagtccacatcactgcagaaagaggggcaggttgtgcgcacctcgctgcgtttgctgggagatgttgtttcataaagactctcagaccttttgtcacagggctacaggactacaatcccag

SEQ ID NO: 551636 - DNA, 887 bp, Homo sapiens
gtgcgcgtaactgcagaatgaggcggcattgtgcacgcctcgctggacttggtgggatatgtattctcataaacatacccaaccctttggtcatagggcgggaagactacaatcccagcatgcacctggctaagagacagttcctgtcactggaggaagaggcggaagactacaatcccagccagcaccgggctcagggaaattgtgcgtcagtggaggaagaggcggggttgtgtgctactcgccaggcttgctgggagttgtattctcataaaacctcccagccctttcatcacagggctgaaggactacacttccagccccagcatgcactgggctcagggacagcgcgcgtcactggaggaagagggagggctttgcgcttctagctgtgattttttgggagatgtagtctcattaacgctcccagccctttggtcacagagatccaggactgcaatcccaacatgcacccagctcagggatagtgcgctaatcactgcaggaagaggcagggctgtgtgcacctcctgggcgtactgrgagatgtattctcataaacactcccatccctttggtcataaggctgcaggactacaatcctagcatgcactcagctcagtgacagtgcgctagtctaaggagaaagaggcagggcagtgtgcgccttgctgggcttcctgggagatgtagtcccatggcctctccctgccctatggtcacagtgctataagactacaatcccagcatgcacggggctcagggagagtccacatcactgcagaaagaggggcaggttgtgcgcacctcgctgcgtttgctgggagatgttgtttcataaagactctcagaccttttgtcacagggctacaggactacaatcccag

SEQ ID NO: 551637 - DNA, 887 bp, Homo sapiens
gtgcgcgtaactgcagaatgaggcggcattgtgcacgcctcgctggacttggtgggatatgtattctcataaacatacccaaccctttggtcatagggcgggaagactacaatcccagcatgcacctggctaagagacagttcctgtcactggaggaagaggcggaagactacaatcccagccagcaccgggctcagggaaattgtgcgtcagtggaggaagaggcggggttgtgtgctactcgccaggcttgctgggagttgtattctcataaaacctcccagccctttcatcacagggctgaaggactacacttccagccccagcatgcactgggctcagggacagcgcgcgtcactggaggaagagggagggctttgcgcttctagctgtgattttttgggagatgtagtctcattaacgctcccagccctttggtcacagagatccaggactgcaatcccaacatgcacccagctcagggatagtgcgctaatcactgcaggaagaggcagggctgtgtgcacctcctgggcgtactgggagatgtattctcataaacactcccatccctttggtcataaggctgcaggactacaatcctagcatgcacycagctcagtgacagtgcgctagtctaaggagaaagaggcagggcagtgtgcgccttgctgggcttcctgggagatgtagtcccatggcctctccctgccctatggtcacagtgctataagactacaatcccagcatgcacggggctcagggagagtccacatcactgcagaaagaggggcaggttgtgcgcacctcgctgcgtttgctgggagatgttgtttcataaagactctcagaccttttgtcacagggctacaggactacaatcccag

SEQ ID NO: 551638 - DNA, 887 bp, Homo sapiens
gtgcgcgtaactgcagaatgaggcggcattgtgcacgcctcgctggacttggtgggatatgtattctcataaacatacccaaccctttggtcatagggcgggaagactacaatcccagcatgcacctggctaagagacagttcctgtcactggaggaagaggcggaagactacaatcccagccagcaccgggctcagggaaattgtgcgtcagtggaggaagaggcggggttgtgtgctactcgccaggcttgctgggagttgtattctcataaaacctcccagccctttcatcacagggctgaaggactacacttccagccccagcatgcactgggctcagggacagcgcgcgtcactggaggaagagggagggctttgcgcttctagctgtgattttttgggagatgtagtctcattaacgctcccagccctttggtcacagagatccaggactgcaatcccaacatgcacccagctcagggatagtgcgctaatcactgcaggaagaggcagggctgtgtgcacctcctgggcgtactgggagatgtattctcataaacactcccatccctttggtcataaggctgcaggactacaatcctagcatgcactcagctcagtgacagtgcgctagtctaaggagaaagaggcagggcagtgtgcgccttgctgggcttcctgggagatgtagtcccatggcctctccctgccctatggtcacagtgctataagactacaatcccagcatgcacggggctcagggagagtccacatcactgcagaaagaggggcaggttgtgcgcacctcgytgcgtttgctgggagatgttgtttcataaagactctcagaccttttgtcacagggctacaggactacaatcccag

SEQ ID NO: 551639 - DNA, 1138 bp, Homo sapiens
gtaactacaattttcaactcttcctttgaatccataaaaagtataaattttgaattatttggatacaattagggcaacaacatttcaaagaaaccatattataattattaaaaagagatgtgatgagaaagttttaaggaataaaaatttaagtaatactagagaaagttttaaattatgctactgatgcattgcttctttccttacacaaaagggtaaggctgtaatctagcctttaatagaaaggtcttacatttttacatatggtaacaatataaatattgtaaatacagtataaaacattgacagataaaataaaaactggaaataaattgtactattagtcaaataaaagttgggaaaactggaagaaaatgctaatagtaatattgtgcctagagtcaattaaacatacaagccaaatattttaataattaattatataattgatacataacatatacatttgrgcatgctgttttacaacttctcaaactgaaattacagaaaaatgtgacaacatgatcattcagaaagtgaaaacacagtcatagtaatcttcatattaaagaaaacagaatcataaaataataagtgagaaataaggtaataattgtgaattcaatatatgttgaacaatattctaatttcccttacggaaaaagtttttgtaagaaatctgtaaaatgagtacttacaataaaccatcctacagtagaggctgttggcatacagtgtttaaatttctatgattaggtcctactaaagaaaagaaaattttaaaataaaataattagattttcctatttaataagataatttttgcctataaagtttttcagtctaatttttttgtagaattaggttttagccttcataaaacttgacattatgaagcagaaaacaggtgtcatctgtctctgttgttcctggaatttctaacccaaatgccaattcctccacaactcccctcacacacttctgaattgaagcacaacagatttattaaaaatggcataacagcggtgtccagaaatgtgcagagattttcccagatccccaaaagcaatgacaaactattcagatcatttaggttctcacaagattctgggaggacttcggctttcagtgtgaatgc

SEQ ID NO: 551640 - DNA, 548 bp, Homo sapiens
acttgagaaaattattcatacataaattctrttatattaatccactaaatgggaaagtagaaaaaaaatgagctaagagcattgttttaaaaactagttaatacattgagcattaaaaatagtatataagcatagttggatgagagaatgaaaaaaggagattgagaataggttcaaataatgaaaaactaatatattttagaatagcaaagaagatataaactaagcaatatgttcacatggagaaaacttgtttcttttaaatttctgaacattctgtcagagtaacttacaaattagcttagaaacagaatcctttctaatacagttgacttcttaacagtcaagtgtttaagaagcttccaagtttttcttttaatttagaagaaccacagcatctgcttcctatgtggtaagtaataaggacttatctagtgaatggcttgtaccactctgaaagatgcagtttaaatttcattactaccaccttcctgagttaaagtttagtttgggttgaaattgggaaggaagattttcagtaatttatt

SEQ ID NO: 551641 - DNA, 548 bp, Homo sapiens
acttgagaaaattattcatacataaattctattatattaatccactaaatgggaaagtagaaaaaaaatgagctaagagcattgttttaaaaactagttaatacattgagcattaaaaatagtatataagcatagttggatgagagaatgaaaaaaggagattgagaataggttcaaataatgaaaaactaatatattttagaatagcaaagaagatataaactaagcaatatgttcacatggagaaaacttgtttcttttaaatttctgaacattctgtcagagkaacttacaaattagcttagaaacagaatcctttctaatacagttgacttcttaacagtcaagtgtttaagaagcttccaagtttttcttttaatttagaagaaccacagcatctgcttcctatgtggtaagtaataaggacttatctagtgaatggcttgtaccactctgaaagatgcagtttaaatttcattactaccaccttcctgagttaaagtttagtttgggttgaaattgggaaggaagattttcagtaatttatt

SEQ ID NO: 551642 - DNA, 548 bp, Homo sapiens
acttgagaaaattattcatacataaattctattatattaatccactaaatgggaaagtagaaaaaaaatgagctaagagcattgttttaaaaactagttaatacattgagcattaaaaatagtatataagcatagttggatgagagaatgaaaaaaggagattgagaataggttcaaataatgaaaaactaatatattttagaatagcaaagaagatataaactaagcaatatgttcacatggagaaaacttgtttcttttaaatttctgaacattctgtcagagtaacttacaaattagcttagaaacagaatcctttctaatacagttgacttcttaacagtcaagtgtttaagaagcttccaagtttttcttttaatttagaagaaccacagcatctgcttcctatgtggtaagtaataaggacttmtctagtgaatggcttgtaccactctgaaagatgcagtttaaatttcattactaccaccttcctgagttaaagtttagtttgggttgaaattgggaaggaagattttcagtaatttatt

SEQ ID NO: 551643 - DNA, 546 bp, Homo sapiens
ctttactttaggtttccaattcaaaatagcgcacaatttcaaattttccacctttcctcctaccccattcatctctgtttatattgagaatagaattgtagtggtatttttcaagttctatgttttgtagcaaaataatatggaggatatgttgacaagaggaatatacactgctttaaaggttaaattgaagtaaaagataactatctgtgacactgtaaatctttctttcacgtccttgaaatcaagttggccatgtgagtaaggtcattgataagttgaaagaagccaggtcatctatcaactttgtaacctgaacatccarttgatctttgtgagtccacttccctgcctgtagcttgggcaaaataatgaaacttaatgtcagtttatgattttacattatgaaatcaatttatacatgtatgtgaatgaatcctcttaattaattgattgattgctccaccaatattagttatttttaaattttccaggatctggcttagtaagtactcaataaatgtccttgaactaacatggttaaaa

SEQ ID NO: 551644 - DNA, 896 bp, Homo sapiens
tagttgacaagaaaatttgctttggtgatccagagagcagtttcttagaaaagtcagccctggcaaccctaaatcactttcaactaatattaattgaacatctatgtaaaaaaaaaatctgtactggacatgtgtctaaacgctggaggatgtgtgtatgggaggagtgttataaacaaatttcagaaaaagctctcttttagtattttacattgagtttttaatataagttaaatttaaataaaaacagtacttgctgttaccaatagttttcttcctagatattgaagagaagtttgatttacragtctgtttttgaagttgaggcatttttttttccgtagaaatgtgttttataacatggtgttcaggtcctctaagtgctcacaaaagcatatttaagtcataatgtagctgaactatagtaatatcctaataacactatggaaactaaatacaaaatgcagcaatatttctatgggataatgcgttcagaatttaaatttgcatcgccaggaatggctctccacctgctgtgatgggagggaagttatcttagaaacaggccattagagtccctttcacttgcatgcagagcttcagcagggcaggggctgtagaaatatagaagtaggtacagaggcaaggtggggaagtgtcggagcatcctggggaggtgtcctgagaaactgaggcttctggtctgcactaaacctgggagcgtggcttggcccagccaaaccttggctgctaggttgtttttcatctgtgtaccccagggaaatgttgggtttcccttcttgaaatcccccagaattgatctccctgtttctctctctctttttatgccattctgaagggattgtatacttcctttaagaattttttgtgctttg

SEQ ID NO: 551645 - DNA, 1397 bp, Homo sapiens
gcaaaggaatatacctttacccagtcttccatatctccatcttcaatcacttctaacacctcatgttcctcaatggtcaactcatctggttgagaagcctgcagtgtaggatggtcatggacaaaattaaaaaggttagataaggagcagatgtgagctgatcatgacaaaaactggggatcaaaatattgaaatgattttgagaaacatgttgaacataaaaatttaaatgctgtaaaactttcataatgaggtgaagttttactttaaaaaactaaacagaataaaaccataacaaaaactcaagaaactgaatcctcaagaggcaatgacgttcaatgaacagaacatgtaagcctgggcaacacagcgagacccccatctctaccaataaataaataaataagtaaataaataaataaaattagtcaggcatggtggaacatgcctgtagtcccaactacttgggaggctgaggtgggaggatcgcttgagcctgggaggttgaggctgcagtgagccatgagtgagccactgcactccagcctgggcaacagagcgagaccctgtctctaaaaaaacaaacaaaaaaagagagcacttcctggaagtagaggacctgggttccaactccagcttctgtatcaagttattcaacttgatgcctccatttctttgaaatgacaatcctgccattttctggaggatgtgagtcaatgtgggatggataagcacagaactgtgatgatttgggaagcaaaggcaaacgagaaggcactgaattggaactgctaccagagggctcccatggacaagcatgcagtgaaaatgcaaagaactatgtacgtgaatttgatgatagtgggtgcagtgcctaggattgatctggaatcactgtaaagcagtggccaaaagaaaaaaattgtaggaaaggaaatgattgagatcagtcatggtttggatttcttatgctccaacttaactgtgtggagactgagctgatccatttgcgtgctaccgtacaagctgctaaccataatggttttattatccctgacagcagcartccaccagcatcagccacccacatgttgcccttgagactgccaaatctgtaaacgctctgaggctccacagaggggctggaaagtccgtgtggctttgcttcctaacagtcttgcctgtcatgtgtaatagacaggggcctgctggcttctggctctctagaaaacagtcttaaaagctttccccaagtcccaagatgggttaaaaccatcacctaaaaccataaagtttttaaaatctcacaatctcaaaatgtaaaattaactccaagttacacaaacaaaaataaggcaaaaaaggggtcattttcaagatcaatttcccattttatg

SEQ ID NO: 551646 - DNA, 527 bp, Homo sapiens
ttatgaaatgtatacatttaagattatttgttgtttttgccagactccttccaggcaaagcatacatttataaatgtttaagtgtattttttttaagttcattgcagctatagaaattgttccataatgtggaagcccctgccaagtttccagctctcaatttcccgagatgtataattatattattattattattattattwtttgagttggagtctcactctgttgcccaggctggagtgcagtggcgcgatctcggcctactgcaagctctgcctcccaggttcacactattctcctgcctcagccttccgagtagctgggactacaggcgtgtgccaccacacctggctaatttttttgtatttttagtagagacggggtttcaccgttttggccgggatggtctcgatctcctgaccttgtgatccacccacctcggcctcccaaagtgctgggattacaggtgtgagccaccgcacccggccagaattatattattatattatttcgattaaatgatttga

SEQ ID NO: 551647 - DNA, 545 bp, Homo sapiens
ttttcagtaactaagattggcccatggttcaggccagctcaccagagttggggccccatagccttctgacttagagtgcctggggtccactgaagtaagggagaagaaaatgaaaatttatggagcacttacagggctgggagcatctcatttaatccttacaacctaatgaaaaaaaaaataccatgatccccattttgcagataagaaagctgcctgagcttccacaggcgggataaaagaactgaaactgttgaactaaatgaggacatytaagtccaccaccctgactttggccttgcaagaccaacagagagcttggaataatttacctccctgggacacatcctgacagtcaaactgatgtgttattttcctttcacatttatgagatgctggcttagtaagaatttactggatctcgataaaccataaagcaccacttgctcctgaccctcttctctactgaatgtcccatttctggctcctgtgttttttgcatagaccaccatatatagaacacaggatgatgttgagaatgaaaa

SEQ ID NO: 551648 - DNA, 1306 bp, Homo sapiens
atcacgtgaatacattctatgtagagagatgaatgtgaaactttatgcagctatatagtgagataaacatcacgcataaaacttggagttccaattttccccaaatttgaggaaatataaactaatatgaattaaaatcttaaaatattttaccttaacatgccatgaacaatttatgtaatagaaaggaaattctagttttttttttaaaaaagagctgtacacatgaaggaattatgatataaatgagcaataaggaattatctgaggactacaattagaatattctgggctgcttgttcactcttctctgttactcaggaaacttggtgaaaaactgtcatcactgtaggtcaccagttattctactttatataagacaaccccctttattatatacctaaatatggaaatgcaattatacttctccttttgaattttgtgtgtgtgtgtgtgtgtgtcaaagaagcccatattctgcaaacagacaataggttaggagtagtaaggaagatatctgcctcacctccaggcccagtggaaatggaccattgggaagaagacagtcattacatgagtgatggtaaccagacataccactgtccttcctacaatatttccatggtttactattcctgccaaataatgtttaaattccccaacatggttttcaaggccttgtgcttctagcctcaggtcttttttcacactctctcccaactacctccacattcagacgcatttcagctgtgctgaatatcattccgtcttgaaacttaccaacctttcattcatattttagccttcacagatgctctttctactcccttcatttcctcttgccctggctaaaagctaaagtctatttatccttagattctcagtttcttcctcagtgtcttaattttattccaagcagctttctccctaaactaagctagatgtccttagttgccccatatgcttctacacccacttcaggataatttcattttgtctttttgtcaaatggattgtaagttctgtgtaactagagaccatacattcattcaacaaatatctgaatgtttactaagtggcagtcatcattcttggtattattctattactattayaccatggttgcctcattgaggacctgggacacagtaagggctcagggcattatattcttgttttccccaattggatctgtctctggagatcagggcaacatattctttcattcagaatttcacatggaggaggtatgactacaattcacatattttatttaacagtcatcatttaaacaccagtggttttt

SEQ ID NO: 551649 - DNA, 549 bp, Homo sapiens
ggaaatctatacttacagaggaataggaagatgttttatacaagtccaagatgtttgtctttgaattgcatcccctcctttcctctggagcaaaaaaatggaggactcagaattggaatttctcatgcctgaaagtttatatttctaaggaccacacattttatgtcattaataccctaatatttaattaacaatttaactttaatttatcttaggcatgtataaacagtatccatttacttaaaaaaaatcacaccagcctggttttcatgttccatgtgacaaagattttctgaacttttatcaggaaaaaaagtacaaaattcaattggggaagaggtgaaactaattgagaaaaaatataattagcaagcaaatatcctttctgtctacatttactatttttgccagattatttaatatatatatggtgaggccaagcatggtggttcatgcctgtaatcccakcactttgggaggctgaggcgggtggatcgactgaggtcaggagttcgagaccagcctggccaaaatggcgaaaccctgtct

SEQ ID NO: 551650 - DNA, 555 bp, Homo sapiens
ctctactaaaaaatacaaaaattagcctggtgtggtggtgtgcacctgtaatcccagctactcgggaggctgagaccggagaattgcttgaacccagaaggtggaggttgcagtgagccaagattacaccattgcactccagcctgggcaacaagagcgaaactccatctcaaaaaaaaaaaaaaagataaaaaagaaaatactcattcatttyattaaacttagttcattgccaatttgatttttccccccagtttggccacatgaatgcttgctgaatatactgactgcttgaggccctttttaacgtatccatacattcttacatcaaatacagcagttaaaagaaagaagttgggctctttccctacaaagccattttttgtgcgtaaggaaataagtaggtttcgatttttaataccaatctgaaaccagcaacatcaagaaattcaaccagttggattttcgtcctaaaaatgtgtattcagttgatttctgtcaaatgtcacagactgtcaaaataaagtctgcataggtttcttgtctgttgctata

SEQ ID NO: 551651 - DNA, 788 bp, Homo sapiens
taattcttgactctgtcttcctccaagaactcctgatgccttcagtttgtaccatatggttccttttagtgcacgctgctgggtgtcctgcccaggtgcgctccccaccttcacctgctgttttggggctgggaactcacagctgctcccctaggtccctgtttcagcgtggggcaaactctggcatgcagtttggggtgcagggtttctaggcgtcaggcagaaagctaggctgcagccaaccttcatcttactcagctcctaagagtacactcccagtattcactggtacaggaatccccaccccaggctctccttgtaaggaccttgaccttgaggcttaaaaagctatttcacagctgtatttatttcacgtgaagcagactattatccatattttatcaatcttgaaaccggggctcaaagacatgaaagttacatggtcagttaatgaaagcagtgcctactacaagccaaggctccgttctcattctcagaattcatcattctttcattaattcatgtgcttctcaggcaggtttgagattggactgaaggatcagggtcctttcgctgatttatggctgaatgtagtgggagagaagcactgtgtcttctttattcagctgggcaggacgggagctgaagggggatgtgactacctagcatggcttgagaacagatttgagaactccctagccagggctggyggatgggcttgaagctctgggtgagagaaacagcttaaagtttatagtagtggtctttgcctggggctacttattttg

SEQ ID NO: 551652 - DNA, 982 bp, Homo sapiens
gattacaggcgtgagccaccgggcccagcccatacatgactttcgaagtcacttagaaaatgccctattcctagtgggcacactcctatatcttacaatctgattcagttttcaaataagcagaacaatatcatatacccacagaacactggttttgtatgtacaagcttcgccgtcctcagcacaatcttcatttaaaatcaacactccctataagggaaaataatttatattctatttaattattttataattctacttggttttgagaaatgtctctccagattatggatgtctgcttgaggctttagggtttgagctctggcctaaagaagayggctgtctgggcaaacattccttccccaagcttggctctgaagtgcagctggcaacccggtgcccctgaagagtcagacagatgcaggttggagtgtggttctaccacgcactagcctggctgttaagacctttgaaacagtggttttcatggataaatatccattctgccatgtgaattgtgcatcgtggtatctattttatcagatggttgttgggatctaatggcatgagtatgcaacatcccaagtcagagtttagtaatcccaggtgcataataaatggtatttactacttttataggcaattttaaaaagaagagctagtattttattcctcctatgcccagtccagtgaatttccttgcacacagtgattcataacattggctgaatgaataaaggaatacatgaaaatatttctttctccttaaagcattttcacattcattacctaatataacaaccaatataaagatgtgacagtaatatcgcctgccttcatgcgctgttgtatttctttcttctgaatccttgatctcctgttgatttccatggctacaatcctagtttacaaaggtatttaaaaacagagccgaatgttctttaagagcatgggctctacagctgtgtgtctggtgaatcta

SEQ ID NO: 551653 - DNA, 615 bp, Homo sapiens
gggaggcatgaataatccaccccttgtttagcatgtaatcaaaaaataaccataacaatgggcaaacagcagccctcgaggctgctctgcctatggagtagccattctttttattcctttactttcttaataaacttgcttttactttgcaccatggactcgccctgaattctttctcgtgcgagatccaagaaccctctcttggggtctggattcagaccccctttccggtaacagtaatatggctgatcacctgtataagaatatctgatgtattaactatgacaataaatgttatttaataataatactttaaaacacgaatatttcatttttaaagtgctttctagaatacacagaactcctccatattatattcatttaatgttcagcaaccttctaaggtatatctggcaattccagttgcatagataaagaaactgaaatctcagraaagttaaatgacttagtaaaaataactctgctagaaaatatcagtgctctaatccagggattagcaaactactcaactctttggccaaatccagcctgtcacttcgttatgtattgccctcaagctaagaatcgttttaacattattaaatgatttttaaa

SEQ ID NO: 551654 - DNA, 682 bp, Homo sapiens
tgtgccagtgataagttgggggttctataaaaatgatgactttccagattctaaatcagagacagtagagaagattaattgtgctatgcttatatttattcctctacctatatttacacaygtggaacaatattttaattaaatctgacatccttcagaatgaaacagagcctgttctattacaggggattttttaaaacaggttggataattactggtgtgtgggcagtcacccacatataatgactcttcaagtcaagttagtgatgggagcatcttagcccaatccctggacaagccctggccttcccatgatcacggtgaactctccacgctacagaaaagcagagggtggcctgggaagtgcaaatggtgaggtgtctgggcagggacatcttctccagtgcagcatggaggcttggcttgatgaaagccagccaggtgatggcaggatcattgggctgctggggagaaggcctgggcttcattcactcataattccagtgtgatcttgatccaattgcttcatttctctgagtctgtttcctcatctctaatgcagtgattctttgctctagccttctcttgagccaaacattcacagctgaagttattttggaaccctctccccttggttgtcttgcaggctatgccaactccacttgtcaaaacagaacttact

SEQ ID NO: 551655 - DNA, 637 bp, Homo sapiens
aatgaccactttcttaattcactttttatctccagtgccaagcactgtgtttgctattggtaggtgactatgaacgtgtgttgcttttgagcaatctgttgatatgaggaaactcgatgacttgtagagtctgtgccaactgtaaaatactaggactcgccatctccagcatcaaatatctgaaatactgttgcaggtgtagtggtgagagcagaagttgggatctttattgcaagaaaagcagtcatgatgacgtgggaaatacaaattcactccccaagcttctgagtgccagctgtaccaggcagcataccagggcctggaaatactgcagagaacaggcagtctctccctgtagggccattccattcccctgggggagataacagttcctgctctcttggggagattggcatgagagccaattgatgaggaaatagaatatcaggtcattgcaagsgcccggaggcacagaaagcagggtcagggagtggagacactgaagggaaggaaggtctttgtaaagagctgacatcagaagagactggaatgaagcgatagtgagaatcgcatatcaggaaaaacttggggagaggttggtgcgtggcatggatgcggaaaagcttggctcttctca

SEQ ID NO: 551656 - DNA, 543 bp, Homo sapiens
tgggataaatttggcgagataaaatgcrggccactgtttcgagttctttatcattataatgcttataatttcacttaacaatttcagttgacatggtaaaaatgtactatttgggtgtgtttcatttgtaagtttataagtagtgaaatgaataacatctcacattttagtacttagagtttaagatatatacttgtgtttctctgcctggagcatgactcagaattacccagtgatcacattgagacccatattgtcgggtttaaacatcagaatttctggttcagtaggtataggatgaggcctcaatttcatttataatacctcaggtgatgccaccagtgcagggaccacacttgtggaaccaatatctgagatacacatttagtaacaatatagtgttgattttcataggtaaaacagcagatagtcaacatgattatttgactaagtcagatactaacccagatatagggaaaaaagcctctctagatagattttcatttcccaattttagcttttggtcccttcatgaaggattta

SEQ ID NO: 551657 - DNA, 556 bp, Homo sapiens
caaagaaaattaataaacatataaatcaaataaatgattcaggaaaaaattccagaactgaaatataaaaattttcagattgaaaagcctactgagtgcccagcacaagagacaagagaaaacccagagaaggaccttcccagtgaaattccagagtaaagggagaaagaagattccccagagttcattctttaaaagtaggtcctagccaaagaggaatcagaatgactcactgcaatcttgaaagctaggagacgatgggacaatgatttaaatattctcragaaaaagtaatcccaatctaattttccctacaaaggaaaattattaattgtaggggttgaaaaaagcaaaggtctcagacaacttattcctgcatcctccctcaagaaactactgatgggtgtgttctgccttaacagggatataaagaaagaaaacaacatgagatgcagaaaccagggaaactaatacaaagaagagagaccaaggctaccccaggatgatggtgcagggacatcccaggacaaaagctgtgcaactgcctagagatggc

SEQ ID NO: 551658 - DNA, 553 bp, Homo sapiens
gatgttaaaggatctctttttaaatttatgtcatatccgcttaagaaatttctgaagcctggaaaacattttcactgcggaaaaggttaagaataaaaaattaggcagagtagcatttttctaaggagaaaacaattcagcagatcaaagggcagattatgcaaattatagtaatggatttgtattttcccctggtgatcacagaagcctgtctgcagagaaaagtgactatacatctgaaaatatccagattaaggactgacagtgaccgtgcaagtagaaaggaattatctcctgtaacccccaacccaccaaggtcctttgaagataccactgctatcaaaacagccttgctacggaggagagcgctagctgggacttccagcttttcagaagcatgagatatgcmcctagttgagaactaacagctgaaaccaactacagtgaaggcaccaaagaagaccaattcccagactaggggttgagagctcaagactcattctaggctctgccccaaaccccattttggtctcggacatgtccttcagattct

SEQ ID NO: 551659 - DNA, 511 bp, Homo sapiens
gtgagctcacactcttgccagcaataccaaaggcctctctatgaatttcccttctccagtggttaaatctactgtccttacttcctccctgctcttggcatggaacattccatactctcagccacctctctgttagagctgggaatgaccccttcgggcaggcagtcccaagattaagacccctgcttatgtgagaatcaaaggattcccccaygtagtcagtgcagaaacaaatggtgtatcatgtcccttctgtaagattcagtcagtacatccctctttcactggtatccagaacaagtgtgcttctattcataaatgtgtttcctttgctccgtcaccctaaccttggccagtgattatattcccttcttgctttggctgctaggaagctcaaagccatgatgtaagtttaagcacagttactgtcttggtttagctttctgggacagttatcttcgtgttccttgtgttcacaaagtttctcaatctttgatgttttagttaatga

SEQ ID NO: 551660 - DNA, 511 bp, Homo sapiens
gtgagctcacactcttgccagcaataccaaaggcctctctatgaatttcccttctccagtggttaaatctactgtccttacttcctccctgctcttggcatggaacattccatactctcagccacctctctgttagagctgggaatgaccccttcgggcaggcagtcccaagattaagacccctgcttatgtgagaatcaaaggattcccccatgtagtcagtgcagaaacaaatggtgtatcatgtcccttctgtaagattcagtcagtacatccctctttcactggtatccagaacaagtgtgcttctattcataaatgtgtttcctttgctccgtcaccctaaccttggccagtgattakattcccttcttgctttggctgctaggaagctcaaagccatgatgtaagtttaagcacagttactgtcttggtttagctttctgggacagttatcttcgtgttccttgtgttcacaaagtttctcaatctttgatgttttagttaatga

SEQ ID NO: 551661 - DNA, 1144 bp, Homo sapiens
aaacaaaacataaaaagcagacatattactcttcatgagttcaggctgacattcatttttccagctcttattagtgaaataaaatgacaacaacagcaaagtaaacacatgccaatattctttattccaaagcacagactgtcagcatgtgtgagcatgtgtgagcatctttcagacttgcatagccagagtatcattatcttctacttcacacattagaaacagtggaaatgttgagctaaagaaatgtgatatttacactttgatagtgtgtatctttctccaatatgggttatcatactcctgggaaattcacttggattggtctctaggagcaaagatgtgtgaccttaaatctgattgtctcagaatatactgtcctggacccagtcacccgtgaaggagagagtctttaaagacacagtgagctctattgtatccaatggggtaactgtgcatagggggattttaggaagtagtgccccaaattgcctttcctgataatgtggattcctcatgggctggtaaatgcccccacatacagtgagctttaaatgactggaaaagtgcaattagaactttgtttcactagagtagggtaattttgacagatgaatctctgactcatgagaaagaagtaaaactgaatgtcaagaagatgtagaatacgatagacacttagccttaaggcaacttaaaatatcgaaagccagaaagagcttttctgcccaaccgaacaataggaataagatggataatctattacattacaacttatattgaacctctcagttcaaaaggaaccgattagatgcaaatttaagggatacaacaccagtcagaacaaactgaggtccacaaaaagaaataactgtaaaaattgttaaaatggaaccgaatatcaatgacttttttgaccattctaaaagataattgtctgaagaaaggccagcgtcatactgtgtgcatgtataatgcatgtacattttcatatgtgcatatgtacaatatgcatatgtatatgatatatatggcatatgcgcaatagcatacatttagatcatatgtaaaactaagccrtatgacagttcacaaaagacgagggaaaataattgggagtatactgttcaagattcttgcaatg

SEQ ID NO: 551662 - DNA, 634 bp, Homo sapiens
gcatgagaccttttgtgtgtttgcgaaaatacattttttttgtgtaatggcacgtaagtaaattaaaaattagtaacacaaaccaaatggaaaagtacatcaaatgcaggatttgtgatttcagagcatacacttaggaatctatgttttgttatttaacgagtattaaaacataaattacaagtacattgtggtttcagaataacactgtatttgacttgatgacatagcgatctgttcacataacagcatatagtgcagtgcttgacatgtagttggtgaatgaatgaatgattgaaaaaatgaatgaatgataggaagtccatttatatcagagtcatcctagtagctaaattaatgactgactataaaatgtcaaattccccattacagtgcaatgattaccaaccattttaccaccacagatcctgagatttgaaaagttttgtctactaaacatgatatatttatttgatagcaatttctttttctcatttttaataaaagtgacatggaataatagtactgacagaattgatcacacaatagcttcatatttctcctattarggtaacagtacagtgtggttaaggacatggatttgcagcaaagagcatgggctcttaaccggatt

SEQ ID NO: 551663 - DNA, 1099 bp, Homo sapiens
gaattccatctgatactcagtatatatgcatttatgcatgcacacacacatttctttatttattccttcattgacaaatatacctattaagtgtcttaatcatgcacaatagaaatatgaagttcaggaaagctaaaaatcacatcccaaagcctatgtacttttctgattttattacctgagagctgcttggcagtttatgctaacagcctgttataagcagagataatacagttgtcagttctgcttagcaattgtgcgtgtttcccagacgtctattttctgaatacatctcttggtgcagttttggagggagtggagaaatgtcttgtgagggagtctttttctccaccatgcattcctctcacttttctttgttgcattgaaggtgctggatgttttctcttgccttttatccaagtgcagaaagcttgaagttcatgttcaaaattttaaaaagtcaggtcacacacacacacacacatgcacacacacacactcactcttttttctgggagatcttggcatgaattttaagggcttctccaagaaatttctaccttttaaatgaattacacaaaacctgattaataattgaatatgaaggatgatgattttcaagagctactaatgttaggggactgtactatatgtttttctgcaagtctgaaggccttggatctttggtatcactgggtatttatgttcaaaattcatacaatctattctaatatttaggggcttggaatcatttctttcaaatactaggtttctgtttggaaatataccctccattttgctcaattccaggaacatattttttaaattgtgaaagcttctgtatttaaattttagacatagggtaaacacttatttcctatctgtaaaataacttacattgacttatttttgtaataatacctgaaacataaaattaaaatatttytgtatagagatagccatatctcagtcaattatctaatttgctcctttatttagaagtttgagctcaacccatgtaagcaccctaaatgtgccctcttctcattttaaaacctgtcacttcttccctctttcgtgcaagctagtttggaatgac

SEQ ID NO: 551664 - DNA, 895 bp, Homo sapiens
atatgttaaaatgcctgtttcaagtaacaaagatttccacatcaaattgcttgtacaatgagaaaatgtgtcatctcatagctactgtccagagatgaggcctgtttcagggtaggatgcttcagagatggtgacttcatcaaagatctaaattctccctgcttgtccactcagcctgcttctgtgccacaggcttagctcccccaccatggaggtagctccgtgcatgacatcccaacattccaacatctagaggcagaaatgaacttctatcaatgtctctgactcacgagccaaaaggcctctcattggagagactaggaccatcttcaccactaaacctatmtctgaaaaggaaaaaggcaccataatatttggattagaacaacaacaaattaactctaaaagcagccataaacccacctgtctctgagttgtgtaggggggactagcgatcaccaggaaaaagcagggctctatctccaggaggaggggcaaagacatttggggtatgaaaaagagtttcttcatatccccaagatgaaatagttcttttacctgctaatgcagtacaggttacaaagttgtgctcaataaatcatcatttttattcctgcaagtgccaagaaaatgctgtctgagggttaaagacaaaatggcgggcaaaacaacttaagagcgtgacatgtcttgttcaacgtcatatgagactgaaagagtcaaggagactaactgaaaacctgactctaagtgtctcataattcatatttttaaggcatttaatttatgagcatatggcattttatttgcttttaaggtcttatgttaaactgtgcataaaattataatttatgaaaattttttcatgattaataatttcatgaagttgtttgca

SEQ ID NO: 551665 - DNA, 895 bp, Homo sapiens
atatgttaaaatgcctgtttcaagtaacaaagatttccacatcaaattgcttgtacaatgagaaaatgtgtcatctcatagctactgtccagagatgaggcctgtttcagggtaggatgcttcagagatggtgacttcatcaaagatctaaattctccctgcttgtccactcagcctgcttctgtgccacaggcttagctcccccaccatggaggtagctccgtgcatgacatcccaacattccaacatctagaggcagaaatgaacttctatcaatgtctctgactcacgagccaaaaggcctctcattggagagactaggaccatcttcaccactaaacctatayctgaaaaggaaaaaggcaccataatatttggattagaacaacaacaaattaactctaaaagcagccataaacccacctgtctctgagttgtgtaggggggactagcgatcaccaggaaaaagcagggctctatctccaggaggaggggcaaagacatttggggtatgaaaaagagtttcttcatatccccaagatgaaatagttcttttacctgctaatgcagtacaggttacaaagttgtgctcaataaatcatcatttttattcctgcaagtgccaagaaaatgctgtctgagggttaaagacaaaatggcgggcaaaacaacttaagagcgtgacatgtcttgttcaacgtcatatgagactgaaagagtcaaggagactaactgaaaacctgactctaagtgtctcataattcatatttttaaggcatttaatttatgagcatatggcattttatttgcttttaaggtcttatgttaaactgtgcataaaattataatttatgaaaattttttcatgattaataatttcatgaagttgtttgca

SEQ ID NO: 551666 - DNA, 246 bp, Homo sapiens
ttgaatcaaaatattacacttatagaagcaagagcaacggctctatatctggatcactgcmgtgcctagaagatacaacagcacaatttacaaatccaaatttccaggaagtctctccacatacctctagtacaaaagatgcttcagagactagagggtcagtggggaaagagagaaaatattcaactcctagttcaggacaaaagggaagaaagccggctgttgaaagaaatccaagaatgactg

SEQ ID NO: 551667 - DNA, 559 bp, Homo sapiens
gccagggatttcagggagtaaaaagtacttcgggtaggctggctgcactccaggttgtgagtagtggtctcaytgtgggggattggggtgtttgcaggaggcttttgggtcctctggcaggaatccttgaacatggcttggatgctagcacaggccctctcattctccaaggcaagaattgattttccattgctttcatgaggagtccatactactcttcatcagcgctcctaaacacactttttttggcttgcaattgcctcagacggcgactgagacactctctgaactgcatctgcactcgtgaggtctgttcaaagtgtgagacttctgcttcaccttcaacttgcctttgtcatagttcctgcctttcccagagagccatgttgagtagcaggagcccctgtgaggcccaggatgaagagaggcagtgagctcaagggccctgccattttctgctgacatctgcctctggggtcttcggtatgatttcatcacctggacaccccttaacatctcagcagactgtattcccttcccccatgggacccaattcttg

SEQ ID NO: 551668 - DNA, 1754 bp, Homo sapiens
caccactccttcaaatagcaggctcgtggaaaggggattccaagattctccccctccagctacggcattgctttacaatatttaacattccttgactaaagagcaagtctaaattgcaagtactcctaggaaagggactggtttagatccatgacagctccctctctgagagaagggcgtgccttactccaccagaccaaacaaaactaaagtgacctctctgctccccccagagaggggcactggggatggtaaaagcatttctgtccctgaacccagggatgaagtagagaaatgccacttaaccatagccaggacccaaagaattgtgagaccaagctacaaaaggctcaagtgaggggctggaaagagtgacaaaaacagaggacagaactgtgagccaccgcacttcatttaggaagtcagtgctaaggtaacaggaaggatcgggcgggctgtcaggggagtggaacgtgttagagaaacaacaaaactgagtggagatgcaaggcaggagactgtttataggtgaattagcagcagagggtgggtggtggctgtgcctggggcaggggtggtggggtgaggaggtgggggtggcattgactttgagggagctcttgcagagggcagccttttaaggtgaagagccagagctctgggtcttaagagttgggaaagcaggttatatttcacatccttccctgaatagagaaattgaatttggtcaagaataggtcctaagaagcagctgtgagcaccccacttttccatcttgttgatgaatatggagtgggagcaaagttgagtgtgggcatctgacaaggtctttatgatcctagatgcacttactataccttcctcctcctcctctgccttggctaatgggctgtgggtacccaccacacagagggctataagacactcattgtggctgatgcaaaagctgggccctgccctcctggccttctaaggaaagtgattattgtttttggcttgtttttcaactatccctttgcccccagcaggactgaacctttccactcttaccatctctgggtcccttcagatcttttatagccttgaactacctgctacaagatttttttctgtcctaagaacggatgtctggtctgtttcctaacattaatcccttccacacggcacagcctcatttcctctagatcagagagatggcttctggattcatctttccctgcaatccagcttctcctcctggggccctcatactgcagactgggatcatcatccaggcttttgcactgggccaggaatttgggagtcatcctggatccgtctgcccctgtcaacctttctctgtcaacagatatttattgggcatcttcaacagccaggccctgttcatggtgctgaagaacagcatgtataaaacaaccctgccctcacagggcgatcaccagtgacctgtggtgtggagtctccttttagctctgtctcctccttcccactgtcaccatccttggtcctcctctgtcacctggaatactccacttggtaaccagcatgatcttataacgctagttttacccttgtcagcactttgctgaaaacctcaaataaagacttttttaaaaatgtgcgatkgaaaactaaagttattaattatatcataaccattggacctctttttaaaatgcacggaagccttagaatgttattaatggatatatatctatggtaaaaatagaaaaaatatatgatggtggtgcctc

SEQ ID NO: 551669 - DNA, 627 bp, Homo sapiens
ggaacattgtgaaacagagatgtcagaagctctccaaagctgcctccagtgaaggcctgattcctgagccttgtataaaaggagatttgatccaggataacaagaataggagacactgaggcttggagctgattacatgtccatcctttgtggaagaatatagaatacagcaaactgagctgcaaaggcccatctcaattgacaaggtgccacctcaggcaagatgtaraaattggataaaaatcataatgtatttatgggctgatggtacaaaattagctgcattcaatggaatttttaaagagaatcatacttaccctattttttgagtccattagaacacaaaacctataaaaacatttaatttgccatgtgcatgatttgtgtcagagacaaagtaaaacatggcattcatcttggatttacttaatgtctacatttctcactagactacaagttgcatggtacagataatatttgcaagttgtctttattgctgttctattgccaaatagtagcaaaatgcctagcgttgtgcttggagcacagtaggtgctcaataaatgtttatataattaataaattgatgaataaattcatgagcatgagaaaggaagactggaatta

SEQ ID NO: 551670 - DNA, 663 bp, Homo sapiens
ggaataccgatttaattgcacaggacaagttcactgtcggtctctgagaacccctctcctacatactgttgctaggaagggtgtgggaacagtacaattgacaaataatgtatgggatggacaataagaaatttttctccagtctctytttgatatgtacatgtagctaacataccatatgctagcttaccatactagaaccttagcatattagtccccatattttaatcctgtttcaccttcttctaaaaaaaattcattcattcattcattcattcattcattcattcattcattcctttgatctcaggtataatttcctggcaggttcctagaaagccttcttccaattctatctagttctctcttatcagtaacaaactaagctttgagaataatttaataaatcttttttaggattgcaaaaataatgtatagacactacagaaaataaggaaaatatatataaaaagtatgaagaaaaaaaaaatcaccatatttccagctaaagattagcacattttggtgtgctttctttcatatatttgaaaaccaacctatatataaatgtaagcaaagatatttctttgtttacattcatacaaaatagatgtttatttaaatatatacaaaactggagtcacattggggttttgattttga

SEQ ID NO: 551671 - DNA, 2275 bp, Homo sapiens
tttcaaaataaattaataaatgttaataaaggtacaaccaacttacaattattatactatattaaatctcattttaataaaatattttttcatcaacctatttttgtactattgatactgccgacagttttaaattatatttttataaaacctttaacaatatcttactaaaatgtaaaataaaaattactaaccaacaccacactaaacatcataaataacactacataattctcgtacttaacaattttgttatagctgggtttatgggccccatattaacacatcacttcaacttaactcatttaaaaaacttctaattcaattatacataatgtataatactaactttagagtctgcatagccatgcttagggaattataaagagatggctctccatggcaggtcatatccacagctttcttcaaagacgttatatgttttcttgggtttcctaaaatagaaataagatctttaaataaaatcctatatattaaaaaagtttatgtttctctcaaaatttacatatctatgatgttaaagaacagaatcctttcaatgtatatttctgttggaattttatctgcaatattttgtaaacactctcacttcatactgaaaaacagaatacaaataatctccttatagactagcatacatattttaaaataatgctaacctagagtgcatttttttactcttaatatttccatatttcatcatttttaagaccaatacattttcacatttaacatctctgaaatcagcatgtgtttaataatyactggtagccagcagcacttgtaacatagtctttgcctgttcatatgtgaacctacaaataggtcttcatatgttgttgcttcaattgcattatgtacattgtcctcttcatggtgagtttaactgccatttaaaatgtttttaaggccaggcgcggtggctcacgcctgtaatcccagcactctgggagaccacggcaggcagataacctgaggtcaggagtttaagacacacctggtcaacatggtgtaaatcccatctgtagtaaaaatgcaaaaattagctgggtatggtggcatacacctgtaatcccagccactagggaggctgaggcacaagaatcacttaaacccagaaggtggaggttgcagtgagctgagattgcaccaccgcactccagcctgggcaacaacagcgaaactccatctcaaaaaacaaacaataaaatgtttttagaaatgttgttaatacaaaaggctatatttttatgtagaaaggtgtggaacacagcagtgaggcataaatttattataatgaatcaaatattgatggaagaatgcatgcaattccgtatttttcttgagggaagaaatcaagaactttacaagacctaagaaacgaatattcccacaaacagacgaagctgtgttatcttaccaaatagcatctgaaaagattgtctatcttatgctaagcaattcaaatgaaggggggagaagctgccaaatccttttttttctttttaatataatatttttttatattatttatatttagattatatatatatctgttgccaggctggagtgcaatggggcaattttggctcaatgcaacttccacctcccaggctcaaaccatcctcccacctcaacctcccaagtagctgggactacaagtgcccagcaccacacttggctaaatttttttgtatatttttggtagagacagggtttcaccatgttgtccaggctagtcctgaactcctggattcaagcaatcctcccgcctcagcctctcaaagtgctgggagtacaggtgtaagtcaccacacctggcccccaaatttgagatgtctgtacatgtcaaattaccaagaagctagtatagccaactcatatatcatttgatactgtgtcaaagtttaactactaggacttttccttcttaatggcttataaaagtatcttgtaattgatggaatctgagtttcaatgaaatatagtattccgtaaacattttccatttcagcactgtcttcgtatcaatcaataacctaagtatcattaaattgattttgtcataaaatataatccatcaaagcatactattaaacatttaatttttaatctgtcactattatacataatgttacaaagagtatctttgtagagtgatcattctccttccataacattccctaaatataatttcaggaacaatttttatgcttttctaaaaaatattgaactaatttgtaagactatcagc

SEQ ID NO: 551672 - DNA, 557 bp, Homo sapiens
gaggactgaaacaacctgtcctatcacctcatcccttgatagcgacaaatgactaagagagctttcgagaattcttggctaaaacggaactccataycttcccccttaaaccacctcccttctcttacctttcccattcttccaatgcagcaccgcttctcccccaggttcaaaatctccccctcctgctcacagcacaggctactttgaggttgctcacctccactcactacctcctctcccatcactttttgtgtgattacggcaagagctgcctacttggaaccccagttccaatcgcaacaccgctcttacttcaaagtcttatgcttcccctgactaatgaaatcagagtttctcacgcatcagagaagacgactttagaacctcattcccaagaagacaccctgtgttcaggggctctgtgtccaaactgaccaacaagcccaatgaggaaggagggtctgggcagagggaggttgaatttaattataaagctacagcaaactggcaccaactgcatgccaagcctccttacacacattttcttttctttt

SEQ ID NO: 551673 - DNA, 1482 bp, Homo sapiens
ttaaacactacatgtatctagaaaccatattacaagaaaaaaataacatttgggtgtgaatatatttcatgaggaatatggtcagcattttaaagttgaaaatcacactgtgtatttgttcttagtaaaagcatgaatagtccctttcatttggaattggacaaaaaatactcaattatttaaaaaaaaaactctacaagaaaacctgcagatagtttcaattatctcctgcttttaactcaactgcattcaagaaaattacttaaaacctaaaccacatagcatattcataaaatcagattcttattgtttctaaagtgccatgtctttcaaccctaaattctgctgtttatttacaacacatgaaatgaagcacaggccatttctttgaagaaaagttttctaacattgtgagggcaacaataaaatattctccagaaaaactacacaaaaaatgcattaaatggtgttttaattcccaagcataaattttaaattyaatttaaaatgtgtatttagttaaacagtaagctaaagaaccaaacattcttttttgtaatgctggacacaacctgtgaaaattttctgcatttagattcaacaatgctcttatctgcagctcatctccagagagacaattaccatttcctttgccttgatcttgtttgtttaacttgacacagtgaagaaagggctgacattgaccaaaatccccagcattaatttatttcatgttcagcattcatcattgccatggtgcaagcaagacctggcattcatttgaaatacctgcccaagaagcactacagaaaaaaacctagctgcttggaaacccaatacattcttcatatgatcagagtcatatggacagttagaaataatgtatgggtttgttgaaatttcttttaagaaacgatatgtagcatccagtttgaagttaaagtaacaaaatttatttcctgcatgattacaaagattaaacaacagagccttgaataaattaacaattggaaatggaaatacttaaattatgtggtcttgaccccaaaatacaagtttccttccttatgtttttctagttctttataatgacagaatctaatcactaaattctcaaatgaatatgattcattagtgaatagaaccatactttttaaaaattttctacataaaagattagaaatcttgtgttgcctcttatgaagtacaggaaaagaaaaagaaaagtaagcaaaagaaaaaggtccagcattgatatgccatggcatacgtctttaaaaagcatgcttcatattcaaccctttatgataaataacttggatttaatctaaattgcccaacataatggaatgtttcttatacaaaaaaaggaaaagaatatgcaccacagtagagccttacacttgagggcagacatatcaacctctgctggcttcgagctttcttcttcttcagaataatctgacaattgtgtggacttaa

SEQ ID NO: 551674 - DNA, 684 bp, Homo sapiens
taactcattcagattttagtaatgtaatatgtaaagggtaaaatataaatagaaaagttgaacagacaattttcacggctarttgaaaaaattaagtatgatgtgattatttcaaactataattcatatttttactcatacttggcaagataagtgtttgttttaaaaattagtagaaaataaagcccacaggaagtgacaattaagaggtaaatgtgcggtttagcttcacattagttatttaggcatatgttttgggggtttttttttcatgtttgccactttcaaaaaacaatcaataaaaggcatgtgaaaatatctaaatgaacacaggggaaatagtgtcagaaatcaatacttctctaccagcatgtttaacctgctgaaatgaagtgttaatcacagaaataagataccatattacatttataaactaatgaaactagaaaaagcaaagcgtgtgacactataattaaacagctggaagacatccaagcctgtgtaagttgataaccctggtacaatctctggcaatgaaaaggcaggtctgcagtgagttgatatggccagctcagttgttaattgaataacaggcaatctataaacactactaattgcctatgtgaaaacctgtgtacaagtagagaagctgcctaaagaagtactccaggaaaaactacatgg

SEQ ID NO: 551675 - DNA, 568 bp, Homo sapiens
caacatggtgaaaccccagctctactaaaaacacaaaattagctgggtgtggggtacatgcctgtagtccaagctactcggaaggctaagacaggagaatcacttgaacccaggaggcagaggctgcagtgagcagagatcacaccactgcactccagcctgggtgacacagagcaaaactcaaaaagaaaagaaaagaaaagaaatctggaaactttaacaaagttggcaaaaggtaaacattctttaaagggttaattgggcttgaatttgattcacaattggaataggtatactttgaagatttggacttgtacatccaaaggatttttctttcttgagggctcccattctaaacaaatgtcccttaagtgtctatagaaatatcaaattgaaagaaaggaaaaatgaaaaagaaacaatttcttaactggtctgagaaaaacacatgaaaacaccaaaaaactcccttaaaaagattaggaggtagagctcagacttagaacaaaagttaygaattgcaaaaggcactcagaaaggctgagacttaggttaaaagggatagcca

SEQ ID NO: 551676 - DNA, 995 bp, Homo sapiens
agttgaccccgcacctgggatatgcttatatttggtgtggggcagagaactgagtgttcttgaaccacttccacccaaccagagggaggtggggacatcaggtacacctcatcccctgatgtcacagccaagtacctggagccaccaggactccctctgagcccacaaaggagtgtcttctcaccaccccgattatactggtctagttatgctttggagttaaagccaggctgctattgcagggctgctgcaatccttgcaagcacagttgttctttgcttgcgcttgctctcgctctcgctctcactctcactcttgctcgctctctttctctctctctgacttcagtttaactttttaaacttcagtaataagtgttcctcaaaatagatggtcttcctggttgtaggtacagccagcagggttgagttctgctgccttccagcatggttttcctggggcctgtaaaagtcctgcaaatttgctctgacactctgttgacatggaggtcctgtttgttgttataaataaggaccagtgtctctaggacacaccttactgtgtataactgaatggcagattttgtcccttacttcttaaaaattaaatggcagaggagctggccatgtaaaagccctgtgtgtgtttaccaaaaagtacttgaattttgtttgggttttgtgttctggtgcatatgaagtgaattttggtaggagtatgtgcattcagagaatatgtcatcacacttttttctttatttgagtgccacttggctcttatttgattaaggtaatttcagtgacatattttgaagcaattcaccttgaaaggcagaggcaccacccaggtgcagaaaccttccttgggttatgcaacgcccagcgtgggtggaaccgcactcacactttacctcttcctgaaccacagccctgctctgattgcrtgatggaagctgaggtgcctgacaagtggaaggaggaaaaggaacattctgc

SEQ ID NO: 551677 - DNA, 1241 bp, Homo sapiens
tgacacattgctgtgtttgcctgggaaagggtacatatttttctaatcatcacaagggcactctatagataagagcaggctgtagatacagcaacttaagacagaaatttgctggcttcttaggaatagcagctggacagggcaagcagacaaatcctaaatcagctgcttttggaggtctggtgtcaaaaagctagcactgtcctgagtgtcaggatagctggcctcgattcctgtcagtaacactagctcattgcatggtcctgattcaataccctccgttttccctgcttcttgttcttattctttctctcctcttggtttgttcctcatagcttcaggtctcagctaaaatgtcttgtctttggtgaaaacttctatgactctctaatccaattcagatccctatgtgattaagttttctacactctgtattctttcttctcagcacytaatttttgatgatttaatgtctctctttccaaggaatgttaacatctcaaagggaagcattctgatcagtcttgttcagggagatggctttgctgtctaggatagtgctttgtttgtaaaagatacccaacaaatatgcattgaatcaatgagctaataaacaattctgagaagaggaaccaggttcttttggttattatctgtgtgactctggcaaatgacaggtaccctgtgggtctcagtttctacatctgtaaagggacataatataaatttctgcctatatatcagcaccattgtaagaatataggagataaaaatgaaacacctgataactgtaaagagcccttaatgttggccgtataaataacagttaaaaagctgtgatttatcttccattgccataaacaagtgaatttgctttaggttagatgagaaactgagattatgaaagagggttttatccaagctgggaagaaaaagagaaccttcttctacaacactattctagcttgggaagaaggtataggaatgaaggaaataagaaatgttttaattcctacagacttttccagacttaattaaaaatcatctgagtggttttttttctcaaggtagaaaagaattacaatttgggttggcaatctcatggagagatttcaatgtatgcattagtgttaaaagcacaggttttgggatcacacagaactgagtttgaatttcagatttgccccttacgagctgtgtgacactgtaaccttaagatatttttaatttctctgtgcttt

SEQ ID NO: 551678 - DNA, 1344 bp, Homo sapiens
tgatttttttttaaagaatttgcaagccaaattaaacaccagtttccaacacatgctgtaagcaaaggaggaatccataaaaagtaggactatgcccaaaatatcagtactatgtgtgagagcagctcgggggtagcccttgctgtcctagctgctgtttattcacatacgcatgcaggcatgatagatgtgtgaccggaggacgcaggcctgtgggaatgacatgggtctgcatagacaagcctttgagttgttctatttggagaaaatgcaagaagcctggcgggtacctggtggttttcatgtcacctttcacagctgtaagggaggtcacacatccaagtaggggataggtaggcattatgagcatttttcaggaccctcttatgatggacttgtaaggtgtgcacctctctgtgagaaacatctgccattcctcctcaggtcttaccatgggaagcatttttagttgaaatagtagttgaacacctccatcgtttgtaatagatggtatagggtaataaaggttgcagtgaaccttattgtctagcctacttttcgtatgatttcaggataaaggagttctgtaatgaaccctgcttgctggtcctcagagttgctttcaagtgcaggtctttgccttgttcccttgcagtttgttaccctgattataggtgttccaaagtcccttgtcttaaaagcagggagaagtccctggagccacctcaggaacaatcaatccagagcactgcttcccttctcagtttagcagtgcagtccacgaaaggtctgggaattggagacactattaattcaggctcttcagtgtctcccgtcctctccaccgctcatccgtcttgacatcacaattcattcccacagggtgacatcatctctgctggaaacctgccctcactcttccgcagaccaaaccgtggactgcatggcattcagacagattaggagagggcaagggtatgagaaggtcaggacgacccaggtgactcgtctaccactgctaagcatctgccatagacactgtcccttccaaaatgtttgcaaggaatataatgcaaccatttaaaaagacgagtattcagaatgcaacagcatggaaaatgcttactgcaatatggaattatattttaatttattggaaaataggcattacattcaaatgattcaaaattcaaaagatataaaagggtataaaatgaaagtctccttgcctctcctstgtacagccacccagtttgtgatgtttggtgaaaaaagaatatgaaatgaaaccccccacctctctctctctctctctctctctctctctctctctctctatatata

SEQ ID NO: 551679 - DNA, 1344 bp, Homo sapiens
tgatttttttttaaagaatttgcaagccaaattaaacaccagtttccaacacatgctgtaagcaaaggaggaatccataaaaagtaggactatgcccaaaatatcagtactatgtgtgagagcagctcgggggtagcccttgctgtcctagctgctgtttattcacatacgcatgcaggcatgatagatgtgtgaccggaggacgcaggcctgtgggaatgacatgggtctgcatagacaagcctttgagttgttctatttggagaaaatgcaagaagcctggcgggtacctggtggttttcatgtcacctttcacagctgtaagggaggtcacacatccaagtaggggataggtaggcattatgagcatttttcaggaccctcttatgatggacttgtaaggtgtgcacctctctgtgagaaacatctgccattcctcctcaggtcttaccatgggaagcatttttagttgaaatagtagttgaacacctccatcgtttgtaatagatggtatagggtaataaaggttgcagtgaaccttattgtctagcctacttttcgtatgatttcaggataaaggagttctgtaatgaaccctgcttgctggtcctcagagttgctttcaagtgcaggtctttgccttgttcccttgcagtttgttaccctgattataggtgttccaaagtcccttgtcttaaaagcagggagaagtccctggagccacctcaggaacaatcaatccagagcactgcttcccttctcagtttagcagtgcagtccacgaaaggtctgggaattggagacactattaattcaggctcttcagtgtctcccgtcctctccaccgctcatccgtcttgacatcacaattcattcccacagggtgacatcatctctgctggaaacctgccctcactcttccgcagaccaaaccgtggactgcatggcattcagacagattaggagagggcaagggtatgagaaggtcaggacgacccaggtgactcgtctaccactgctaagcatctgccatagacactgtcccttccaaaatgtttgcaaggaatataatgcaaccatttaaaaagacgagtattcagaatgcaacagcatggaaaatgcttactgcaatatggaattatattttaatttattggaaaataggcattacattcaaatgattcaaaattcaaaagatataaaagggtataaaatgaaagtctccttgcctctcctgtgtacagccacccagtttgtgatgtttggtgaaaaaagaatatgaaatgaaaccccccacctctctctctctctctctctctctctctctctctctctmtatatata

SEQ ID NO: 551680 - DNA, 554 bp, Homo sapiens
tattaactacagccattcctgtttaaatgcttttttaaaaaatttcagtcctccaaaaaagactgtagaatgttaaacactggagatatrtttttaaaggtttttggtatttcctccttctagaaagacttgcacatacacaaagaggcaggcagtgacctattgagccacttttccaggcagaaggagggaaggtaggcagagacgacatacacggcagcctttgttgcctgacctgggacttggccccagacctggtccttgccagagatcctcaagggacacccgaggagtgtgaactctcacggtggttcttgtttaaacaactgtttttcaaataatgacagtcataattttagtgctatacagaagaacgttctaaaatttaatcattactcatttaatgcataatagagcaaaatataactagcatattaaaatctttatttttactggtatttccttcctaaattattttcttcttaaagcagtttttaacatatgagccaattttaaagggaagagtatttgtaaatacgacgcaaatcctgaag

SEQ ID NO: 551681 - DNA, 587 bp, Homo sapiens
actggtagaaacacaaagtagggctcccagggagttggctttgtgatggtccagctgagaaatagtgagagctggaactaaggcagtggtgatggttatctgaataattaataattactgtctactcactyccgaaaaactgcagtccctctaattgaagatatatgttctctcttagagaaatgagccccttctcaggacctcatacccacacctttccccacagttggatagacagacgcatccgtcctgctctgggaaccatagcttatagttttttggctatcctgaattccaagtcaccgctcccaagagaaaagcagtgttatcactgagaaccctgttggatgaaaacatgccctcagtagatcactttctgagtagtgcacacctttccccacagttggatagatagacacatccatcctgctctgggaaccatagcttgtagttttttggctatcctgaattccgaggcaccgctcccaagagaaaagcagtgttatcactgagaaccctgtggatgaaaacatgccttccgtagatcactttctgagtggtgagatgctgaaacaaacagtggagat

SEQ ID NO: 551682 - DNA, 587 bp, Homo sapiens
actggtagaaacacaaagtagggctcccagggagttggctttgtgatggtccagctgagaaatagtgagagctggaactaaggcagtggtgatggttatctgaataattaataattactgtctactcactcccgaaaaactgcagtccctctaattgaagatatatgttctctcttagagaaatgagccccttctcaggacctcatacccacacctttccccacagttggatagacagacgcatccgtcctgctctgggaaccatagcttatagttttttggctatcctgaattccaagtcaccgctcccaagagaaaagcagtgttatcactgagaaccctgttggatgaaaacatgccctcagtagatcactttctgagtagtgcacacctttccccacagttggatagataracacatccatcctgctctgggaaccatagcttgtagttttttggctatcctgaattccgaggcaccgctcccaagagaaaagcagtgttatcactgagaaccctgtggatgaaaacatgccttccgtagatcactttctgagtggtgagatgctgaaacaaacagtggagat

SEQ ID NO: 551683 - DNA, 1113 bp, Homo sapiens
caggttccttgtgcccctatgggcctcttacataagagacttgcccagagagctttaatctggagggctcttagaagtgactcaggccagcagtgaaactggcctccaagaagccccaggatcctggagaggccccgtgggtgggcttttgggccatccaccccagtttccatagcgcagtgccacttttggctcttctgtgtatgctacagggtataacccagcagcctgcagccaaatcatcaccagaactgcctctatacagggcccgggctccttcacyggccacagccctattctgcctgcttcaggcagacaacaaagggttccaggcctttaaaacatttgaaaaccctcttctagactatcctttgttctatagttagggacatgaggccagaggggaaagggacttgcccaaggtcctgtagccagcagggaggaaagctggaaccagaagccagggctaccatcgggaggtgctgagaatgcgggccctctgctccagactgctgtttctcatacctacgaaacagtagaagcctgtggagatgaagggagcaaatatgctgtctctcatgcagtgcacggaggggctagggcttccgctcacaggctacacagcttctgcagcgggtcatcaggctgtgattgctaaagccgtcctgctctacagccagagcaagcttaaatgccaaagcacatgcagctctgggctcgaggagtagtgctggcttcaagatccaggtgaattcatttcctgtagagaagggttcaggactatgtccgaaggtccctaggaatccacagaccccagtttcagaaggcagctagctgttaagaagggggttggattccctccatcaagctcccacactggctgggttcccaggtggcagatcctgggaagagcttgggagttagtgactggctgggttgcagatggcttgctctgggaatatgctgtcttggtcacacaggcccaaggtggataagtatggtcctcgtgggtgctggggaagggaaagcaacaagggcaagggagagatggagagcgaggagagggcagggcggtcggatggagctccacgggcttgactaatgggaaacccg

SEQ ID NO: 551684 - DNA, 1113 bp, Homo sapiens
caggttccttgtgcccctatgggcctcttacataagagacttgcccagagagctttaatctggagggctcttagaagtgactcaggccagcagtgaaactggcctccaagaagccccaggatcctggagaggccccgtgggtgggcttttgggccatccaccccagtttccatagcgcagtgccacttttggctcttctgtgtatgctacagggtataacccagcagcctgcagccaaatcatcaccagaactgcctctatacagggcccgggctccttcaccggccacagccctattctgcctgcttcaggcagacaacaaagggttccaggcctttaaaacatttgaaaaccctcttctagactatcctttgttctatagttagggacatgaggccagaggggaaagggacttgcccaaggycctgtagccagcagggaggaaagctggaaccagaagccagggctaccatcgggaggtgctgagaatgcgggccctctgctccagactgctgtttctcatacctacgaaacagtagaagcctgtggagatgaagggagcaaatatgctgtctctcatgcagtgcacggaggggctagggcttccgctcacaggctacacagcttctgcagcgggtcatcaggctgtgattgctaaagccgtcctgctctacagccagagcaagcttaaatgccaaagcacatgcagctctgggctcgaggagtagtgctggcttcaagatccaggtgaattcatttcctgtagagaagggttcaggactatgtccgaaggtccctaggaatccacagaccccagtttcagaaggcagctagctgttaagaagggggttggattccctccatcaagctcccacactggctgggttcccaggtggcagatcctgggaagagcttgggagttagtgactggctgggttgcagatggcttgctctgggaatatgctgtcttggtcacacaggcccaaggtggataagtatggtcctcgtgggtgctggggaagggaaagcaacaagggcaagggagagatggagagcgaggagagggcagggcggtcggatggagctccacgggcttgactaatgggaaacccg

SEQ ID NO: 551685 - DNA, 1113 bp, Homo sapiens
caggttccttgtgcccctatgggcctcttacataagagacttgcccagagagctttaatctggagggctcttagaagtgactcaggccagcagtgaaactggcctccaagaagccccaggatcctggagaggccccgtgggtgggcttttgggccatccaccccagtttccatagcgcagtgccacttttggctcttctgtgtatgctacagggtataacccagcagcctgcagccaaatcatcaccagaactgcctctatacagggcccgggctccttcaccggccacagccctattctgcctgcttcaggcagacaacaaagggttccaggcctttaaaacatttgaaaaccctcttctagactatcctttgttctatagttagggacatgaggccagaggggaaagggacttgcccaaggtcctgtagccagcagggaggaaagctggaaccagaagccagggctaccatcgggaggtgctgagaatgcgggccctctgctccagactgctgtttctcatacctacgaaacagtagaagcctgtggagatgaagggagcaaatatgctgtctctcatgcagtgcacggaggggctagggcttccgctcacaggctacacagcttctgcagcgggtcatcaggctgtgattgctaaagccgtcctgctctacagccagagcaagcttaaatgccaaagcacatgcagctctgggctcgaggagtagtgctggcttcaagatccaggtgaattcatttcctgtagagaagggttcaggactatgtccgarggtccctaggaatccacagaccccagtttcagaaggcagctagctgttaagaagggggttggattccctccatcaagctcccacactggctgggttcccaggtggcagatcctgggaagagcttgggagttagtgactggctgggttgcagatggcttgctctgggaatatgctgtcttggtcacacaggcccaaggtggataagtatggtcctcgtgggtgctggggaagggaaagcaacaagggcaagggagagatggagagcgaggagagggcagggcggtcggatggagctccacgggcttgactaatgggaaacccg

SEQ ID NO: 551686 - DNA, 1113 bp, Homo sapiens
caggttccttgtgcccctatgggcctcttacataagagacttgcccagagagctttaatctggagggctcttagaagtgactcaggccagcagtgaaactggcctccaagaagccccaggatcctggagaggccccgtgggtgggcttttgggccatccaccccagtttccatagcgcagtgccacttttggctcttctgtgtatgctacagggtataacccagcagcctgcagccaaatcatcaccagaactgcctctatacagggcccgggctccttcaccggccacagccctattctgcctgcttcaggcagacaacaaagggttccaggcctttaaaacatttgaaaaccctcttctagactatcctttgttctatagttagggacatgaggccagaggggaaagggacttgcccaaggtcctgtagccagcagggaggaaagctggaaccagaagccagggctaccatcgggaggtgctgagaatgcgggccctctgctccagactgctgtttctcatacctacgaaacagtagaagcctgtggagatgaagggagcaaatatgctgtctctcatgcagtgcacggaggggctagggcttccgctcacaggctacacagcttctgcagcgggtcatcaggctgtgattgctaaagccgtcctgctctacagccagagcaagcttaaatgccaaagcacatgcagctctgggctcgaggagtagtgctggcttcaagatccaggtgaattcatttcctgtagagaagggttcaggactatgtccgaaggtccctaggaatccayagaccccagtttcagaaggcagctagctgttaagaagggggttggattccctccatcaagctcccacactggctgggttcccaggtggcagatcctgggaagagcttgggagttagtgactggctgggttgcagatggcttgctctgggaatatgctgtcttggtcacacaggcccaaggtggataagtatggtcctcgtgggtgctggggaagggaaagcaacaagggcaagggagagatggagagcgaggagagggcagggcggtcggatggagctccacgggcttgactaatgggaaacccg

SEQ ID NO: 551687 - DNA, 1113 bp, Homo sapiens
caggttccttgtgcccctatgggcctcttacataagagacttgcccagagagctttaatctggagggctcttagaagtgactcaggccagcagtgaaactggcctccaagaagccccaggatcctggagaggccccgtgggtgggcttttgggccatccaccccagtttccatagcgcagtgccacttttggctcttctgtgtatgctacagggtataacccagcagcctgcagccaaatcatcaccagaactgcctctatacagggcccgggctccttcaccggccacagccctattctgcctgcttcaggcagacaacaaagggttccaggcctttaaaacatttgaaaaccctcttctagactatcctttgttctatagttagggacatgaggccagaggggaaagggacttgcccaaggtcctgtagccagcagggaggaaagctggaaccagaagccagggctaccatcgggaggtgctgagaatgcgggccctctgctccagactgctgtttctcatacctacgaaacagtagaagcctgtggagatgaagggagcaaatatgctgtctctcatgcagtgcacggaggggctagggcttccgctcacaggctacacagcttctgcagcgggtcatcaggctgtgattgctaaagccgtcctgctctacagccagagcaagcttaaatgccaaagcacatgcagctctgggctcgaggagtagtgctggcttcaagatccaggtgaattcatttcctgtagagaagggttcaggactatgtccgaaggtccctaggaatccacagaccccagtttcagaaggcagctagctgttaagaagggggttggattccctccatcaagctcccacactggctgggttcccaggtggcagatcctgggaagagcttgggagttagtgactggctgggttgcagatggcttgctctgggaatatgctgtcttggtcacacaggcccaaggtggataagtatggtcctcgtgggtgctggggaagggaaagcaacaagrgcaagggagagatggagagcgaggagagggcagggcggtcggatggagctccacgggcttgactaatgggaaacccg

SEQ ID NO: 551688 - DNA, 1113 bp, Homo sapiens
caggttccttgtgcccctatgggcctcttacataagagacttgcccagagagctttaatctggagggctcttagaagtgactcaggccagcagtgaaactggcctccaagaagccccaggatcctggagaggccccgtgggtgggcttttgggccatccaccccagtttccatagcgcagtgccacttttggctcttctgtgtatgctacagggtataacccagcagcctgcagccaaatcatcaccagaactgcctctatacagggcccgggctccttcaccggccacagccctattctgcctgcttcaggcagacaacaaagggttccaggcctttaaaacatttgaaaaccctcttctagactatcctttgttctatagttagggacatgaggccagaggggaaagggacttgcccaaggtcctgtagccagcagggaggaaagctggaaccagaagccagggctaccatcgggaggtgctgagaatgcgggccctctgctccagactgctgtttctcatacctacgaaacagtagaagcctgtggagatgaagggagcaaatatgctgtctctcatgcagtgcacggaggggctagggcttccgctcacaggctacacagcttctgcagcgggtcatcaggctgtgattgctaaagccgtcctgctctacagccagagcaagcttaaatgccaaagcacatgcagctctgggctcgaggagtagtgctggcttcaagatccaggtgaattcatttcctgtagagaagggttcaggactatgtccgaaggtccctaggaatccacagaccccagtttcagaaggcagctagctgttaagaagggggttggattccctccatcaagctcccacactggctgggttcccaggtggcagatcctgggaagagcttgggagttagtgactggctgggttgcagatggcttgctctgggaatatgctgtcttggtcacacaggcccaaggtggataagtatggtcctcgtgggtgctggggaagggaaagcaacaagggcaagggagagatggagagcgaggagagggcagggyggtcggatggagctccacgggcttgactaatgggaaacccg

SEQ ID NO: 551689 - DNA, 1234 bp, Homo sapiens
tattgaaagaagtaagttctgcgaattttacagaactgatgaaatacatcataacatattcaagataaataaaagctaaatagaataaataaaaagaaaaggacataattaaatcagagcagctagaaaaaaaaaaaagaaaaatctttgaatgagaccaaaaaaatgattactatcgacaaagaagtaaaatgtaaaccaggggctaacggctaacttctcagcagcacactgcttgaatgatttcttcaatgtagtgaagtagaatgattgacaacctacaatgttctaccaagtgaatgtatgctttagacatggaagcaaaacaaagacatttttcaaacaaagaactgatagttcaccgccagaagacttacaaaataagacaattaccaagggtgatctcgggcagaagaatactcatcacaaatgaaacattagagatgcagaaaaaggtagagggaaaaaggataaatatacaggaatgcttaaataagtattgacttttaaaaataataataatactgactttaggttttacacatacatacctatacacacacgttagcatttaatttgggagggggtaaatatgtattctgaggtggactgattttaggaagagaataaaagtgtcaattattaaaatattttcataagtgaagaatacaagttataatttctaggataaactttaaaaaattagacaaagactaagtaactttcagtgtacccaataaatataaacagaatgattaaatagaatagtcaatctagaaaaataaattagagaaaagatgatatacagcaggtgaaaggaaattaaaaatactaataagacaggtttcagatatcagtaatgacactatatataaatatcttttttttagtaattaggtcagatttttaaattatatttatatttttctctttattattaacttttaggttcaggggtacatatgcaggtttgtaatatagataaattgtgtgtcacgagggtctgatgtacagattattttatcacscaggtaataagcatacccaatagacagattttttacctactccctccttccaccctccaccctcaagtaggccctagtgtctgttgttcctttctttgtgtccataggtactcaaggtttagcttccattcataagtgagaatatgcagtgcttggttttctgtctgtgcactagttcgcttaggataatggcctccagttgcaaa

SEQ ID NO: 551690 - DNA, 1234 bp, Homo sapiens
tattgaaagaagtaagttctgcgaattttacagaactgatgaaatacatcataacatattcaagataaataaaagctaaatagaataaataaaaagaaaaggacataattaaatcagagcagctagaaaaaaaaaaaagaaaaatctttgaatgagaccaaaaaaatgattactatcgacaaagaagtaaaatgtaaaccaggggctaacggctaacttctcagcagcacactgcttgaatgatttcttcaatgtagtgaagtagaatgattgacaacctacaatgttctaccaagtgaatgtatgctttagacatggaagcaaaacaaagacatttttcaaacaaagaactgatagttcaccgccagaagacttacaaaataagacaattaccaagggtgatctcgggcagaagaatactcatcacaaatgaaacattagagatgcagaaaaaggtagagggaaaaaggataaatatacaggaatgcttaaataagtattgacttttaaaaataataataatactgactttaggttttacacatacatacctatacacacacgttagcatttaatttgggagggggtaaatatgtattctgaggtggactgattttaggaagagaataaaagtgtcaattattaaaatattttcataagtgaagaatacaagttataatttctaggataaactttaaaaaattagacaaagactaagtaactttcagtgtacccaataaatataaacagaatgattaaatagaatagtcaatctagaaaaataaattagagaaaagatgatatacagcaggtgaaaggaaattaaaaatactaataagacaggtttcagatatcagtaatgacactatatataaatatcttttttttagtaattaggtcagatttttaaattatatttatatttttctctttattattaacttttaggttcaggggtacatatgcaggtttgtaatatagataaattgtgtgtcacgagggtctgatgtacagattattttatcacgcaggtaataagcatacccaatagayagattttttacctactccctccttccaccctccaccctcaagtaggccctagtgtctgttgttcctttctttgtgtccataggtactcaaggtttagcttccattcataagtgagaatatgcagtgcttggttttctgtctgtgcactagttcgcttaggataatggcctccagttgcaaa

SEQ ID NO: 551691 - DNA, 625 bp, Homo sapiens
gagtaaaaattagtgttttcaagtctaatctaccagaaccactaagtcagcccagctttgatagscttagctgcacgtggctgttcaatagacaaggggagcttaggaactgctcctaacacctgcctcctaggccctggagctctgggagaacagggttgtgactgggccctacaggtccttgaaacaagtgtcaagaagagattctagagcagaaaggtcacactctatgaggagagagtatgagtagcctggtgtgcacatctgcatttgtctcccagcccaaaggcagtttcgttcaagtcctttttcttttcaaggagcatcttgacattttgtcagtacttgtggtttctacttaatgacagataaggagtgctgggtcctgacctccctttgtgtacgtatcactgatgagaggagcatgcctgcctgtgggaatttggaagtaaagtggcccattaaacaggcaggtctatgacaggtagatttagaaaccaactatgtgaaaaccacaatgatgataataacaattataacaagtatggaggcttaatatgtgccaggcactttgctaaattctttagaggaattatctaaacttgatcctcataaaaactctatg

SEQ ID NO: 551692 - DNA, 625 bp, Homo sapiens
gagtaaaaattagtgttttcaagtctaatctaccagaaccactaagtcagcccagctttgatagccttagctgcacgtggctgttcaatagacaagkggagcttaggaactgctcctaacacctgcctcctaggccctggagctctgggagaacagggttgtgactgggccctacaggtccttgaaacaagtgtcaagaagagattctagagcagaaaggtcacactctatgaggagagagtatgagtagcctggtgtgcacatctgcatttgtctcccagcccaaaggcagtttcgttcaagtcctttttcttttcaaggagcatcttgacattttgtcagtacttgtggtttctacttaatgacagataaggagtgctgggtcctgacctccctttgtgtacgtatcactgatgagaggagcatgcctgcctgtgggaatttggaagtaaagtggcccattaaacaggcaggtctatgacaggtagatttagaaaccaactatgtgaaaaccacaatgatgataataacaattataacaagtatggaggcttaatatgtgccaggcactttgctaaattctttagaggaattatctaaacttgatcctcataaaaactctatg

SEQ ID NO: 551693 - DNA, 993 bp, Homo sapiens
ggccaggctggtcttgaactcctgaccttagatgatccacccccccctaagcctcctaaagtgctgggattagaggtgtgagccactgcgctcagccttaatttttatattatttgtagagatggggttttgccatgttggtcaggctggtcttgaactcctggactcaagggatctacctgccttggcctcccaaagtgctgagattacaggtgtgagccactgtatcctaccactcagtgcattttagctatcattatcacccctcagtaggatcgaaattgttatgtgtgtttcaggatgcgctcctggagggtacccttggccccatcttaatccttggactaggcttgwaaatatggggtgagaatcgtaataaaatgatattgaagacttatcccgtgctcactatgctcattacccattcatggattaatgggttaatggattagtgggttatcatgggagaggaagtggtggctttataaaatgagagagagagacgtgagtggcatgttagcacactagccttgggactctctgaagagttccagcaagaaggctcttactagatggggctcctccaccttggtcagtctcctataactgtgagatagaaattccttttctttataaattatccagttttggatattatgttaagagtaacagaaaacaaatgaagacaatgaggaatgcattattactcagctcattttatagatggggagaccaaggcagagaaagctaacttgcccaaggttgcagaggcaggaagaggtagtgccaggatttgaacccagatacttggttccagagtccatgcttcgtaacccctaccagtagatgccacagagaaacagtcctatagccacagcggcatccccttcccgatggctgcctcccacccctctatgtcccggctctcactgcaggggcggcatggaagctcctgtcaggcgtgcgggagggccaaacgcaagtggacacccc

SEQ ID NO: 551694 - DNA, 1067 bp, Homo sapiens
tgagacttttccgttgccgctgggagccggaggcgcggggacctcttggcgcgacgctgccccgcgaggaggcaggacttggggaccccagaccgcctccctttgccgccggggacgcttgctccctccctgccccctacacggcgtccctcaggcgcccccattccggaccagccctcgggagtcgccgacccggcctcccgcaaagacttttccccagacctcgggcgcaccccctgcacgccgccttcatccccggcctgtctcctgagcccccgcgcatcctagaccctttctcctccaggagacggatctctctccgacctgccacagatcccctattcaagaccacccaccttctggtaccagatcgcgcccatctaggttatttccgtgggatactgagacacccccggtccaagcctcccctccaccactgcgcccttctccctgaggacctcagctttccctcgaggccctcctaccttttgccgggagacccccagcccctgcaggggcggggcctccccaccacaccagccctgttcgcgctctcggcagtgccggggggcgccgcctcccccatgccgccctccgggctgcggctgctgcygctgctgctaccgctgctgtggctactggtgctgacgcctggccggccggccgcgggactatccacctgcaagactatcgacatggagctggtgaagcggaagcgcatcgaggccatccgcggccagatcctgtccaagctgcggctcgccagccccccgagccagggggaggtgccgcccggcccgctgcccgaggccgtgctcgccctgtacaacagcacccgcgaccgggtggccggggagagtgcagaaccggagcccgagcctgaggccgactactacgccaaggaggtcacccgcgtgctaatggtggaaacccacaacggtgagctcggaggggcaggggagccgggaggggggcccccagggggcgccggagtgccggggccacgggtaggaagtgactggcagaagaaactggctggaggaagaggacaccccggggcaaaggga

SEQ ID NO: 551695 - DNA, 1472 bp, Homo sapiens
gcgacagagggagcctctgttttaaaaaaaaaaaaagacctggccgggtgcagtggctcacacctgtaatcccagcactttgggaggccgaggcaggcggatcacgaggtcaggagattgagaccatcctggccaacatggagaatccccatctctactaaagatacaaaaaattagccagggtgtagtggcgtgcacctctaatcctagctactcgggaggctgaggcagggaatcgcttgaacccgggaggtggaggttgtagtgagccaagatctcgccattgtactccagcatgggctactgggtgagacgctgtctcaaaaaaaaaagatcttagccgggcgtggtggcacatgcctgtaatcccagctattccggaggctgaggcaggagaatcgcttgaaaccgggaggcaagggttgcagtgagccgagatagtgccattgcactcctgcttgggcaacaagagcgaaattctgtttcaaaaaaaaaaaagacctggggcctgagtagtgcaccaggtggtgggcaccacaggggcgaaggtgggtaggacggcgaagaactgtggatatgtggaactgaatggcggccagtacatcacagggtagacagcaggggagttggcggaggatcctggacatgcagggcctcccacctcaggagctaggtgctgggagggctgtrgggagccctagctgtaggagtaaagttgccaaggagggggtcattggcggcatcgtagggggctcagctcctatgtctcgagtgggctctggtaaccgccagccctgaccctgcagaagtgctttggggacgagtactacggggccgtggaggaggagaagccacaatttgaggaagaagaagggcttgaaggtgagatcagctggggcactgggctggggattggggactggggactgggactgaagcccaaggtcccaccctggccccacctgtctgttctccctgcatccagacgactggaactgggacacgtgggacgggcctgagcaggagggagactggagccagcaggagctgcactgtgaggaccccaacttcaacgtaggtatcacgggttgagggagtcccaggggccctgacggggggctggtgggatctgacctgtgcgtcctggcagatggacgccgactacgaccccagccagccgaggaagaaaaagcgcgaggcccccttgacgggcaagaagaagcgcaagtcgcccttcgccgcggccgtggggcaggagaagcccgtgtttgaacccggtgaggcccaggtgggcaggccgtgggtaggcagggggcaccgcggggcctggcatagcccagcagcctggctctgtctcgagcaggggacaagacgttcgaggagtacctggatgagtattaccggctggactacgaggacatcatcgacgacctgccctgtcgcttcaagtaccgcacagtggtgccctgtga

SEQ ID NO: 551696 - DNA, 1472 bp, Homo sapiens
gcgacagagggagcctctgttttaaaaaaaaaaaaagacctggccgggtgcagtggctcacacctgtaatcccagcactttgggaggccgaggcaggcggatcacgaggtcaggagattgagaccatcctggccaacatggagaatccccatctctactaaagatacaaaaaattagccagggtgtagtggcgtgcacctctaatcctagctactcgggaggctgaggcagggaatcgcttgaacccgggaggtggaggttgtagtgagccaagatctcgccattgtactccagcatgggctactgggtgagacgctgtctcaaaaaaaaaagatcttagccgggcgtggtggcacatgcctgtaatcccagctattccggaggctgaggcaggagaatcgcttgaaaccgggaggcaagggttgcagtgagccgagatagtgccattgcactcctgcttgggcaacaagagcgaaattctgtttcaaaaaaaaaaaagacctggggcctgagtagtgcaccaggtggtgggcaccacaggggcgaaggtgggtaggacggcgaagaactgtggatatgtggaactgaatggcggccagtacatcacagggtagacagcaggggagttggcggaggatcctggacatgcagggcctcccacctcaggagctaggtgctgggagggctgtagggagccctagctgtaggagtaaagttgccaaggagggggtcattggcggcatcgtagggggctcagctcctatgtctcgagtgggctctggtaaccgccagccctgaccctgcagaagtgctttggggacgagtactacggggccgtggaggaggagaagccacaatttgaggaagaagaagggcttgaaggtgagatcagctggggcactgggctggggattggggactggggactgggactgaagcccaaggtcccaccctggccccacctgtctgttctccctgcatccagacgactggaactgggacacgtgggacgggcctgagcaggagggagactggagccagcaggagcygcactgtgaggaccccaacttcaacgtaggtatcacgggttgagggagtcccaggggccctgacggggggctggtgggatctgacctgtgcgtcctggcagatggacgccgactacgaccccagccagccgaggaagaaaaagcgcgaggcccccttgacgggcaagaagaagcgcaagtcgcccttcgccgcggccgtggggcaggagaagcccgtgtttgaacccggtgaggcccaggtgggcaggccgtgggtaggcagggggcaccgcggggcctggcatagcccagcagcctggctctgtctcgagcaggggacaagacgttcgaggagtacctggatgagtattaccggctggactacgaggacatcatcgacgacctgccctgtcgcttcaagtaccgcacagtggtgccctgtga

SEQ ID NO: 551697 - DNA, 523 bp, Homo sapiens
aaatggtgcagtcccctatgaaaagtgctactcacttttagtgcgactgttttgtcaaactcccaagtactcaaagccaacgggagatgtgatctcagagtaaaggtggtcaatctacaccgtataccaaagcagtctaaaactgaatagcacatttgaatagtgagggaacaccacattttcaaagtcctgccggcgtgtctcggcctccctacctccagctaatactttctccatttcttctctgacaacaggggatgtcaggtggatggtcagggacaatggaggctcttttgtgttttttatcacaatcgcagcatcgtcgacagattgcagtatttcgtacttgtcttctgttacagcctaaaaaataaaatgcaactttcaaaacactttctcctcaaagcaatcaacaattttatctggctccacctattcctgcaacagaaaggccaacstcttgagtatgatgacccggaagtgatttcacctgggatgtcagggtctctctaattggccaggt

SEQ ID NO: 551698 - DNA, 563 bp, Homo sapiens
tggagactgccagccaggtcagggtgggagaggaccagggttgcattccggggtagggggctggctgcatggacccctggagctaagctggtaggcaggggcgggccagcccatctcccttgcagaggggctcaatgccagggtatgctcacagaggcctgggtgccaaggaccctcgattgggtttggctgaaaaaatagcagatgcgagcggtcagcttctcctccaagtccattaartcctcacaaggctgggccccacagacctgggtctctggtgtcctcagcatccctgtgtggcttcttgagtctgactctgaggacacccctgcaggctgctgatcacagagcaagaggtgtgtggatccctcagggcacggggagctgttggggcacctcacgtcactcctggggctgtggcttaggattcaggctggctccagacttcctccttcacctcctcatcccagggctgtgtggcctgggtagcagccctaattcagaaccaggtgggagaggccttggctgtcacctagcccccttgccacctcacacaagacact

SEQ ID NO: 551699 - DNA, 862 bp, Homo sapiens
tcgaaacagaaactctgtcacccaggctggagtgcagtggtgcaatctcagctcactgcaacctccacgtcctaggttcaagtgattctcctgccttagcttcccgagtagctggaattacggggacccggctaatttttgtgtttttgtagagacgagatttcaccatgttggccaggctggtctcgaactcctgacctcaactgatctgcccacctcggcctcccaaagtgctgcattacaagtgtgagccaccgcgcccagcttaacttttttttttaatggatattgcacatgaggaaggccaggtttccagcttggttgatctgtcctttgctgcaagactcacaaggggcccctgcctcctttggccctggccacatggctgcatttgggacactcttcccccttctgtctgtagaggtgggagcagacccctgctgccacttgccaagtgaatgctttgggggtagaaagcagcccctgatcgccccagatctgcatctggcctggtgaacatttgcattttgggaaccsggatcaaactggtttctgaatcaggaaattcctcctgaaaatcccgaagtccagccccttgagggaagcctagcctcctgacggggctggccaggtggggtctttctgcctcccttacccatgtacctgtcgtggagtttcacatctctgagctaaaacccagtgcttctctgactcagaccctgccccctccaaaaaatgtctttttccaaaaggcgtggggctggcatccggaggagcaggaccagccattcccacatctcctaaaaattctggagttctagacaccctccctgtctccgccctcctcctcctcgaggccccg

SEQ ID NO: 551700 - DNA, 552 bp, Homo sapiens
ctccacctcccgggttcaaacgattctccctgcctcagcctcttgagtagatgggattacaggtgtgcaccacyatgcccggccaatttctgtatttttagtagagacggggtttccccatgttggccaggctggttttaaactcctgacctcaggtgatccacccaccttggcctcccaaagtgctgggattacacgcctgagccaatgcacccggccatcccccaattctttctcaggaaggaacaagaggacccttccgtagccatgtcccaaacatcctctgctcctgaatgactgacagccttccttctgcttctcttttttttggaggaggaggcggcggtaggcgttggcttttcttcttaataccacattgcagcaggcggcggtggctcacacctgtaatcccaacactctgggaggccaaggagggaggacagcttgaacccagaagtccgagaccagcctgggcaatgtagtgagaccttgtctcaataaaaaagaaaacataaaaaccacactgcctctttctccctcacccaaccacaa

SEQ ID NO: 551701 - DNA, 558 bp, Homo sapiens
catgagtcccatctccctcaccctcatcaatagttaatctcatccattttccccctcatttacccaatctgatcaatgtgaagcaagatcttgttctggttttgattttccatttccttgaccgcagtaacttttccccttcctcttggtagaatacaggtgcccaggagatgtggccaccgccatctagaaccacacgacatgtgctccatccacttcccgccagcaggaccacctcagcctgggattgcagrggcaagggctagagagaggcctcaaatgtatgtgtctgcgttgggggtgcctgagctgactgtagggccatcgatcaccccgctgtagccagcgcagggtgttttagctaaatcaggaagtgcatcccacagagcagcctctggtggatcaatggttggaggtcgaagccaggttgctagcagcagctgggcagcccctcagacctggggcatgagtgggaggaagaacaggagggacgagccagctgggcttgaaccctacttttgccactgaccattgtgggacttggactgagtgacgttc

SEQ ID NO: 551702 - DNA, 644 bp, Homo sapiens
gaatggggaatggacacctgaagcttaaggcaggtcccagacagtgtgtacaaaacaaacctgtgcacacactcatgcacaaacacgggtgcctacatgcaggtaggcatacatgcacacatgcacacagagacatgtggcacatgctcatgagtgcacacattcataygaacatacatgcacacacatgcacgcatgagacatatgtgcacatcattacatgtgaacgcatgtgcacaggaacatgcacatacatgcaaactggcacacacatgcacacaagcacatgtgcacacatgcacacatatgcatattcacaaatgcatgcacacacaattcacacaaacatgaacatacatgcacacacaagcacggacacatggacacacatgtgtatacatgcatatgcttgcacttaggcacatgtgctcacagacatgtgtgcacaatgcattgaacatgcctgcacacacagatacacactcacacactcatgcatgtaggcagacctgcacacacaagagacacacaagcacataaacatgtacatacatgcaaacccacacatgcacacagatgcacataagcacatgtgcgcacatgcatattcacgaacgcatgcacacacacaattcacacaaaca

SEQ ID NO: 551703 - DNA, 644 bp, Homo sapiens
gaatggggaatggacacctgaagcttaaggcaggtcccagacagtgtgtacaaaacaaacctgtgcacacactcatgcacaaacacgggtgcctacatgcaggtaggcatacatgcacacatgcacacagagacatgtggcacatgctcatgagtgcacacattcatatgaacatacatgcacacacatgcacgcatgagacatatgtgcacatcattacwtgtgaacgcatgtgcacaggaacatgcacatacatgcaaactggcacacacatgcacacaagcacatgtgcacacatgcacacatatgcatattcacaaatgcatgcacacacaattcacacaaacatgaacatacatgcacacacaagcacggacacatggacacacatgtgtatacatgcatatgcttgcacttaggcacatgtgctcacagacatgtgtgcacaatgcattgaacatgcctgcacacacagatacacactcacacactcatgcatgtaggcagacctgcacacacaagagacacacaagcacataaacatgtacatacatgcaaacccacacatgcacacagatgcacataagcacatgtgcgcacatgcatattcacgaacgcatgcacacacacaattcacacaaaca

SEQ ID NO: 551704 - DNA, 644 bp, Homo sapiens
gaatggggaatggacacctgaagcttaaggcaggtcccagacagtgtgtacaaaacaaacctgtgcacacactcatgcacaaacacgggtgcctacatgcaggtaggcatacatgcacacatgcacacagagacatgtggcacatgctcatgagtgcacacattcatatgaacatacatgcacacacatgcacgcatgagacatatgtgcacatcattacatgtgaacgcatgtgcacaggaacatgcacatacatgcaaactggcacacacatgcacacaagcacatgtgcacacatgcacacatatgcatattcacaaatgcatgcacacacaattcacacaaacatgaacatacatgcacacacaagcayggacacatggacacacatgtgtatacatgcatatgcttgcacttaggcacatgtgctcacagacatgtgtgcacaatgcattgaacatgcctgcacacacagatacacactcacacactcatgcatgtaggcagacctgcacacacaagagacacacaagcacataaacatgtacatacatgcaaacccacacatgcacacagatgcacataagcacatgtgcgcacatgcatattcacgaacgcatgcacacacacaattcacacaaaca

SEQ ID NO: 551705 - DNA, 809 bp, Homo sapiens
tgcctccctggttcaagctattctcctccctcagcctcctgagtagctgggcttacaggtgtgcaccaccacacctggctaattttttgtattttcagtagagatggggtttctccatgttggtcaggctgttcttgaactcccgacctcaggtgatccacccaccttgttctcccaaagtgctgggattacaggcattagccaccacgcccggctgaaactcctgtttttaaaaccatgagatctcatgagactcattcgctattaggagaacagagcaggacagacccaccccgataattcaatcacacgggaattgtgggagttacaatttaagatgacatttgggtggggacacagccaaatcatatcattctccaaagaagaatcttttgctttcttgttgctctgtttgcaaggagctgagtctggggttgaggttgcagagcccagacactcatggttgtggctacaggagaagaaaacacccgaggagtcagcccaggtgttgggaggcttcatggaaaagggcacccagggttgggttttgaaagatgaataggagtttgccaagtggggtaggagtttggggaaagacagcagaagagaagaaraagatgtgctcgagtcctggaagtcaaataggagctgctacatatttctgctacatattttgtctttcatttacatctttagatcaaaagcatccttttaaatagctgcataatatttcactagaatgtattcagccccacgcacctgggtgacagtgttacagtttctattttatttattcattttttattgca

SEQ ID NO: 551706 - DNA, 1281 bp, Homo sapiens
aataccacaggtgaggggggccgccccaggggccgcgggagttcacctgggcgccggggcggggcgaggcctccggggtatagggcggggaggaggggctcccggttggagggggggcgcgacaaaggcctccaggtggaagcgcaggtgcagaggggtctggggacagtcagagctggggcatttggagcccaggaaggggcggggagggactgggacaggaggtggggggaggtctgtaaggaagtcgggagggggagatccagcctctcactttggaagccggcccacatggggcgggtgggagccccttgccctctctcttcttctcagcctcaagctagaatgtgagaagctggccagcgagaagacggaaatgcagcgacattatgtcatggtgagggcacttatgatgccagggtgaggggagaggcgggcagggctttgagtcacggtggactctggggtaggtccctgccccactccgaacctcgtcttccccgtctgtacattgggcaggttgggatttcaggctctctaggagggtcctcccagctctgggaatggggagacagggaggacccctcgcctgatgggagtctctgtcgggccagggcctctggacacttcctacctgccctgcctctctggggagagtagagggggcccttccaggcagagcccccgcttcctcctctgggaccccgtggagctggggggggctctgcttcctgctgtgattcccctgaacctggggactcttggaagaccctggcatcacctatctggaggagggcacccatctccaccctagacgttcttacttggtttttcctttgcagtattatgagatgtcgtacgggctcaacattgaaatgcataagcaggtaactgggttggggttacgcgtgttcaggagggagggtgggggtctggaagccctgagaaggacccagagtgggcagccggggccagagcagacctagggaacacgggtctcatcctgaaatctccgcagaggtcacagagggcccatctgggaccaggaagacagatttcagcctcgtggaaggaaaatgagtcccaccttctgaagacagtatytagcagttggagcgtccagcagagatgcaggcagtgggcaggggccaccaggcatccccatcaaggagggcacatagcagaggcagggcagccaggccagggaggctgtggaagtgacttctgtcctaggagggagctggatggccactcttagaggtccctttcaacccagaaagt

SEQ ID NO: 551707 - DNA, 552 bp, Homo sapiens
gttttctgtcaaatggggtcagcgtgccgcctggccctgctgtgccacccccggaagcccctttgcttccagtcctggggggacattcttgacgcgtgtcctggaggtggagccgggggcaggttcctcgtaggtcctggtgtgcgcggtgcagcccctcatagggccgggtgtacacggtgccctccaggaagtttgagctaacttgtcctcccttcctgccagaggctgggatggccaggccccccaggtttagaatccggaggccggggtggccaggcccccaggtttagaatccggaggccggggtggccaggccccccasgtttagaatccggaggccggggtggccaggccccccaggtttagaatccggaggccggggtggccaggccccccacgtttagaatccggaggccggggtggccaggccccccgggtttagaatccggaggccggggtggccaggccccccgggtttagaatccggaggccggggtggccaggccccccgggtttagaatccggaggccggggtggccaggccccccg

SEQ ID NO: 551708 - DNA, 552 bp, Homo sapiens
gttttctgtcaaatggggtcagcgtgccgcctggccctgctgtgccacccccggaagcccctttgcttccagtcctggggggacattcttgacgcgtgtcctggaggtggagccgggggcaggttcctcgtaggtcctggtgtgcgcggtgcagcccctcatagggccgggtgtacacggtgccctccaggaagtttgagctaacttgtcctcccttcctgccagaggctgggatggccaggccccccaggtttagaatccggaggccggggtggccaggcccccaggtttagaatccggaggccggggtggccaggccccccacgtttagaatccggaggccggggtggccaggycccccaggtttagaatccggaggccggggtggccaggccccccacgtttagaatccggaggccggggtggccaggccccccgggtttagaatccggaggccggggtggccaggccccccgggtttagaatccggaggccggggtggccaggccccccgggtttagaatccggaggccggggtggccaggccccccg

SEQ ID NO: 551709 - DNA, 552 bp, Homo sapiens
gttttctgtcaaatggggtcagcgtgccgcctggccctgctgtgccacccccggaagcccctttgcttccagtcctggggggacattcttgacgcgtgtcctggaggtggagccgggggcaggttcctcgtaggtcctggtgtgcgcggtgcagcccctcatagggccgggtgtacacggtgccctccaggaagtttgagctaacttgtcctcccttcctgccagaggctgggatggccaggccccccaggtttagaatccggaggccggggtggccaggcccccaggtttagaatccggaggccggggtggccaggccccccacgtttagaatccggaggccggggtggccaggccccccaggtttagaatccrgaggccggggtggccaggccccccacgtttagaatccggaggccggggtggccaggccccccgggtttagaatccggaggccggggtggccaggccccccgggtttagaatccggaggccggggtggccaggccccccgggtttagaatccggaggccggggtggccaggccccccg

SEQ ID NO: 551710 - DNA, 552 bp, Homo sapiens
gttttctgtcaaatggggtcagcgtgccgcctggccctgctgtgccacccccggaagcccctttgcttccagtcctggggggacattcttgacgcgtgtcctggaggtggagccgggggcaggttcctcgtaggtcctggtgtgcgcggtgcagcccctcatagggccgggtgtacacggtgccctccaggaagtttgagctaacttgtcctcccttcctgccagaggctgggatggccaggccccccaggtttagaatccggaggccggggtggccaggcccccaggtttagaatccggaggccggggtggccaggccccccacgtttagaatccggaggccggggtggccaggccccccaggtttagaatccggaggccggggtggccaggycccccacgtttagaatccggaggccggggtggccaggccccccgggtttagaatccggaggccggggtggccaggccccccgggtttagaatccggaggccggggtggccaggccccccgggtttagaatccggaggccggggtggccaggccccccg

SEQ ID NO: 551711 - DNA, 552 bp, Homo sapiens
gttttctgtcaaatggggtcagcgtgccgcctggccctgctgtgccacccccggaagcccctttgcttccagtcctggggggacattcttgacgcgtgtcctggaggtggagccgggggcaggttcctcgtaggtcctggtgtgcgcggtgcagcccctcatagggccgggtgtacacggtgccctccaggaagtttgagctaacttgtcctcccttcctgccagaggctgggatggccaggccccccaggtttagaatccggaggccggggtggccaggcccccaggtttagaatccggaggccggggtggccaggccccccacgtttagaatccggaggccggggtggccaggccccccaggtttagaatccggaggccggggtggccaggccccccasgtttagaatccggaggccggggtggccaggccccccgggtttagaatccggaggccggggtggccaggccccccgggtttagaatccggaggccggggtggccaggccccccgggtttagaatccggaggccggggtggccaggccccccg

SEQ ID NO: 551712 - DNA, 1134 bp, Homo sapiens
gaaggataaattatgtgtctgctctaaaaataatatattctcaggttaagaaaatttagcaagtagaattctttgctcattaggccaatagtctatcctggagggtctgcagaagcctacatgcactgagttttcaccaagtgatgaagaatttgtctcaaactttccaattagtgacctctaagaagcatttttttttttagctttataacgacctactactattcacttaatttgggcataactgtcactaaaagtctttctacatgcaggtggagtaagtaaagaaatttaaaatttcttaggctgaatcataaaaggaagaagaaagcatgtttcctaaagagaaacaaactcattggtgaggaagtggcttcctttttttcacccaggagagacaaaaatctagagtttttcattaagacatcttcattaatcaggttttgatatgtaaggtttcttcactaacaagagagaaagagaatatttaaaaaggaaaacattttggatatccagacatctctcctagcttatcaaagaaagatgcagtaaacctgttgtcttttgctttgctgaactagaaagtaaacataatacggagcttctgatgtgacttccttamgttgacatattggcaaatttcaaaatacacatttgatgtaacaatatctttcttgttgatgtgttttattttgttttgttttgttttgtagccgagaaccaatcttctcggctacattttatctctaaagacagaaaggggcttgacttccaagtatctaggtcttaataagcaactctgtatctcaccttccagtgtgattgaaacctggttgtttttcattaagttaaaacttgggaaaatcaatttctcaattctttgcagtttgctgtcttattagacagatgatcttgtagagcagaatgtgtcacagtcacacactagactgtaagtatttaatctcaggaaatttcccatcagcaaaatgcagaaagaaccctggttcctaaagatagaatataccatcaaataagaatttacctttgttaatctatgattcttgtctgctttgcaatatgcataaatctgccaatatgtgaatgcttttgtacagtagtcagtaaagaaaaaat

SEQ ID NO: 551713 - DNA, 634 bp, Homo sapiens
cctcaaacctcagcatcacacaatatattcaggtaacaaacctgtacatgtattccctgaaaataaaataatagttgaaataaataaataaatctaatatgttgcatatagacctagcaggtatttctgcttattatcaatactgatcaagctattgaataattatcaagaatatagttaaagataaagtaagattattttcagtttataccaactgctcatcrtgttgaaaattcatgaagaggaactgcctgtgagccaagtggcatcatcattctcttgctcttacactattaatgcttccttgaggctctttgctgataaaattgctcacatcatagtgaacagaaataaatttgtgacagtgacaaatctattgataataagtgaaaatcaagaccatgtcttgaaatcctcaatcttgcaatatatatttaaatagttacttggcgactggataaatctgctacagcaaatgaaaaaacaatcattcttcactaagttaatatgagttttactattataactaggaggcaaataaaaaggagttgaacattatccataataaaagaagcacacactcacaaagctccataccaactacattaaagtggaaatcactatatttggaaat

SEQ ID NO: 551714 - DNA, 636 bp, Homo sapiens
taatgtatataagctgcattattctttgtttacctcatggacagtgtgccccccaggacaccagtgaatgctatccctaaagccacctgctcaccatgcattgcatggacagttgtagtatgataacgacagtaccaagagaagctaggagaccaaaayagcagagttcattttagctcttggtgaaaagtaaaaacaaatcaatgccttttcctttgggaatcagtgaataaacttcttaatgtctgaaacatgtctccttgttcagttttcagaggagaaacagcatttttataagtcagtttaatttctctaagtttctgaactacctaccaatcctgtcttttactgaaaatcagcctgagagtgttgagtaagcaggatatgtaaaaattaatgtgctaaatttatttgtaaaaatatgctatactaaaaattactttacataggaagatttaagaatgtattatttgaaaagttgaccttttctattaaagcggtttccatggatgtataaagttcctaccactacggatagctattctgaagacatgagtattttaaagtcaagtttggcaattgtacaattagccaaatctttttggttgttgttaactttgtttctgagacagaatt

SEQ ID NO: 551715 - DNA, 636 bp, Homo sapiens
taatgtatataagctgcattattctttgtttacctcatggacagtgtgccccccaggacaccagtgaatgctatccctaaagccacctgctcaccatgcattgcatggacagttgtagtatgataacgacagtaccaagagaagctaggagaccaaaacrgcagagttcattttagctcttggtgaaaagtaaaaacaaatcaatgccttttcctttgggaatcagtgaataaacttcttaatgtctgaaacatgtctccttgttcagttttcagaggagaaacagcatttttataagtcagtttaatttctctaagtttctgaactacctaccaatcctgtcttttactgaaaatcagcctgagagtgttgagtaagcaggatatgtaaaaattaatgtgctaaatttatttgtaaaaatatgctatactaaaaattactttacataggaagatttaagaatgtattatttgaaaagttgaccttttctattaaagcggtttccatggatgtataaagttcctaccactacggatagctattctgaagacatgagtattttaaagtcaagtttggcaattgtacaattagccaaatctttttggttgttgttaactttgtttctgagacagaatt

SEQ ID NO: 551716 - DNA, 636 bp, Homo sapiens
taatgtatataagctgcattattctttgtttacctcatggacagtgtgccccccaggacaccagtgaatgctatccctaaagccacctgctcaccatgcattgcatggacagttgtagtatgataacgacagtaccaagagaagctaggagaccaaaacagcagagttcattttagctcttggtgaaaagtaaaaacaaatcaatgccttttcctttgggaatcagtgaataaacttcttaatgtctgaaacatgtctccttgttcagttttcagaggagaaacagcatttttataagtcagtttaatttctctaagtttctgaactacctaccaatcctgtcttttactgaaaatcagcctgagagtgttgagtawgcaggatatgtaaaaattaatgtgctaaatttatttgtaaaaatatgctatactaaaaattactttacataggaagatttaagaatgtattatttgaaaagttgaccttttctattaaagcggtttccatggatgtataaagttcctaccactacggatagctattctgaagacatgagtattttaaagtcaagtttggcaattgtacaattagccaaatctttttggttgttgttaactttgtttctgagacagaatt

SEQ ID NO: 551717 - DNA, 1528 bp, Homo sapiens
  misc_feature 1136: n = A,T,C or G
tcaaaacttcaattctctggcataaaaccttcaatacttttaatagaattttttcagagatactgaaataaacagacattttctgttgtccatgggatatgcaataatgaacagtaatttcacatagtgatatgaaactacaagatcaagattagtccagaactaagtttagtggacttgacctaattaggactatcccatgagtgccaggataagtattaaccatacctgaggaaatggcttggcaaggggaaaattaaaatattttaaaatgacttagaaacatctctgcatagaaaagagtggacagcaggtgagggggttagaggggcttgctcatatttatggtagccaacttctttgcaactctaataacaactccctcttctcctaggcacaccagaaaatggaaatgatcagtaagtaagcccatatcatcttttgtttagaccctaccatttacgtagtgaaaattattgttactctacttatacttttttggattatttctaaagtgtagaaaatctacatattggctttaactgtttgtcagagctctctccatttaacagagaaattccaaatgtaagatcatgtttaatcttagaatggtaaaatgggaaataaaaagatgaaatggaaaagtagaagaatgaatataattatgagggaaaatatcatagaaaaaatacctagagttttaaaatagtttcccagtgaaatttttaatatgtttatcacagggaaatttgtgcttctaccttgagccagttctcagtgcctttaaggtagatggctgttttactttgacttgattaaaataaagcagattttagtaatccaggcaactgtaacaaccaatgtgctgcaaagagacatgatgaattgattttcatgtcaaaacaaaccctgttttccttgttgacaggaatttgtggtctacctttatataagtgtttttatgtttcataacgttgtaaactctacatataatgctaaattactattcatatgacttagagactcctcatatgtccaaaggagataattagagttcgaaactcttttggatagatgagaactcttgattaaaatatgcagttcagatactatactacagtatctcactacttcangactaggaatatctccataattcagcctaagcccaaaaggcttgtaaacatttctatgtcttcctctcctagggcgagattggagacatgtgcgatatggaccttgtgccaagtgtttmacacaactcaaactaatttttaatttatctgacaatcaccactataagagagtggcagggatttattggcttgattccagaaaaagtaaaaattgctaaaaagtatatgtgtatttgtatgtgaaaagacaaagtttcttgccatggagatatatatatatatatatgtatgtatacacacacacacacgtatatatatacacacacattatatatatatatgcatatgtatcttcgtcattctgtttgtgtcacaatactttcacaaacata

SEQ ID NO: 551718 - DNA, 564 bp, Homo sapiens
taaaacatgcacatcaattccaactggtcttttgttaaaggctgcttttgagggacatagattccctggtacttcaggcatgaacttggtcttcagacacaagagaaagcaagcaggtaaagagaaggaggtgctggcatttggaagctgagctgacgtgcatggaagtartaagatcaagggaatctgggtaggacactgccttttggctacgcttggataaaaggcaacctaaaaagtaaaaatagcatgttctaaaattataaccttatagcctttttattcaagcctgcaatgctaacatatatttatccattctattcttagcgctactaaaatttcatttcaatagacccttcttatcattaatagttacaaactagttttatatatactatttccatttcacttgtcttgttatgaaaagtcctataatttagaaaatttctgcaatctattggaagaataatataaaatataaacataacatcaaaaataataaaacttcttgctaaataggaagatgtaaccagattgagaaacttatgacgctagatagaaaag

SEQ ID NO: 551719 - DNA, 593 bp, Homo sapiens
aaaagtccaacgaaatagaagataggtccagatgttccacacctcatctaacatagtagttctcaaccagaggtgatttgccactgggcatttggcagtgcctagaaacatacttcattgtcacaactgaatagaatagtggaagtagctgctggcatttaacaggtaaagacaagaaatgctgctaaatatcttacaatgcactgggtggccctcaatccaaataattatttgacccaaaatgtcagtagtgtcaattttttttttaatgctagaaattytggaagaaaaaaaggtgcaatgagtggtaagtgtactatagaaaattattagataatgttatagtcaacctccaaatttaagttgtgtgacaaaagagaaacatacttttactcaaataaccattcaatgcaggtgatcttgggcagtgaataagaggcttttctccctgggttgattcaggcattcagtctccttccattttgtagctcttttttttttttttttttttaatcaggaatggcccaagaatcctgtgtctgtagtgtgacgaggggaaagagtaagtgaatgtggcatatcagcttcttaaa

SEQ ID NO: 551720 - DNA, 593 bp, Homo sapiens
aaaagtccaacgaaatagaagataggtccagatgttccacacctcatctaacatagtagttctcaaccagaggtgatttgccactgggcatttggcagtgcctagaaacatacttcattgtcacaactgaatagaatagtggaagtagctgctggcatttaacaggtaaagacaagaaatgctgctaaatatcttacaatgcactgggtggccctcaatccaaataattatttgacccaaaatgtcagtagtgtcaattttttttttaatgctagaaattctggaagaaaaaaaggtgcaatgagtggtaagtgtactatagaaaattattagataatgttatagtcaacctccaaatttaagttgtgtgacaaaagagaaacatacttttactcaaataaccattcaatgcaggtgatcttgggcagtgaataagaggcttttctccctgggttgattcaggsattcagtctccttccattttgtagctcttttttttttttttttttttaatcaggaatggcccaagaatcctgtgtctgtagtgtgacgaggggaaagagtaagtgaatgtggcatatcagcttcttaaa

SEQ ID NO: 551721 - DNA, 675 bp, Homo sapiens
ccaattttctttgtaggagctgaattcctggcgatctatgcttatattcggtcatgtagaactcagttggttttgcacttcagtgcacacttactgttttgcacttccatttagactagtccactgacatgatttgtcatggawtttagcctttatgtcttctttaaattttccagtttatcagtcattgctgtgtgatagaagagacagggtggaaggtctgtctcttctatacaaaccttcagtgtttctggaccaactacttcaaagggtatttttgcagtcacacaatcttagggggaaaaaatgaagagaaaaaaataactgtcagaaatattatgaagttattccatataagtggagtctgtgttcccaatataatatcagacttagaggcaatattttacgggacaaaaatcacaatctataggagctgggccctctacattgcaatatacattcagtgtggcagggattttgcaagaggaagataaaaattttgttagttctattatttcttaaatctttaattttgttgatctagatcttgctgcctggttcattccagaagcaaaaggaagagggcctctttaatatttaagtcataaaatagagctcattcatccagaagtagtgatgcagaatgtgcagtgggaatagctatcaggaaacgca

SEQ ID NO: 551722 - DNA, 540 bp, Homo sapiens
aggaaggaaattctgcagtatgctacaacataggtgaagcttgaagacgttatgccgaggaaaataagccagtcacaaagaccaacactgtatgattccacttgtgtgaggttcccagagtaatcagattcctagagagataaagaatggkgggtgccaggggttggggaaggggaaatgggaaatcagtgtttaacagatatggagtttcagctggggaagatgagaaagttctgaagatggatggcagtgatgattgtacaacaacatgaatgtacttaatgccacagaatcattcatgttaagatgataaatgttatgatatgtgtattttaccacaattaacaaaaaacataatcttttgaaatcggagtggaggtcaaggctgtctcagtgaaacagaatggtctcatagactgctggcgtgaaggcagccacctggctttctctcctgctctctgctcctggacctcttgcttgagggtcttcactcgtgacagtgtccaggacataactgttttctttaatgagctgggcctt

SEQ ID NO: 551723 - DNA, 236 bp, Homo sapiens
ctgggactacaattacactcatgctagacytctcagtacttagtacaggtcattcaggctctgttcattcttttttcagtttgtataatttctattgagagccactgtctagtaatccctgaaaaaatctaaatgttgacattttcccaaagcacagtaccctgctgatggctgtagtttcctttggggaaggtttagagatatgttagtcaggaaatcagaaattagatgatatt

SEQ ID NO: 551724 - DNA, 464 bp, Homo sapiens
acccctccatcctggcttggacctccccaccccgggggaagcctgctgtcatctacaaggcattggacctcccaacccccgggggaagcctgctgtcatctacaaggcaggcaattgccccttcagcacctgcatcaaggtgtgtagcacaagccacatggtaatggacttattgttgttattggtcccctttgatgacaggcttgggctttgtgaggacagtaactatagtgtttatttccacatctccatgggcacttagagcctgccacagaattttgattcaggcttcaggaccccaaagtgcaagcacaaaaaattcaatggctagagatggtaagaacttcacttctgtcgacatcctgtctccaactgccttggagaagaaagtccattcctctatttcatattgcaaatctcatgcacrtatttctctttggatgactctaactcagcactgtaca

SEQ ID NO: 551725 - DNA, 867 bp, Homo sapiens
gggaatttaaaatcaaactcttgagtgttaggaagggtaatctttccaaaaccaaagaggtgacgcaggcagccacactggctgcatttctgagaattctgggttgctgtccatctccatgaaaccattctgaagccaatggacaggtaggccacttttgttcaaactaaacaattaactcatgtgtttatttgattcatttattaattccttcaccaaaagctcattgagtccaggcaattaatcagacactttaagtatggaagttatagaaatgcacaaaacacatcctttttctgtggagatcatggtctgctcttttcttaatcctaattccttccttgaaactcttctagggtccggcctgaacttagcctgagactccccagactgaggcaacacagcttaccacctgttgagggctgatctagccatagtgctggaagacagggtgacagttctatagctccttccttcattttcatgttacctggatgtgacaatttctccataggtgctgtttctattctcatccctacttctaatcctgtgtctgcatcacctaagcagggcttagcaactctcttcactccacctctctcccttcccacatcagctccattcttagtgagttttaaattttttagttgaatattttatattggagatggaagrgaaagttaggttatatcacacatcacccaaaatacttcataaacacttttagttgaccatgctcttttccataacatctcttcccctggctacatactgcctatgtctctcttccccttcggtctcaattatcttccccagacaccatatctctccaagttcattaatgttagttctttttcttccatctta

SEQ ID NO: 551726 - DNA, 1877 bp, Homo sapiens
ccccaccccctagcaaaaaaagcaatagcaaggagcatagaaataatgaaccaataaaataaaggacataaattttgctgaaagagaaaaattaaataggataatgtgataaatgtcagcagctgttagaagtacaagcccagtgtgcaggtctatgcaagagcaaagaaaaggaggctctgaagcatataggaggagtttctgtcctgcagtttctcaggcctgtggtcaagggaggatgttcccagaacaggaaacctcagaacaggtagcttttggccccatgagaggtttgtggctgatacatgcagtgtggtctctggacctctaagcctctgcttcatcaggaagatttgctgaaatgcgtttgacccccaggagcccttaccttagctctcataaaagtgttgcaaatcagtttggatttggataatgcctaaaacaggagagttgttttgttttgtttgtttgttttttaaaaaattcctagttatttaacactgagctattcctttgtatgtaaaccttcaattaaaagaaaatagttgggatccagaaatctaaatttctgaattctgaaatctgaatttttaacaagcacccaaggtgatttcattgcaggcaggtgttgcaaatacggtcattttctaagaatgtggtctatttgggcctcatgaagatccacctgctccaggagtctacaaccttgctttgccaggaatgcctttcttctcagacagctagtacttatcttctaaatgagcttaattactaaatccctaagggtgttgaacatcaaggactttatctcttggtgtagataaattagctcactgaagtgttgtacaccagtttggacctgggaggggtctagagagaggaaattattattatttgatacataacatttgtacatatttagggcatacagatgatgtttcattacatgtgtagaatgagtaatgattaagtcacgatattcagagtatccatcacttgaagtatttatcatttctatatgttggaaacatctcaaattctctcatctagctgttttgaaaaacacagtatattgttggtagctatgattatttttaacttctttgttatttaacattgctgctatgcccctttgtgtaaaccttcatatgggcatttaataccatcttctttaacccctggttcactggggtcttccagatacatgcggtttaattcttcacttttctaagggagaaaagtctgcaaatcttttttcctagtgttttcctttggaagcttcgtcccactgttatcacagagtatttgaattctcatcagtttccttgtaacttctgtggaatgtgctggtagaactgcagctgttagtccttgtacttagaacaggttttcttcccctgaaggattaataaggaggccaactatttgcagttgcttctaccccatctctgacagttctttaaccccctgacaaggaagggtctcagaatttctcattccttctcagggtgacaattgttgtgaattcttccttgtctattctttttacctcctctttttccattttagcctttcaatttgagttggatttatttctatggtggtctatyacctaacagaaaacgtggtgcaccaagtaatgagtaacttagtttttattatgttttaaaaaatacaataaacattttttgagcactttctgtgcactaggcatttgctaaatgctggtgacatgggtgagaaagtggggacagaggcagccaagtctctgaagaatcttgacacatccagtttgagaacatcccatctaacaagaaacagcgtaagaaaaagcctggaagtaaatttgtaggatggagacaattcaggtatgctcg

SEQ ID NO: 551727 - DNA, 898 bp, Homo sapiens
aagctacataaatttcagatataagcattatgaattgagtaaatgattaacagctctcactatataaaaactactttataatggcaaactactgagcacttccgtgtcaggtgctgtatataatgtatattacgtgtcaggtgctgctgtatattgcctaattaataacctttaagtcaaatcctttaaaacaaccctttgaggtaggtacctgatgcaagggatccctgtagcacactgtgagaagcgctggcagagtggacaagggcacaggcttggattcaaaatacctaacttcaaatcttagctctgccacactttttagttgtggcttctggcaagttacttaacctctctaaaagtctgtttctttctctgtaaaatgagagtaataatgcttaccacatatggttaataaaaggattaaataagacagtgcttacaaagggcaagtgaaaaatagagagtaaaaccaaaagaggacttacagtaagcactccataatgctttaggtaaagagcattactttcccaatatgcccagagttgttcttgttctatccactaactgaaatatttaaaaagaccatttcctagttgagactctacaaaaccatactttagaaagaacattcccatctcaatcttagcataagccagtaaatctactagaatcgtcatactgttacataaattatataayaaatgtgaaataaattttaaattctcacagttttattttctttcccattgtcttcagtcgtaaatatcaattgtttattaatttcatccatactaattaatgatcgtgttttgatgaagtgttgaaaagagacagcttccacatattcctgtagtcctgaaagcgtgacaaagaaaattactaagaataagcactt

SEQ ID NO: 551728 - DNA, 1356 bp, Homo sapiens
agtcagttactgcatagaatcaaaggcaagaactttcttttatttatttattattatactttaagttttagggtacatgtgcacaatgtgcaggttagttacatatgtatacatgtgccatgctggtgtgctgcacccaccaactcgtcatctagcattaggtatatctcccaatgctatccctcccccctccccccaccccacaacagaccccagagtgtgatgttccccttcctgtgtccatgtgttctcattgttcaattcccacctatgagtgagaatatgcggtgtttggttttttgttcttgcgatagtttactgagaatgatgatttccaatttcatccatgtccctacaaaggacatgaactcatcattttttatggctgcatggtattccatggtgtatatgtgccacattttcttaatccagtctatcactgatggacatttgggttggttccaagtctttgctattgtgaataatgccacagtaaacatacatgtgcatgtgtctttatagcagtgtgatttatagtcctttgggtacatacccagtaatgggatggctgggtcaaatggtatttctagtgctagatccctgaggaattgccacactgacttccacaatggttgaactagtttacagtcccaacaacagtgtaaaagtgttcctatttctccacatcctctccagcacctgttgtttcctgactttctaatgactgccattctaactggtgtgagatggtatctcattgtggttttgatttgcatttctctgatggccagtgatggtgagcattttttcatgtgttttttggctgcataagtgtcttcttttgagaagtgtctgttcacgtccttcacaaaggcaagaactttctatgacaaaatattcacagtgactatctctagcaatttcacgataacatttttttctgtttcttaagtgtattttataaactttctgcatttactagctggctttcctgacaacaaccatgtggtggckgctgctgttgttgttgttttaaataaaaagcatgggtaaattgatgtataagcttgcagtggggaagacctttcaaaataagacagaaaagccaatagcctaaaggtgctctgccaaatttgctgtatgaaatgttaaaaatgctgctgcagcaaaaaccaaaccaaacaaaaacaagaactaaacacaaagttaaaacacaagacaaattggagaaaacatttataaaatacaatgaaagacaaaagcctaattttcttaatttatcaagctcagccaaatcagtaaatgctgaacccaatggaaaaatcagcaaagaatatgaataagcaattgacagaa

SEQ ID NO: 551729 - DNA, 1145 bp, Homo sapiens
aaaaataaaattctgtcattctgatgtaacagttctttggggttcttattctccttccctcttttcttccttccttctttcccttactttcccttcttccccttcccttccttttgttcccttccttcctttcttctcttccatatttatgctgtgtctactctctccagatgctgttctagggcctgaggatacagcatgacaaaacaaagatttctgcccttctggggattacagatattaaataacaaacataaaaataagtaaatagtatgtgaagctttacattttattagacaaaagagtcacctaggggaatatggtgtgagagtgccagggggagggtggcaggtaatgttattaaggacagtggtcaggacaggtgacctagtagtcaaaacttcaaagaaatgagggaggttgctgcacggatgtatgaaaaaagagcagagagaactgaaaccacaaaagccttgaagaaggagcttttctggaaagttccaggaatagcaaagaggcccatgtagctggagcaaaatgagtgatgggataagggtataggagaagaaataagaaagatgagatggagccccatcatgtagaccttgagggtgttgcctgtgtgagtggagttaagctgagaagctgaaagaaggcgcatgtttaaggcatccttctggctgctgtatggagaaagggtggaggaagggtaaggagggcagcagagggagcagyagggagccactgcagaaatccaagcagtgggtaattatccaatggataagtcaatccattatccaaaagatggtggtggctgggccaaggcaaagcactggttcaaacatacctgttgtgcctggctctaaatgcaatgcccttgacttcatgacttcgtgactcagccagtgtgcataatactgaaaaacagtatataggtcagtaaccctagcaacttagctgtcagtcttctccttagcactcctttcaaagggcctgtaattttgggaaggggcatgtcttagagagttttgctaattcattgcctgagtgatgtctggcagagaatatccatgcatttatcaaagtcctgctaatgaacatattaatgaaacattaatattattgtttgctgcttcaagaatcac

SEQ ID NO: 551730 - DNA, 1145 bp, Homo sapiens
aaaaataaaattctgtcattctgatgtaacagttctttggggttcttattctccttccctcttttcttccttccttctttcccttactttcccttcttccccttcccttccttttgttcccttccttcctttcttctcttccatatttatgctgtgtctactctctccagatgctgttctagggcctgaggatacagcatgacaaaacaaagatttctgcccttctggggattacagatattaaataacaaacataaaaataagtaaatagtatgtgaagctttacattttattagacaaaagagtcacctaggggaatatggtgtgagagtgccagggggagggtggcaggtaatgttattaaggacagtggtcaggacaggtgacctagtagtcaaaacttcaaagaaatgagggaggttgctgcacggatgtatgaaaaaagagcagagagaactgaaaccacaaaagccttgaagaaggagcttttctggaaagttccaggaatagcaaagaggcccatgtagctggagcaaaatgagtgatgggataagggtataggagaagaaataagaaagatgagatggagccccatcatgtagaccttgagggtgttgcctgtgtgagtggagttaagctgagaagctgaaagaaggcgcatgtttaaggcatccttctggctgctgtatggagaaagggtggaggaagggtaaggagggcagcagagggagcagtagggagccactgcagaaatccaagcagtgggtaattatccaatggataagtcaatccattatccaaaagatggtggtggctgggccaaggcaaagcactggttcaaacayacctgttgtgcctggctctaaatgcaatgcccttgacttcatgacttcgtgactcagccagtgtgcataatactgaaaaacagtatataggtcagtaaccctagcaacttagctgtcagtcttctccttagcactcctttcaaagggcctgtaattttgggaaggggcatgtcttagagagttttgctaattcattgcctgagtgatgtctggcagagaatatccatgcatttatcaaagtcctgctaatgaacatattaatgaaacattaatattattgtttgctgcttcaagaatcac

SEQ ID NO: 551731 - DNA, 1145 bp, Homo sapiens
aaaaataaaattctgtcattctgatgtaacagttctttggggttcttattctccttccctcttttcttccttccttctttcccttactttcccttcttccccttcccttccttttgttcccttccttcctttcttctcttccatatttatgctgtgtctactctctccagatgctgttctagggcctgaggatacagcatgacaaaacaaagatttctgcccttctggggattacagatattaaataacaaacataaaaataagtaaatagtatgtgaagctttacattttattagacaaaagagtcacctaggggaatatggtgtgagagtgccagggggagggtggcaggtaatgttattaaggacagtggtcaggacaggtgacctagtagtcaaaacttcaaagaaatgagggaggttgctgcacggatgtatgaaaaaagagcagagagaactgaaaccacaaaagccttgaagaaggagcttttctggaaagttccaggaatagcaaagaggcccatgtagctggagcaaaatgagtgatgggataagggtataggagaagaaataagaaagatgagatggagccccatcatgtagaccttgagggtgttgcctgtgtgagtggagttaagctgagaagctgaaagaaggcgcatgtttaaggcatccttctggctgctgtatggagaaagggtggaggaagggtaaggagggcagcagagggagcagtagggagccactgcagaaatccaagcagtgggtaattatccaatggataagtcaatccattatccaaaagatggtggtggctgggccaaggcaaagcactggttcaaacatacctgttgtgcmtggctctaaatgcaatgcccttgacttcatgacttcgtgactcagccagtgtgcataatactgaaaaacagtatataggtcagtaaccctagcaacttagctgtcagtcttctccttagcactcctttcaaagggcctgtaattttgggaaggggcatgtcttagagagttttgctaattcattgcctgagtgatgtctggcagagaatatccatgcatttatcaaagtcctgctaatgaacatattaatgaaacattaatattattgtttgctgcttcaagaatcac

SEQ ID NO: 551732 - DNA, 524 bp, Homo sapiens
ccctaataatggctacttttcagggttgttayactattatgtacataatattatatatgactaaatttctagttacttaaaatggtggttaacaagatcattgcattcccagcattatatataaactgatatttactctgctattttctttttgaagttttcagaagtttaaccatttcaccatttacataagaataatgaacagctaacacatagtgcttattatgagccagcactgttctaagtgcttcccacatatgctcatttaatcttcatttgtgtgaaattgatatcctcaccatcatccccattttacagatgaggaaacagacaagaaattcaccaaggtcacacaaatagtatgtggtatacctgggattcaacccaggccttacggttccagtatctgtgcactaaacttcagggcatataaacatcgaatatgccacatgatggaatcataaatcatttaagaaaaaacaggggaaatgcaatatgaacaaagttttacctaaatggcacag

SEQ ID NO: 551733 - DNA, 592 bp, Homo sapiens
gcactttggattaaacggtgcccaaaatagatatctctgtcctcagagttaggatctatctagtggaggacacagacatgggaaaaataactttcttttttcaaattatgtaaattataactcagataagcactgtgtggaaagttacatgatactttaagaacatataacaggggtgtttgacctaattaggaaagtaagagaaagctttcttagtgaaggcatggtagaatagtgagatgaagaataatgtaatacttagtttaagaaagaaagcagaaatttctatggaaatcagttttaataaagttgttctttgctattgcactctataaaaaatgaatatgctgaaggcatgaaaacttttgatttttaaatttttaattatgactacataataattgtacatatgttatggggtacatgtgatattttgttacaarcatgcaatgcataatgaccaaatcagcgcaattgggatatcaatctcctcaagtatttatcatttgtttgtgttaggaacattccaattacactttttagttattttgttttagttatttttgaaataaataacaaattactgttacgt

SEQ ID NO: 551734 - DNA, 550 bp, Homo sapiens
aatacatattttgaaaattttatatgaactacttttttcttgtgtattcaaagattcatacttataaaatgacatacaacttttggtgtgttaatacttttcctcaaacctattatatagttctttgttttattgtttttgttgtggagcaaatcagaacaatctgtcaatgtcccaatgaccaatactcaaayaatcggagaaagaaaattaataacaatagtattgccttataacacatattctaaaataaatatttacatttacttgttgatagaaagaaataattgactaaataattgggtataaggaacatctttctcttacataagaagcctaacaaaaaatatagaattaatgagagaaatagaaagcctcattagaatttagcagtaataacagtcaggcaagatctaccaatggttgctaaaaatcaatgagcgtaagtatgagtagaaacaggatgtttgtatagaatcaaaggacctcccttaggatatttattaatttcaaagagaaaaggagtaaacttaaattagagatatctggc

SEQ ID NO: 551735 - DNA, 550 bp, Homo sapiens
aatacatattttgaaaattttatatgaactacttttttcttgtgtattcaaagattcatacttataaaatgacatacaacttttggtgtgttaatacttttcctcaaacctattatatagttctttgttttattgtttttgttgtggagcaaatcagaacaatctgtcaatgtcccaatgaccaatactcaaataatcggagaaagaaaattaataacaatagtattgccttataacacatattctaaaataaatatttacatttacttgttgatagaaagaaataattgactaaataattgggtataaggaacatmtttctcttacataagaagcctaacaaaaaatatagaattaatgagagaaatagaaagcctcattagaatttagcagtaataacagtcaggcaagatctaccaatggttgctaaaaatcaatgagcgtaagtatgagtagaaacaggatgtttgtatagaatcaaaggacctcccttaggatatttattaatttcaaagagaaaaggagtaaacttaaattagagatatctggc

SEQ ID NO: 551736 - DNA, 608 bp, Homo sapiens
  misc_feature 78: n = A,T,C or G
tgggaggtggaggttgcagtgagcygagattgtgccactgcactccagcctgggtgacagagcaagactccagctcanaaaaaaaaaaaaggaagaaagaaagaaaaaagaaaacaggtcagcagaacagatgatctttaaggtcccaactccaaaagcgatctacaatattcactgacagagctaattgcttgggcagaactttctttcaaattaaagcagcaattgtcctggcttcccacagaagcatatgctgttactatcataatatgaaatggcttttcttttattagcatcgcctttggaatctggtgccttataggacataaaatgaatcataaatatttacaaatcatgtataataaagatgattttttaatgaggcacacttgagtgcttgacccagctcttgatctctctaagaaaagtctttgccctcccctcgcccagctctcatctcctgtagcccccatgaccagagataacaaacagctgacccagaaggagacaattgatcacaatgctgcccaacagccaattagattcccctcaggtagaactaccatttgatccagtaatcccactactggctatctgcccagaggaca

SEQ ID NO: 551737 - DNA, 518 bp, Homo sapiens
aaaattagaaaacacattagtaaagagaattcaacattatattaagaaaataatacattacgaccaagtaggatttattctaagaatccaatgataattgagtgttatgaaattctttaattcagcatattaatagatacaaagaggagaaatatgtaataatttccacagatattgacaaagtggctgaaagaattctctaatcatgctaagtaagcattaacatgattagagtattctttcgaccacttttgtcaacatttgtggaaaaggaagcaataagaaattcttccttaacawgattagtcctcaactcagcatctcacttacttaatggggaaatactggaaactttccactaaaatcagaaacaagacaaggatgaccactatccactactattcaacataataagagaggtacttaccaatgtgatttggcaaaagacgacagagaaataaacaaaattacctctattttcagatcatatgatagagtatgtgtacaattcaagaaaa

SEQ ID NO: 551738 - DNA, 642 bp, Homo sapiens
tgcttaatttgcttgttggttgacgggcatttaaaaggctcctctttttttagaggtaggatctcactatgttgcccaggctggtctcaaactcctgagctcaagcaatctgcccaccttggcctcccaaagtgctgggatcacagacatgaaccactgtgcccagtccccagctccatatttttgcaattgcgaattctttctgtgctttcttcttagcctccgttagtttctcactatgacaaagttacrgtgcaagtaaaagaaatatgctcttgcctgacaggatgaatattctgcatttagcttgtattgctattttattgaataattattgtacctgactacaattattatattaacagtactctcttgactgacaagatgaattttttcattcaacttttattgctattttaatgaacaattattgtacctgactacaattattatagtaacaatatgcagtcattgaataaggcttgggctttggaaatatacaaagtacagattaatctgaacagtgaaacttttaaatgataatgcctcaattttgtaggtcgtttttattataatgcactttctcacatattctgcttcaactccgtaaatatgttttttccagctttaacaaagggtggg

SEQ ID NO: 551739 - DNA, 642 bp, Homo sapiens
tgcttaatttgcttgttggttgacgggcatttaaaaggctcctctttttttagaggtaggatctcactatgttgcccaggctggtctcaaactcctgagctcaagcaatctgcccaccttggcctcccaaagtgctgggatcacagacatgaaccactgtgcccagtccccagctccatatttttgcaattgcgaattctttctgtgctttcttcttagcctccgttagtttctcactatgacaaagttacggtgcaagtaaaagaaatatgctcttgcctgacaggatgaatattctgcatttagcttgtattgctattttattgaataattattgtacctgactacaattattatattaacagyactctcttgactgacaagatgaattttttcattcaacttttattgctattttaatgaacaattattgtacctgactacaattattatagtaacaatatgcagtcattgaataaggcttgggctttggaaatatacaaagtacagattaatctgaacagtgaaacttttaaatgataatgcctcaattttgtaggtcgtttttattataatgcactttctcacatattctgcttcaactccgtaaatatgttttttccagctttaacaaagggtggg

SEQ ID NO: 551740 - DNA, 568 bp, Homo sapiens
taattttacatgactactttttaatatgcatgcatgaattaaccaatgtcaaggtaatcattttttcaatattctgccaaataacaaagtttaactcccttcctctcacaacttcactactttaatttgatcttattgacaacaatcataatgaatctctatctctcattttttaagatgagcaaatatttagatttactaataggtgtacagaaattttcattcaccaaaacttcttccatcatgctttattycaagtttgatttctttgttgaatttaaaattttaaatttttaaatataaaatttttttaattctctcaataattcaaagaattgaactatcacgtattgattgcactaaaagtgttgtatttctttaactcataagttaaatttaaatagtaactgactcaactaatattttttagtatcttctatatgtcaggtattgatgtaggtgctagggctgcaacactgaaccaaaaggcaaaactatatgcaaagagcttataatcaattgagtcattataaaataataagatgtacaatatagtgtatgcctgatt

SEQ ID NO: 551741 - DNA, 568 bp, Homo sapiens
taattttacatgactactttttaatatgcatgcatgaattaaccaatgtcaaggtaatcattttttcaatattctgccaaataacaaagtttaactcccttcctctcacaacttcactactttaatttgatcttattgacaacaatcataatgaatctctatctctcattttttaagatgagcaaatatttagatttactaataggtgtacagaaattttcattcaccaaaacttcttccatcatgctttatttcaagtttgatttctttgttgaatttaaaattttaaatttttaaatataaaatttttttaattctctcaataattcaaagaattgaactatcacgtattgattgcactaaaagtgttgtatttctttaactcataagttaaatttaaatagtaactgactcaactaatattttttagtatmttctatatgtcaggtattgatgtaggtgctagggctgcaacactgaaccaaaaggcaaaactatatgcaaagagcttataatcaattgagtcattataaaataataagatgtacaatatagtgtatgcctgatt

SEQ ID NO: 551742 - DNA, 675 bp, Homo sapiens
tcttacaaattttatttctacgtcatacatctttttatcttggagatcccaattcacaaaaattatttcaaattgtttttgtttagtatacaaaggagtagtttgcatgtaacactggaaaattccttccttcatcattgtggtgtaggggaagtaactgaaggcttaggtttcagttttgtccccatccctgccattgaatcagccatgtccttgatcagtggagcagccagaaggaagagctggctgctccttgctttctggtcccagctgccctgttctgccccagcagctgtctgccagctgattactcagggatgttctgggttatacgtcaaagattgaccgcagttattttaggaccrctaaagatgtccttttgggagaatataagctgtgcaatctagaattatgaagaattagtattacattctatgccaaaacaggaataagatgaatagtcttatttataaaaattgacgtgaagtcactgcaacatcaactgtcctagaacctaatccatagaaccttaactattttctgtttgttaaggaggtatatgtagtattccacttcccatagataagttaaagattactttgagttcacttaaatacagtacagaaacatcaaatcatatatcctttcagcctatttactagtcttttgatttca

SEQ ID NO: 551743 - DNA, 555 bp, Homo sapiens
ttcaagtcccacctgtgcctcctaacgagctaggtgaccttgggcaagttaatcttcgagagtctcagtttatttcacctttgaaagggaaagttagtgatatttagctcataacatggctgtgaggaatgaaaactactttgacacatactgggactttagtaaatggaaggtataagttgcaggcatgtagaatttcactaatttcctcaatttaagacaataaatgatagaaatgaataaactttatatgtccttctccctattcatgactgtagagttgttatgtggcacttgttttatgaagcattctctctgacattgtaaaaaataatacatctaccacaaccatgtctaaatggctaaaagctatatgcacccacttaaaagcactttgagataagtactgttaagtggaaaatgcccagaatacagtgacaccagtaattcttacgttgttttcaatgttakttcatattcagattaaacaaataatttctgcctgcctaaaatatatcacggtctgttagatagagcctacagttaccctgttca

SEQ ID NO: 551744 - DNA, 642 bp, Homo sapiens
gtgatgaawgaagggaaaagaaatcttggctgattttcatgaaataacctcctgcctggcacaagcccatactgggttcagagttcatagagtcctggggaatgaaactgaatgagtcttcacagcagggctggagtgcccaggagacaaactgaagagtgttcagggcaaaagaaagacaggagtcagtgaaacttgctaaggcataacactgatattggcatctgtcagtgacgatggccaaaccccttcctccccttcaagtacaaaggaaagaattttttgatgtacagtatatagcgaatggatgttaaaaattatgttttcttttttaacaacaatgtttactgagaggtgctcatcttatgcatgaaaatgcacactttctgaaatggggagcatgtattggaaagaaattaggacagaaaatggagaaaataagtggaataaaaatgggggaggacagaatataaaaatagcaaaataaaaacaaaggaaaagtacacagtgaataccacattaacatctgataatttcgttatgctccttatggaaagtagaatggagaatattaaagtgaagaaagttgcatgccttcctgccttcctgccttcccgccttccccccttccctcctaccttc

SEQ ID NO: 551745 - DNA, 642 bp, Homo sapiens
gtgatgaaagaagggaaaagaaatcttggctgattttcatgaaataacctcctgcctggcacaagcccataytgggttcagagttcatagagtcctggggaatgaaactgaatgagtcttcacagcagggctggagtgcccaggagacaaactgaagagtgttcagggcaaaagaaagacaggagtcagtgaaacttgctaaggcataacactgatattggcatctgtcagtgacgatggccaaaccccttcctccccttcaagtacaaaggaaagaattttttgatgtacagtatatagcgaatggatgttaaaaattatgttttcttttttaacaacaatgtttactgagaggtgctcatcttatgcatgaaaatgcacactttctgaaatggggagcatgtattggaaagaaattaggacagaaaatggagaaaataagtggaataaaaatgggggaggacagaatataaaaatagcaaaataaaaacaaaggaaaagtacacagtgaataccacattaacatctgataatttcgttatgctccttatggaaagtagaatggagaatattaaagtgaagaaagttgcatgccttcctgccttcctgccttcccgccttccccccttccctcctaccttc

SEQ ID NO: 551746 - DNA, 642 bp, Homo sapiens
gtgatgaaagaagggaaaagaaatcttggctgattttcatgaaataacctcctgcctggcacaagcccatactgggttcagagttcatagagtcctggggaatgaaactgaatgagtcttcacagcagggctggagtgcccaggagacaaactgaagagtgttcagggcaaaagaaagacaggagtcagtgaaacttgctaaggcataacactgatattggcatctgtcagtgaygatggccaaaccccttcctccccttcaagtacaaaggaaagaattttttgatgtacagtatatagcgaatggatgttaaaaattatgttttcttttttaacaacaatgtttactgagaggtgctcatcttatgcatgaaaatgcacactttctgaaatggggagcatgtattggaaagaaattaggacagaaaatggagaaaataagtggaataaaaatgggggaggacagaatataaaaatagcaaaataaaaacaaaggaaaagtacacagtgaataccacattaacatctgataatttcgttatgctccttatggaaagtagaatggagaatattaaagtgaagaaagttgcatgccttcctgccttcctgccttcccgccttccccccttccctcctaccttc

SEQ ID NO: 551747 - DNA, 639 bp, Homo sapiens
ttgggattaaaggaatgagctaccatgcttaggccctgctggtttatattaggagagacctggggtttttttttttttttttttttttgagacggagtcttgccttgctctgttgcccaggctggagtgcagtggcgctatctcggctcactgcaagctccgcctcctgggtttatgccattctcctgcctcagcctcccgagtagctgggactacaggtgcccgccaccgcgcctggctaattttttatatttttagtagagacaggttttcaccgtgttagccaggatggtctcaatcttctgacctcgtgatccgcccgcatcggcctcccaaagttctgggattacaggcrtgagccaatgcgcctggcctttttttttttttttttttttttttttttttttttttttgagacagggtctcattgtgtcacccaggctggagtgcagtggcctgatcttggctcactacaacttccacttcccgggttcaggcaattctccagcctcagcctcctgagtagctgagactacaggattgtcccaccacaaccacacctggataattttcatgttttttatagagacagaatttccccatgttggccagggtcgtctcaaactcctgacctcaatg

SEQ ID NO: 551748 - DNA, 639 bp, Homo sapiens
ttgggattaaaggaatgagctaccatgcttaggccctgctggtttatattaggagagacctggggtttttttttttttttttttttttgagacggagtcttgccttgctctgttgcccaggctggagtgcagtggcgctatctcggctcactgcaagctccgcctcctgggtttatgccattctcctgcctcagcctcccgagtagctgggactacaggtgcccgccaccgcgcctggctaattttttatatttttagtagagacaggttttcaccgtgttagccaggatggtctcaatcttctgacctcgtgatccgcccgcatcggcctcccaaagttctgggattacaggcgtgagccaatgcgcctggcctttttttttttttttttttttttttttttttttttttttgagacagggtctcattgtgtcacccaggctggagtgcagtggcctgatcttggctcactacaacttccacytcccgggttcaggcaattctccagcctcagcctcctgagtagctgagactacaggattgtcccaccacaaccacacctggataattttcatgttttttatagagacagaatttccccatgttggccagggtcgtctcaaactcctgacctcaatg

SEQ ID NO: 551749 - DNA, 628 bp, Homo sapiens
gtcaacttctacagaatcatatactcactgctacttaaggtgattttctttttttttttctctttgagacgaagtttcactcttgttgcccaggctggagcgcagtggtgcgatctcaactcactacaacctcggcctccctggttcaagcgattctcctgccttagcctcccaagtagctgggattacaggcgcccagcaccaggcccagctgatttttgtatttttagtagagacagggtttcaccgtgttgaccagtctggtctcaaactcctgacctcaggtgatccacccaccttggcctcccaaagtgctgggattacaggcgcgagccaccgcgcccagcctggtcttttttttttttttttttwtttatatatatattagacttaactgatacaatctttctttattggaggaaatttcctgtattcaaccaaacttgttagataattgttttcatgttaccggtgttcagtaattgaatatccaaaattttctccttctcttgaccttaagtctgcagacgtgttcatcttcccctcatcctagcaaaaatccctttgtcttcctctgccattcaacttgttaaaacttgacatattggtcatgaaacttgtcatattg

SEQ ID NO: 551750 - DNA, 628 bp, Homo sapiens
gtcaacttctacagaatcatatactcactgctacttaaggtgattttctttttttttttctctttgagacgaagtttcactcttgttgcccaggctggagcgcagtggtgcgatctcaactcactacaacctcggcctccctggttcaagcgattctcctgccttagcctcccaagtagctgggattacaggcgcccagcaccaggcccagctgatttttgtatttttagtagagacagggtttcaccgtgttgaccagtctggtctcaaactcctgacctcaggtgatccacccaccttggcctcccaaagtgctgggattacaggcgcgagccaccgcgcccagcctggtcttttttttttttttttttttwtatatatatattagacttaactgatacaatctttctttattggaggaaatttcctgtattcaaccaaacttgttagataattgttttcatgttaccggtgttcagtaattgaatatccaaaattttctccttctcttgaccttaagtctgcagacgtgttcatcttcccctcatcctagcaaaaatccctttgtcttcctctgccattcaacttgttaaaacttgacatattggtcatgaaacttgtcatattg

SEQ ID NO: 551751 - DNA, 605 bp, Homo sapiens
tggtgccactgcactccagcctgggcgacagagcgagactccatctcaaaaaaaaaaaaaaaaaaaaaagagggagtaagatgaggctaggtttttttgccttttgtgtgtgtatgtgacagtgtgtcacwctgttgctcaggctgaagtggagaggcatagtctcgtctcactgcaacctccacctcctgggaccaagtgatcatcccacctcagcctctgagtagctggaactactggtgcaccaccatgcctggctaattttttgtgaagacaggtcttgcgatgttgcccaggttggttttgacctcctggactcaagtgatccacatacttaggcctcgcaaaatgctgggattataggcatgagccatcacaccaggcctgaggctgctctgatacagagttttagctgttgaagaaatagccaggtaaaaatggtccagaggcctctgaaaatggggagatctagaaccctttgggtgtgaatttgggagcctttcctacagacatgataattaaggaattattgaggtatagaagaaaagagtataagcacaggatctagagaatgccagagataaaagacagccgcagagaagacc

SEQ ID NO: 551752 - DNA, 516 bp, Homo sapiens
tgtgtctcaaaaaaaaaaagttatgtgaatgtggtctctctctctctcaaatcatcttattgtactgtactcacctattttcaggtggtggttgtctatagataactaaaaccatgaaaagtgaaaccagggtctactgtgaatacagcctaagggtcagagtgagaaaatgcttaactcctttcctttcttaacctgatgtkttttcttcttatttgagtaaactgatttacatttcctttccctgaaataggtgatcctttcacagaccggaagaatgcggatggtcaacatgcttactcaaagagctgagtcataggccatagggcttagtggaaagaaagctaggatagttgtgagtatgcctaactgtgtgtgatcttgggaaacttatttaacatctctgagactatatcctcacctgtaaaatggagcaattaatatctttagggcagggttgttgttaggataagagaaaatacatgtaaacgtatgacatttagttgatgcttaata

SEQ ID NO: 551753 - DNA, 627 bp, Homo sapiens
agccattttcttacccacctgctcttcccaaatgccagggtcagacacagggaagcaagtgagaaagaaaatcagtggaaatgggcctgggatttaaatgagtaggtcccagacatggagcccaataggactgccccattagagctgggaggtagcgggtaggtaaaaggggacttcaggatgactgaaaccctgatgagagatctcagatggacataggagatctgaaagctgaagggaacagggaatattgttcaccttctgaagggtagctaggagaccaggggtctcttgcccaacatggtacctaagcagaagacctgcaatggcagagagtacatgtctaggtggccagatcagcctggggagactgttcaccctggcatgcagagaagaaatgtaggtgtagcccagagggcagctggaaaagaggcaaagasgctttgcaggtgggacaaggtgaaagcaaaaagcattgaccttgcaactgcaagccccagtggagaccaaggtcacttcctactagtgcagcagggcagagtcaatagtccagaactcacaggacaagagacacctcaacagagtcaacaaggtgcccctcccatagggccagaggtacccaagacc

SEQ ID NO: 551754 - DNA, 709 bp, Homo sapiens
tcaattttttaaatttccttcatgaaattagattaatacatctagtttttattctgcttttgaaagttaacattttcttttgagcattgcctaacattattaaacattatttttaaatgcttttgtaatgctgtatagtattccatctaatagatgtattcattaacgcagtaagcaaatatttcctaaatgttcactgtaggccaggtcctcggctaagccctagagctaacagtgggaaacaaggaaacagagggttatgragagaggaaaatgtgggattgtaaacacacataggtgcatattaccattggtttagaccttcctctcttgttagtcatttatctggcatttttgacattgcaactaatacatcaaggccttgtagcggaggtcacagcctgaacctatgctgagcctgctgagtgctggagataaggtgctgagtgcagacacaagggaggtattttcccgttgcatttctgagaatgggtagatggtttggaaaggatctctcctaaccacctggcccgtggacttcgagccccatggggaaaaaggctgttgtcgaaacagaatgctattttcagggcctcctgagacacaggccccggtgcccctcagggtcagagctggcagcgtggagaggagatcgtggagacagtgtactcagcaggacagcaacgtcctctgggtggctgctgcgtca

SEQ ID NO: 551755 - DNA, 1080 bp, Homo sapiens
tagttcttataaaatatcaagttatgttgattttcatactttgtcatataccatgttattatgttacttcatgtttttaattcttaattcattgaaatctgttttttagcttctcctatctgatttacttgcaaaataaataaaatctttgatgagaaaactgtgctgttacatttgctttttccttaccttacctctctttaaggtcctccacagatacctgtgactcagactggctaacattgagtttgtttctaaccctccaccagtttctggactactccttctttatcctttcctcttatattccagttttagtaaatgaaaccaacatccacccagttaacttcctgattttcacaacccttatccagttggtaagcagtacccacaaattttacatccagatagctctcaagaaaatggcccagggtctgttgtttccactttcgttcagagcctaatactttttgtttcaaatactgcagcagtatcctaaactgttttcctgcttctaaacctatctccctctattccattttgagatagaaggttaccaaatgttgtggaccatgtatccacagcacatgcgtgtgtatatgcacacacacacacacacacaaatatactactatcatttatacattatggaacatgcatcctatgtattgtagaactttcatggagctataaattttcaagactgtaataaagagaactatagagattctttttccccatactcccagtaaatgttgttgtatgtgtttgcaatctctgctttggagattgctgcttttgattgaagatgtagtcattgttgtaaactgaaatactttgtcatttattaatctaaaaatgtttagtggctcccarctccctattggataaaatataaattttttatatttgtcctccattgcctggtacttccatagtttatctattttatctcattattcataagggacgccactccccagtatacactcattattttggttctgctgaacttccaattgcctaaacacttatttttttaaccttgcctttttttgtccttatacatgctagactgca

SEQ ID NO: 551756 - DNA, 509 bp, Homo sapiens
cctcccgagtagctgggattacaggcaattgccaccactcctggtttatttttgtatttttagcagagacggggtttcactatctgttggccaggctggtcttgaactcctgacctcaggtgatccactmgccttggcctcccaaagtgctgggattacaggcgtcagccaccatgcccagcctagattgttgttgaagcctgttttcctcttctctttcctcagtttatttcttcttttacaccctcccccatcactgctctgcccatccaaaggctgtggctggcacatgatggaacagaatctcccagcctcaagttccaaacctgcactatccaacagccaggctctcagatgggaagcttcaaagccttgtgacagcctggctgaaccactccagcctgggcaactcccttcaattcctaccctgaaaaacaggcatctcctctggccaccgctcaaagaagcctgtctggaagcctcaggcatccgctcctggaagcctgaac

SEQ ID NO: 551757 - DNA, 509 bp, Homo sapiens
cctcccgagtagctgggattacaggcaattgccaccactcctggtttatttttgtatttttagcagagacggggtttcactatctgttggccaggctggtcttgaactcctgacctcaggtgatccactcgccttggcctcccaaagtgctgggattacaggcgtcagccaccrtgcccagcctagattgttgttgaagcctgttttcctcttctctttcctcagtttatttcttcttttacaccctcccccatcactgctctgcccatccaaaggctgtggctggcacatgatggaacagaatctcccagcctcaagttccaaacctgcactatccaacagccaggctctcagatgggaagcttcaaagccttgtgacagcctggctgaaccactccagcctgggcaactcccttcaattcctaccctgaaaaacaggcatctcctctggccaccgctcaaagaagcctgtctggaagcctcaggcatccgctcctggaagcctgaac

SEQ ID NO: 551758 - DNA, 640 bp, Homo sapiens
taatacaaaatacagaaagtccaatcgcatacattaaaagtttgcaatcacattatagaaacaccatcttttttttttctttttttttttttttttttttggagagtctcactttatcccccaagctggaatgcagtggcctgatctgcaacctctgcctcccaggttcaagagattctcatgcctcagcttccagagtagctgggattacaggcacctgccaccacgcccggcattttttgtatttttagtagagacggggtttcgccatgttgaccaggctggtctccaactcctgacttcaggtgacccgcctgcctcagcctcccaaagtgctgagattatacatgtgagccaccgtgcccgcccggaaacactatcttattattgcacagctttaataatgtaaaatatttactcacaactgcttataatattgtcaataatttatgatattttgtctgtaacttgttccccagtcattgggctacagaccacactagaaaataactgtccacatagtggctacaaacatttaaattttaaaaaaaagcttcttacygacaggtacttgtacacacaaagcattctctctttcccaatagaacttcacattgcattgaaataatccacttattta

SEQ ID NO: 551759 - DNA, 329 bp, Homo sapiens
cacctgggattaatgagagctttactttgagacttgagtctctcttccaaatttcgaagcttctcatgcccatcacagctctgggttttgcatatttgctattgaccttgagcaagccattttctctctaagctgtattggcatcacaatccagctatcttgaattgctaggcatcagggcctcacaacctctgtagccacagtcaactaccaygtagtgatgagccccagaaggaactaagctgtagccaggcaagaagcaaagcaaattttggaacaagtaggggctcatactttctccaacctgcaaggagtcaatcgttgtccag

SEQ ID NO: 551760 - DNA, 381 bp, Homo sapiens
tggtagagctagaatttgaatttaggtagtttggctaagaaatctatgctactttccagcttgccaagggagagtgaacaatattaatcattgtaacttacaaattctattacagccccctgttccawaaaaacatactttctagtctataaaatacagaaacataactaaaaaatgtagaaagaacaaacacttgacttaatatggaaagtttatcaacccctatctttatagactttttgttagtttaggattttttttgcagggtgaaaaaataaagaaatgcccattgtaatactttttttttttaaagtatttagtattcatgggaaaacagcaattgagagtatcttcaaaatctacaatattggtctacatctg

SEQ ID NO: 551761 - DNA, 956 bp, Homo sapiens
taaaaataaatgaaaatcaagtttgagaatattataataatttgactgtctttaaatactgtcaattttttaaaatagttaaatccaaatatagaatttaaaacatttactatattaaaagttacttgcgggaaaattgaatatataaataaaatattatgaaatatataaaaactatatataattaacataaacatacttttgaaaaaatatattttcttcataagcttcagtgacagcagtcatttttagtattgtyattcagtgcatctgtaaaaagacaagttttcaattttgtctaaaaaacataaaagagtcaattctttaatcctaggcatcatctggatattcaaggagaaagaccacctcaattatagaaataatgataatgcttgctgagtgcactaggcaatggcctaaaaatcccatatattagttcatttattttccattacaacattatgaggtaggaggtattattagattggtgcaaaagtaattgcggtttttgccattacttttaacgacaaaaggtttttgctattacttttaacgatgaaaggtttttgccactacttttaatgccaaaaaccacagttactttttcatcaacctaatataaaaatccccatatcacagctaaagaaagaggaacgctaattggttaaggaacttaacctacggtaaaaaagctggtgaggagcagaattaaaatgtaaacacaagctatctggttctacagtgcactaagctatcctgcttctacaatgaattcaaaacaaaaaactatattataacatgaaacgtgttgatgtgaggatctttggaaaaaaattaggatgcaactctttttttttcttttttctttttctttttttttttttttttgagacggaatctcactctcttacccaggctggagtgcagtggcaagatctcggctcactgctacctcc

SEQ ID NO: 551762 - DNA, 956 bp, Homo sapiens
taaaaataaatgaaaatcaagtttgagaatattataataatttgactgtctttaaatactgtcaattttttaaaatagttaaatccaaatatagaatttaaaacatttactatattaaaagttacttgcgggaaaattgaatatataaataaaatattatgaaatatataaaaactatatataattaacataaacatacttttgaaaaaatatattttcttcataagcttcagtgacagcagtcatttttagtattgttattcagtgcatctgtaaaaagacaagttttcaattttgtctaaaaaacataaaagagtcaattctttaatcctaggcatcatctggatattcaaggagaaagaccacctcaattatagaaataatgrtaatgcttgctgagtgcactaggcaatggcctaaaaatcccatatattagttcatttattttccattacaacattatgaggtaggaggtattattagattggtgcaaaagtaattgcggtttttgccattacttttaacgacaaaaggtttttgctattacttttaacgatgaaaggtttttgccactacttttaatgccaaaaaccacagttactttttcatcaacctaatataaaaatccccatatcacagctaaagaaagaggaacgctaattggttaaggaacttaacctacggtaaaaaagctggtgaggagcagaattaaaatgtaaacacaagctatctggttctacagtgcactaagctatcctgcttctacaatgaattcaaaacaaaaaactatattataacatgaaacgtgttgatgtgaggatctttggaaaaaaattaggatgcaactctttttttttcttttttctttttctttttttttttttttttgagacggaatctcactctcttacccaggctggagtgcagtggcaagatctcggctcactgctacctcc

SEQ ID NO: 551763 - DNA, 956 bp, Homo sapiens
taaaaataaatgaaaatcaagtttgagaatattataataatttgactgtctttaaatactgtcaattttttaaaatagttaaatccaaatatagaatttaaaacatttactatattaaaagttacttgcgggaaaattgaatatataaataaaatattatgaaatatataaaaactatatataattaacataaacatacttttgaaaaaatatattttcttcataagcttcagtgacagcagtcatttttagtattgttattcagtgcatctgtaaaaagacaagttttcaattttgtctaaaaaacataaaagagtcaattctttaatcctaggcatcatctggatattcaaggagaaagaccacctcaattatagaaataatgataatgcttgctgagtgcactaggcaatggcctaaaaatcccatatattagttcatttattttccattacaacattatgaggtaggaggtattattagattggtgcaaaagtaattgcggtttttgccattacttttaacgacaaaaggtttttgctattacttttaacgatgaaaggtttttgccactacttttaatgccaaaaaccacagttactttttcatcaacctaatataaaaatccccatatcacagctaaagaaagaggaacgctaattggttaaggaacttaacctacggtaaaaaagctggtgaggagcagaattaaaatgtaaacacaagctatctggttctacagtgcactaagctatcctgcttctacaatgaattcaaaacaaaaaacyatattataacatgaaacgtgttgatgtgaggatctttggaaaaaaattaggatgcaactctttttttttcttttttctttttctttttttttttttttttgagacggaatctcactctcttacccaggctggagtgcagtggcaagatctcggctcactgctacctcc

SEQ ID NO: 551764 - DNA, 549 bp, Homo sapiens
ttttccatgaggaaaaaatggaacaatgaggagtcggtgcttgatctaatgttgcctgttgtttaacacaatcacagaaaggaagacaaaaaggcataactatttctttgatgtgggcctcttgctttaatttaaaactctgatattaagcaggttagctcttcccagctcagctcagctcttgaaatttcatggaagaaattctgtttttattggtctaaattttgtgtcttttatatagaaaaacggtaataaaattgcatcttatatttaaaaattgaatgycttctgttttgccattttactgaagagaaaatctgtgtagcctattggcattattaacagtgaagctccaagtactaatattcagaaaaaataatgaatcaaaatccaactatttctcagtaccattttcttttttataaactttctattttattgtctgtaatttaaaaacttctgtggaaaagagtttaaaattttcaaagttaatacaaaattatttttagaatttctttttgcataatgtttgtcgtaagtagctaatat

SEQ ID NO: 551765 - DNA, 517 bp, Homo sapiens
attggaggatggatagatatatggatgggtagatgtgtgggtggatgggtggatggaaggaaggaaggaaggcaggctggagggatggatggagaaatggatggatgaatggaaggatgtgtaggtggatgwtggatggatatatagatgaatggtttgctggagaatattcagcaattgcaatagctctgattaatgaacactctcttggaaacttgccaagtctgtgcagggagctgcctggctaagcaggaaaagaaggcacagggccatgattctgaagtggaattcaaggaacccagtatctccctcaaggagcctgctcttcagcttatggaagccctcctaagcttgagggggtaacattaacttttctcctttatggttgattttccttcagattcttacaggtgttcactggccttacgagtcatatatgagaggacaaacatggaagtgcttggcatcccgcctgtgggtggaaggatgggcacatgaacttttctaaatctctact

SEQ ID NO: 551766 - DNA, 517 bp, Homo sapiens
attggaggatggatagatatatggatgggtagatgtgtgggtggatgggtggatggaaggaaggaaggaaggcaggctggagggatggatggagaaatggatggatgaatggaaggatgtgtaggtggatgatggatggatatatagatgaatggtttgctggagaatattcagcaattgcaatagctctgattaatgaacactctcttggaaacttgccaagtctgtgcagggagctgcctggctaagcaggaaaagaaggcacagggccatgattctgaagtggaattcaaggaacccagtatctccctcaaggagcctgctcttcagcttatggaagccctcctaagcttgagggggtaacattaacttttctcctttatggttgattttccttcagattcttacaggtgttcactggccttacgagtcatatatgagaggacaaacatggaagtgcttgrcatcccgcctgtgggtggaaggatgggcacatgaacttttctaaatctctact

SEQ ID NO: 551767 - DNA, 517 bp, Homo sapiens
attggaggatggatagatatatggatgggtagatgtgtgggtggatgggtggatggaaggaaggaaggaaggcaggctggagggatggatggagaaatggatggatgaatggaaggatgtgtaggtggatgatggatggatatatagatgaatggtttgctggagaatattcagcaattgcaatagctctgattaatgaacactctcttggaaacttgccaagtctgtgcagggagctgcctggctaagcaggaaaagaaggcacagggccatgattctgaagtggaattcaaggaacccagtatctccctcaaggagcctgctcttcagcttatggaagccctcctaagcttgagggggtaacattaacttttctcctttatggttgattttccttcagattcttacaggtgttcactggccttacgagtcatatatgagaggacaaacatggaagtgcttggyatcccgcctgtgggtggaaggatgggcacatgaacttttctaaatctctact

SEQ ID NO: 551768 - DNA, 1397 bp, Homo sapiens
catccaacacagctttatcttacctgctgcccacaccctactcttgagagcacgtactcctggcaggaccccaacccaggaaaccctcccatgccccaggtgccgtcccctgaccaaccagcctcactctcagagacaaggatgaaacgcatatgaatatccactctaatacggttcagagaaggatgatctgttatctgaaacttttactgcaaaagctcttttaatcaaaaccttcagaaaatttgaattttactccttgcaaagattatttggttaaaaaaaaaggacactcacaacaattaacatatgactggggatgtgtaagaacagcraagagaactggacaggctgtgtcctgggaacagcgcccggtgcacacacccctttccatcttccctattggcaccttcagtccccggaggcgctgctgatgctcataggaagggactaaggccttcacagtctgtcaacaggagggtcccatggggctccatcacggtctctgggaccccccttccactgcagcaaagtggacaggtgcactgcatcaacatctcaacaccgggtgaaaagggaaacgccttactaaacgatgttcccgtgatcagaatcacgggctaacgtccctccgcttccgcagtcttcaggcctcaggcactgccagtgacattagctgctgtgcgtccctcctgccggactgcaacaccgtctcaggatccacctcccaccatcttccctgaccatggccctgctccatctgatttgtttgtcctctgatcaggtggggcctgagtccggcagtggatgccagtgagtcagccatggttggcagggactggctggctgcccccctctcttcattggccccgcctgtctggcctgggcgcccactcactcctgctgcacctgccacaactgccggctgatcctgctgctctgatgccccctcacgtctccagcctgcgccccgcactgcgttcgctgcccatcttcctcccaagctcacagtctagctccaggtgcctgctctccttgttctgtgtctgtttctgcacaccctgcggggaggccaggctcacccaagaaaagagtcaaggctgcaccatgaagcctctcgggctgggcagggagtccaggccctgggagccccccagagccccccacagaatgtgcagctagcctcgccagacgcgggcgatggggccgaaccccgcaggacaacttaggaggagtgaagagtggaagagtgcccggtgcagggatgggtgggaggaacctggggtagtgtgcacgcctgagacagggtgggggacacgaagggagacaggcgagggtgggacaggcaagggtgggtagtgtgcatccctgagacggggtgggggacacggggggag

SEQ ID NO: 551769 - DNA, 522 bp, Homo sapiens
gttcaaaacataaacataatggtattttatgtttatgtagagttttataaaacactgtatttctcaaggcactttcctacatcattagaaccctttacaaaatatacagtcatttttatgaagcaatgtgagatatacataagatactgaaactttttaaatgttaaaatgtctcgttttcttgaagttaatataatttattttctttaaagcagtcatgtttcctgtgaatagatttatagatgcatagaatggctggatttcttcatactttgttttgaaaatatatttattttatcacttgatgtgggataatcagtgttccaaagcttgcatggagaataacaaatgtctttaagagcaggagatgattttaggtacaaattaagacatcaaaagttctgcacctgaagaccacatctctagatatttgccttgttgattctaccagaaacacagttttaakgaatgaaataacccagaagtaggagtggtatggatagttaagatccatgtgacctg

SEQ ID NO: 551770 - DNA, 666 bp, Homo sapiens
cagaaagaattcctatagatcaattaaaaatgaaacaaaaacaataaaatataaaaatggcaaagcatataaacaatttagacactaagatatccaaatgctcaatgaatacatgaaatgctcactgttctaactagtaattggtgatacaaaaattttttaaaattcaagtttttcacaaacatgagaaaacgggaattctcagtattctcagtttggaaatacaaatcagcacaatccctttagaatataatttgccaatatctaggatattttaaaatgtgcttagcctaccacccagcaatttcctgcacaagtatttccctagagaaactttcttatgtatgcgcaagaaaacatatacaaaaaatgtttatagcagcagaagactaaaagcaatttaaaattagatgaataaattatgagatgttatataatactatacgacagtaaacatgaatgaattatagctacctatatcctctaggtccatcccaaaaaaactgatgttaagtgaaaaaaaacaaattaaatattaagtatgttacaacactgtctaggtaaagtttaaaaacgtgaaacattcaatagcatactttatatacaaatttawgataacactgtcaatagacaagttagaaaactagttttccagtttattactga

SEQ ID NO: 551771 - DNA, 2038 bp, Homo sapiens
agcctactatgattcccagaactttctcataatccaccaaacaatgggttaatgcctactcccagaacaacagccattacaattactcacagtgttaaacattttaaatatcacccctctttgatagattctatacagcaggatctaaatcaagttcatccaaccaatggcctgtgggccrcatgtggcccaggatagctatgaatggaacccaacacaaattcgtaaactttcttaaaacctgatgagactttttttgtgattttttaagaaatctcttcagctattgttagtgttagtgtattttatgtgtggcccaagacaattcttcttcttccaatgtggcccacagaagctaaaagatcggacaccccgactctagattattagaaataaacattcacatgaacaaagatcccttcatattctagcttaagcttcaaaaccaaaagttatttgcaattttagaggtttatcaaaatctctcctttaaataactatctagagttaaataatttgtgtttttctttttgaaaggcgttaccattctgaaagtagagtaaactactttcactgaactgatcttcagccagttttggtgttcattaaaaaaatttacagtgttatgcattcaaatatggtaactgagcctttaggttcccacggcaacttgatcatttcagtagaaaacttttcttttctttcttttttaacttataggtatgcctgttctctaacagtttcacttagcttatcatttcagttatttccaaccgagatatccacctttgggaattcacatattctgatacattcccaggtggctatttataaaaacacaagaaacatcatgctaacattaccaagtcctgagaaaactggtcttgcattatgtcattctaaggagaaacaccatctttctctccatatcacggacttttattttacatccctggagaaatttcatacacttggcaggtaactcacagaagctttattggtataccgcaaatacctaagtattggtggtccaaatgccccagtgccacatataaatagacaaacgagttttctttgtgatgagtttatcacccaatacttggttcctaaacttagatccaacttaattggttacatcaaagtcatctggggtctttgttaaaacagattcccaggcttctctccaataactgaattggaatattcaagaatggatgcaagaaatctgaatttttaagaagtactctgtaggatgttcatgcccagccagtctggaaaattcataacctattaattaataaatcattcacgaaactggcatgatggtttttaattaacaacttggttgactgacaaatgttacaatcaaatacaaatggaaaaaccagaatattgaccaaaagggttagcacaaaactgtcataaatatcttactgtcagcaatgcaacatactgatattttctattatgttttatttccttttaaaaatgtgttcattacaaaccacttcatttcatttcctatttaataaatctcatccacaattttaaacacaatgacctaaggacatttttcaaacatgcatggctgacccagcctacctgactctgtaggatccaggtgatgcctcggcgaataggtgtgcctgaaagataaacccaaaacagtgctgtcatcagaccacaggagatcaatctattgttgaaatattagatagtgagaaatcacaacaaaatgaatttggcaccatgttccaaatagagatttccctcttataaggaccagactaccagaatccatgcagcaacaaaatctcttctctatatagtggggaatagacactgactacttttatatttgggggtatctcaattctttgtttcccgtatttcatcttctaattgaatgcaataaaatcaattagattataacatctaagtaacttttcagttttactttctaaaattataagcatcttattgtaattggtgcttagagttttttccaatgttagattcaatcattagtaaataatct

SEQ ID NO: 551772 - DNA, 537 bp, Homo sapiens
aaagggccacatgcagcctctaaaagctggaataggcaagaatggattttcttctcgtgcctccagaaggaacgagtcatgccaacatcttgattttagacctgtaaatgtcttgacgacttctgttcttcagtactgaaagaaaataaatgtatgctgtttaagcagctgtgtttcagggaatttgctacagtagcaataggaacctaatacagaggtcatcactactgaaaccaccaatgaaaaaaagatagtaggktgcctgttcactctgatgatagtttcttttgctgtgctgaagctctttagtttaattagatccaatttgtcaatttgcaaactactgaatgggagaaaatttttgcaatctgtccatctgacaaatggctaatatccagaatctacaaagaacttaaacaaatttacaagaaaaaaacaaacaaccccatcaaaaagtgagcgaaggatatgaacagacacttctccaaagaaaacatttatgcagccaacaaatatatgaaaaaaagctcatcatca

SEQ ID NO: 551773 - DNA, 1114 bp, Homo sapiens
gatgcggcgtgtggggaagaagtgagagctgaggccaccatcacgttaacagctctaacgtggtcacacgcagccaggaaaagccatggaacgcggccataaaatgagtggctgcagcttttcaccttgccttgctcgtgggagcagaatrtgtgtcccagtccttgccttggcccagaggcaaatgggtggaagtggccgtgctctgagcttgcttcagcctgctgtctcctgcatctctgttctccggagcctctgccttgccctgtggaacaaagcactgttaactgcgtggcttaaaacagcaggagtgtgctccctcccagtcctggacacaagaagttcaaatcaaggcatctgcagggcctgctcactcactgacgggggcacccttctctgggtccctgccttctggcgtcagtcccgtctccgccttcgtccttacagagtgctctccttcccgagtgtcagtctctctcctcttctgaggacatcaatcgttttggaccagggcccaccctagtgacctcctaacttgatgacacctgcaaagatcgtatttccaaataaagtcaggttcacaggtacttgggggtagggctttgacatatccttttggggaacattctcgacccatcatggctgacccctggttcaagcaggtggggcggggggcgctgagggaactacccgcagctggaagcagagctgctctgtgaacctgcccagggcctgtgtacactcctgagtcttggggcaattccttatgcagtgtcccggaggggagggagggacagctgggaggaagaggagaggagggtgaaacccaggagggagcctgtctccagaggctgtgcgtgcgaggggcagaggctgagctaggggagtcactgaggggcctagagaagaggatgatgtaatggggtctgtatttaaaaataattctgctgacccccggttggcaggagacatggctggacctgaggcaggccctccgttctaccttcagtccgatggggacctggggcccagggcaccttttgtcccctgaccctcacagatggccccagacatgtgccccccatgcaggagagcaaacggtggggggtgtcgc

SEQ ID NO: 551774 - DNA, 1888 bp, Homo sapiens
ataaactggcattttttagttgacatatggtttttaaaaaaggttttactattaaaaaatggtatacgtattttaaaattgtatttctttcaggtgtatggactggtggctaaattaatgataacaacaataataatagaatggctaacatttattgagagtttactatgtgaccgaaactgttctgtttctttcttttattttcaatcctgctccttttgtacagatactgttctaagtgctgtatccatattaactcatttaatactcacaattctattaatgattcacattttgcagatatagaaactgaggcatcttgctccaccatggcttgatactagtgggaatatgcaaaagggaaattgagatcaacttaattaaaggtggtgatggagatgacattgtgcctgaagtcccccacaatggccttcactatgactgtgtgacagatagcactgctcccacttcaattggaaatctaaatgagaaaagccaacctacgaagtactgggtagtctctgatacatatttaaagtatgagttctattgcagaaatgcaaatgacttcaaccttggtgtccttttgtgaggaaacctttgacagtaagtgtggaaatgataacttttaataatttttaaaaaaattacttgtgcaaatgttgaaagaaaatcaccagaattgtttgcaactgaagaaagaaaagactgagctagaagtaatacaatgaagtcactaccacaaacaaacaaacaaaaaagtgcttaaaactccctccaacgtcagtgtcagaatatccttggagggttaagctcatttagtaggggaaaatttggtgaggccctgtttgaagagatgggtgaaagaatgcaggcaaaggcagccaggctgagaaagatgccattttggtcattgttaacaaatgacactttgtactgtgctcaaaagaatatttgatgagagactgaaattaaccaaattctttaccttattattgtagtatagcatgaattgaataatttgctcaatttttttctttttctctatattttcttttataaactggtaagacatttaaattggtctatttcttggtgataaaatagcttgtagaaaagttttcctataaacacaagagtctcattaaaaagcaggttatgtgccaaaaacgtgtatttatacacaagtgagaaactctttcagaggctaaacttcaggaggaatatctagcatcaggttctgtctttattaattcttcagtgcacaagggtatattcattagctgtttttataacacgtagctgtgatgtaattagtgtttccagaatgataactaattatattagtactatttcatattacattgcacattagtaagrttaatttggcaacagattcatggtttctcaaagttcaaactacctttaattttgatatatttattttggaaagataaattctgacattaaaacattataaatgttttatgaataacttgtacagtatatttttaaaaaatgcttatttgatactagagctggttggccttgctctagtctgtcatttatcatgatcactcaaaaaataaaataaataattgagggttggcatgttttttttaatttattagttgctgtggaagttactcttgggagtaatatttcatctttgaatcaagccataaataacagatgagactaatggaaactgtcttttaaatgataaggcatttatattctaattttataaaatttttcctataagaaatgtaaaacagtgcagtgctggaatgattaattatttttgatttagtgaataaaggcatggcaattaagaagaaaggcatcagtgcttaatatttatttctacccttcttcttcttctata

SEQ ID NO: 551775 - DNA, 1185 bp, Homo sapiens
gtttgacataatagaacattgatctatccaaatatcagccttaacaaagtcagaactatgactgcctataacctcaccccttagcatgttgacttgattccaacataattgagattgtcaaagaacatgacaatatatactttacttcaatgatagctggaaaacagatattcttttttttctcgttttttcttaattcttaactctcatggctgaaatatatagatgattctccgcaagcagaaacatggtacactccactatctgtgagaagacaagcaaagaagcacttgagacttaagttacaccactgactgttgtttctaggggcacttctcaaccagaattttcctactcataaaatggggctaccattgtggttttgctcaccaaggaaatacagagctgratggaaccaccactgtcatctggccctctgcccacaggcagccaaacatctgcgtggtagagagtagggctaggggacagtggcatttgaaggcacagattcaactctcagctgtgtggttttctaattgtgtaacctggagcaaataattaattgtgcaacctggagcaaataatttaaatttaataataatttaaaatctcgaaacctctttatttttcttctttttaaaaaaaaaatgtttagctctaaaatgagagtttgaataaagtaatttttaaagtccccttgctttctaagattttcatatattcagtgtgcatggttcttaaaatttttctgtaaggattgataaaataaggcttgtgcagcctttatgtctttaacaagctcaatgtgcaacctgattatctgtgacttcattgatataatcttccaatagaatattgcatttcctattgattgtttatctgtatattttggcatattgagtgacatcatttttacaactcatcaaatgggggtactctttactttgagctcccctcttcctaagtagtaggaatagtcaatgcattgtttatgaaaaatgacaagccaggaaaaaggagaggaaagaacaatgagtttccagctccactattaacttcttgctagacaagacagactgcagttacctcatctataaagaaaaaaatttaacaattcttacctacctcataagaatattgagagaattatatgagttaatatatatgtatatatgtgaagattag

SEQ ID NO: 551776 - DNA, 632 bp, Homo sapiens
tgggccataaaaagaaatgatgtactgatacatgctacaacatggatgagtcttgaaaacgttatgctaagggaaagaagtcagtcaccaaggattacatattatatggctctatttatatgaattgtccaaaactggcaaacccacagagatagaaggtagactggtagactagaaggtaccactcctagactggtattaggagtaggagagctgggggaaatggggagtgactgctaatgggtatagggtttcttctggggtgatggaaatgttctaaaattgagtgtggtgrtggtttacacaactctgcaaatatactaaaaaccactgaattaaatggagcattgtatggtatgtgaattatatcccaataacactgtttaaaaattaatgtttaaatccctggactcagtaatcctaagcattagtttgaaccatataaaactgcagatatcggatcatttttgacctatagaacagcaatttaatagttcaacctaacagctattctaagacacagtccaagacttatttgtaaagatgtcaatatttgtaattttgtaagaatgtgatttttgaaacaacctaaatgttaagaaataaaatgattaaataaactattgtataag

SEQ ID NO: 551777 - DNA, 1371 bp, Homo sapiens
aggtgatggttctcatcttcatttgtctcctctctccctgttttgtcattgcttagaccagtgaccacctgacatttgacccttcctcccgtgaactagcctgagggcagccctggtgcacaacaggctggaggtcagacaggctgggctgccctgttcccgggcacactctcctaccacctcttttgcttggtacccttagaggggataaacgttcagaatatcagagaaagccctttgaaaytttctgtgttcctggatacctgccatccggtatgttctaattatctctctttctgttcagggaaaggtgttgtttacttgccaatctgatttcaaaccaagtaacatcatcagagggatttgaaatgcccacagccacaaaagctgtcacagtgaatttctttctgaaccagtcaacccagagtgtgactccaaggaaaggtggaaattgcagctgggtgacagctaaatacaacacaaatgtgtcacagacctcataagctcagggagagtgacagaaacaggctgaaaattaatatgtcatacacacatcctggcttgtctgtttgtctgatttaaccacatttatgcttttatcagcactagataatctccagccactaaatggtctttttgggattttgaatgtctttaaaatgaacatttctgcagtttcccttacagataagaagagctggaaaatgctttgggatgtgatttgaaagatgctgaaatacacccctatcccaatcttattccttgccaccatgcctaacattcccccagtcaaaggcacttatttggaaagcaacatttgagttcagagggcatctgctaatatcagatacattaccccaaagaggcggcaggttgaacagttagcaaacaactctccctccatctatctttcccattcttcctccttcaatattataagtgaccaccatgtactacctcagacttcttttttttttctgagacggagtctcgctctgttgcccaggctggagtgcagtggcgcaatctcggctcactgcaagctccgcctcccgggttcacaccattctcctgcctcagcctccctagtagctgggactacaggcacccaccaccatgcctggctaattttctgtatttttagtacagacaggatttcattgtgttagccacgatggtctcgatctcctgacctcgtgatccacccgcctcggcctcccaaagtgctgggtttacaggcgtgagccaccgtgcccggcctacctcagacttcttaaccaggggctccagactggggctgcagtgcttccatgatgtggcctgtcatttagtgtgtgtgttatatgcatatatgcctctagaggggcatcc

SEQ ID NO: 551778 - DNA, 613 bp, Homo sapiens
aagtgatatttgggatgrgtgcaatgtcagaggcaagaagtgcatttgagggtgcttatgcgggaggaattcaaactctgagaacttggctttgctgagttagatcagaaagacagcggatctgatttctctttgggcagaggtttgtttattctgtattcagagccaacagccgtgttagttttgaactcacttaaatattttccacatttgggcagagtcactcatttccaagagaagggcacagtaacatattgttatgactctctgaggacaggggactgtgtgcattcatccttcacccctaccctgtatctgccacactgctcaatagaagtttattgacttacattgtaaaacggttgttgaatatatgagtcatgatataaatttttatataccataacttaacattttcagatgggtgttgcagccgctttgggagcctctgtcttaattgagtaatggggccattgctccagaggttgcaggaacctcattgaaattgctctatggccattagatatgagccacagtagattgtcccacgtcaactctgtggccacacttcacatgtatgcactgtgtgtatgtatatatgtgagtgtaggta

SEQ ID NO: 551779 - DNA, 613 bp, Homo sapiens
aagtgatatttgggatgggtgcaatgtcagaggcaagaagtgcatttgagggtgcttatgcgggaggaattcaaactctgagaacttggctttgctgagttagatcagaaagacagcggatctgatttctctttgggcagaggtttgtttattctgtattcagagccaacagccgtgttagttttgaactcacttaaatattttccacatttgggcagagtcactcatttccaagagaagggcacagtaacatattgttatgactctctgaggacaggggactgtgtgcattcatccttcacccctaccctgtatctgccacactgctcaatagaagtttattgacttacattgtaaaacggttgttgaatatatgagtcatgatataaatttttatataccataacttaacattttcagatgggtgttgcagccgctttgggagcctctgtcttaattgagtaatggggccattgctccagaggttgcaggaacctcattgaaattgctctatggccattagatatgarccacagtagattgtcccacgtcaactctgtggccacacttcacatgtatgcactgtgtgtatgtatatatgtgagtgtaggta

SEQ ID NO: 551780 - DNA, 1342 bp, Homo sapiens
ggcaagggttagattacataagtagatgcatacatcaaatgggagccaacataaacattttattgtatgtaaattttatttcaaaagaaaaaactgtaaataaagacttaacactagctagtaatatacatgctaggctatcaagggagaactgtacttatgtctgaaaattaccttgaaattcatttaaaaaatttaaatggattgatgtgaggatagaaaaacaactaaatggatagatatgtgataaaacaaatgcagccaaatattaacagtagaatctaagtgataggtatagatggtcatttcaaagttctttaaaatttgctgtttgaatattttcataaaaacatattgaaaacattaaacatacctctacactgacaaagttattctatttctaggtagttacctaagagaaatgaaaacatttatgcacagagcatgctgtaaaagaatatttaaagcagccaataactggaaaaagcccaggtactcatatgaaggtaaatggataaacaaattatgttaatatttatacaatggaataacattgagcaatagaaatgaacaatctactcatatatgcaacatttgcataaatctcaaaaatattatattgggtgaacaaaatatagcacaaattaatacatattgaatgattttcacacacatgaagtagtacaacagtcaaaattaagtttcagtaatacaagtcagtgtagcagtcacctaagggattggggatctttgcttggtgatggaagaattctatactttgcatggaaacttgggttatgtgggtacataaatttatcaaaactgatgtcactgtatacttaagatctgtgcatttaagcatatttaaattttacctaaatttaaaaaaaacaagaaggaatgtgtatatgtgtctatamctggaatttcaaaggttcaagaagctctaagatatatattaagagcccattaggaccatatttatcaaactgtaatgtgcacataaataatttggtgattttgttatgcagattctgattcatccattggggatgtggtcattttgcatttttaataagcttccaggtcctagtaataatactactgatgcacagactgcactttgattatagcaagggttggagatggagatgttaaagccaaagaaaaacaataatggggcaaattgctgtctgcaaatattaaaagcactctcatgtgaaagagagttctagttcctctctcttactttaatacatagaagagaatatatggtaaactatttattaagaagtaaatatttgatcaatgtaaatatataacattaaacaattggatactc

SEQ ID NO: 551781 - DNA, 1095 bp, Homo sapiens
tactagcatggctctgagactattatttctcttaaataatcagaattttgaccttttaatttcaatgcagactatctgagagagtaagctgtacttttccaaagggcctagcaaagcagttttgaaggtctggcagaaaaagacggtgaacttgaagggagaaacagatcagaaatgtcaataccaaaagaaatagtgaagcaagcagaaagtaaagttgagccctggggcctttctgttttccatctgtggccccctcccttttgaaatatctaattctttgaagctgctcaggattcctcaatgggtctcatccagatacgctcagcagaataacatatagagctttaaaaattaaataaaagttcctgagacttcatgttcccaaaatgtgttctaggtacccctggaggccctgagatactgtcagagggctacaaggccaaaattctttgcataataatactaaggtgttatctgtcttttttacacttttttcccttaagtgtgaagtagagttttccagaggttatataatgtttgacattataacagatgaaaatgcaaaagctggtaagataatctatcttctcttgtcagacattaaagagatttgaaaaatgttaaggattgccactcttgtcacatctatttttctttaaaatgtagttattgtccgtaaaagtttaagacaacatataacgtttattacatcataaatggattaataaatacatatccttaacatttctcagatttattttggaatatggtaaatattaatagatacaatccacataatcaatagaactctggacctttaataatttttgaagagtgtcaaaatggtcttaaacatttcataactctcctaatgaaaaaactgagatgtttcgtaaaaggtaaactacagttttagatgaaatacaagctaacatagtaataggtgatttgyagggctcagaaacaaagtagaatccaggattcccataggcaaccaagtaccaaagccagttgtgctttgaagatacctgcttaggcctagaaatcttgggcttctgctctgaaggatacacaagggctaaagccagggac

SEQ ID NO: 551782 - DNA, 983 bp, Homo sapiens
ttgtgtgtctagcttgttttacttagcattctgtcctgcaggttcacccacgttgtcacaatggcaagatttccttcttttttaaggttaaatagtgttccattgaaaatgccattgtaaaattccaattccacattttctttatccattcacctatgggcagacacttaggttgtttccatgcctttcttgtaaactacctgcatccaagcacttttctctatttgtggggagcccagactaagacactgagcttacatttttctcgacagaattagcagtctttacccctttgggattaaaccatttattcctcagccacttctcatagaaagcatgaaaatatcaaattgtgatttgaaataaataagtagaatttaagtatttattcaatgaaatcttctttatttttgttttgcaaactcataagaaaaagagattttattggataaaaaaaatacaggacctctgaatggtagaccaatacaagattgtcacttgtaaaatgagaaatatgttcatgagtcacacatacccccttgtatgatgctattgcaatacagcaactacaaaacaccaagtaatgtcaatcttgagcctctgtctcaaggctgcttttcattgtttgggctactcctgtttgtgtctacgttttcttygtccctctcatttcaacaatccagactgtctatttttcatattctgtttcttttctttctgtttttcttttaataaaatatttcttttgacattgaatagctatcattttgcgccttctcctcattcagcttataaataattgtgttatctgaggattttgtaattcagattccctttctctagagggttcttgaaatactggtgctccccgttttttaaggttggtacagtgattttcaggaaaatctgacttgaagggactttttcaaatccaagatttcagatggtatctaaagattccctgagcatgttcttcatttctc

SEQ ID NO: 551783 - DNA, 189 bp, Homo sapiens
tcgtttattttattattgcctatcattgccagatctagttctatcaaactgatattcacttatatttttatgagtcacttctttgtatttattatggctaatcttggcttaaataattcggtggtttatgcaattctttttaactaccatgatgaatgtagtacagtattttsaggaccccctgaaaag

SEQ ID NO: 551784 - DNA, 1000 bp, Homo sapiens
gctgatcctaaagtggtttacagaaccccaggaggaattatttagggaggactcaactaaattaagatcatgatataatctcagatccccctaaaaattcattaatgtaaaggtatttggtatctccagataattctcttcactgtacttttcactaagcatgaccttctcccgtccttcaggcctcttctccttcttctatgttccaaacatccaaccctgcattgcaacccattactggatatcttccctgtatgaaggataataaagagttaatcaaagattccttaaaatgagaagtcaaacttccaccagctacatggccaagcacaatctccacaatcacagtgatacccagcagggtggcagccttgcaagatctttggttcatgggaagagggcctcctttctatgtttcatgttccaaaaagatggacctccatcagagttagactcctggtcccggcctctctctgcctacctgcactttctctaggagggaagtaaatttttgatttggaactgcactgtatgtggcttagccccttttaggatcttcttggcatctgactgcctggaaggaacatgcattttgatctgctgtctggtcatgaataggtatattggagtaggccctgmccctatataggcacaagattaggcctgtgattttccagttttgtccttgactgggtaggtaagatgactccttgggaatatattaataaggccatttttgccacacacataagctacttatttcaatctaagatacttgtgtggcatgtaatttataaaagatcagtatcctctattaagagattgctataactttaactgataaatcttaaaatctccgtagcataacatgatagcaactaatttcttgctcatgcaaattccagtctctgcttgggaaggcttcccttaactcagtaatactccaggttgcagaaggctctgctatcttttatacttggcttccaagatctccctaatc

SEQ ID NO: 551785 - DNA, 600 bp, Homo sapiens
ggcagttataaggattcaaggtgaaaccatgtttgaaagcagctatacattcaataatagaaattcaatacatggaacgatgattttttttaaatattattttgagactttaaaataagctgttactcttcctctttacatttcaggagcaactgttaaagctacttgtagacctttactgaaaaagaggtaaatacctggtagratacatttcccagagcagtcaattatttcttcaaaagtttctccagaaaactgtctttgaataacatcagcaggaccaatagcttttataaatccatctctgaagaaaaatcaagaaatagttattaaatttggggaaatcttgtgagaaatctgatgagtgacttaaaatatgttttcagattctttggtgttaattagtcaacatttactgtgcttctatcttgaacctgagtctggaaaagcgtctctagccacattcgaggcaaccataaaagacccagattagccaaagcctcctcagcaaaatgaacaaaactggaggaatcacattacctgacttcaaattatactacagaactatagtaaccaaaagagcatggtactggcataaaa

SEQ ID NO: 551786 - DNA, 511 bp, Homo sapiens
cattactgactgaagaagcaaacctggatgattcagagtatataaatgtaatacatatgataactarcagaaagatttggagagaggctataaatgcacctatgtagttgaaaagttacgtattttgcaatgtgtcttgatagaatgatgttgactacaattcaatggctaaaacaaaattatcaaagtcaaaattgcatgtcttttcttgaatgataggtatgtatccagtatttcatttacccacagcatatgctgtagacccctctttcaaattaaagataacaaaagcccaattgaatggaaaaacaaaataaatcaatgctaactaaatacaaataattagccttcactaattcatccattcattcttttattaaacagttgggcactgttctagatgctagggatataacaattaaacaaaaccaacaaaaaccccatgcctgtatcttggagaagtagggtgtgcagtatcatgggagaagacataacaaaacaaaagaaaaat

SEQ ID NO: 551787 - DNA, 686 bp, Homo sapiens
taatcagatgaacaagtgattagcctttttatccagtaaacaaagcatacatattattttcaaattccagagacaaatattttaaatattgaagtttaagacctaaaaatgtgtcactgacttcatggaagtagataytcactaggtgatattttctaggctctctgaaattacatcagaaaaatgtgaatataacccataaataatatctggccacatacaaagtaattgaagatcaatttaaatagctattggattaagaaatagagactgaggtaaatttacagggtcagggaggatctaaggaggaagcattggcactggagcccaaggacctgggattacagaacagattctaccagtgctaacttactgctccagagaaaacatcaattctgctcatgtgcaggtactattcatcaagaaagggattacaacttcagaaatgttttcaaaatgtatccatactttgacgtattcatgaagtaatcacattctacacacaactactccatatggaatattggggagggggtgtcccaaataaagagactgaggatttctcatgagaactcagtgtctgctagaaaatatctaagtaaaatattttacttatgtggaaagtgtggatgtttgtgcatcaaaagtttcaagaatccctaaaatgtacaatggagatgaggaga

SEQ ID NO: 551788 - DNA, 543 bp, Homo sapiens
tgggactacaggagcgcgactacacctagttaatttttgttttttaatagagatagagtttctctgtattgcccagactggcttcgaatatcttagctcgagggattttcttggatccacctctgcctccgcctcttaaagtgctgagattatagtcatgagccactacacccacccaagattattattttcttaatttcctttttggagagtktgttgtgtatatatatatatatatatatatatatatatatatatatatatatatatatatatatgcatatgaatcaagaagaaatagaaagcatgaatctagcagtaaaaggaattagtaatctaaattttcttttttacatttattttattattttttattttatttttatttatttcttctaataaaaaaatgggatacatgtgcagagaatgcaggtttgttgcataggtatatgtgtggcatggtggtttgctgacctattgacccgtcctctaagtttcttcccctcacccgctgacccccaaacaggccctggtgtgtgttat

SEQ ID NO: 551789 - DNA, 611 bp, Homo sapiens
cacttgttaaaggtgaggggtggctggaccaggtggtcgccgagattgagggacttgtgcctggcactgtctgtgcctgagcctggtggccgtggtgacagggggcttggaggggctccccgcgagcagtcttctctgaagttaatgagccccaaaggaggggtctggcttggagtgaatgcccccactcgcccatgccatagggctttgccagccctggctcctgcactctgggagagccgctgctttgtcctgggcctgactgtgcccgggctttcctggggtgccttcatgccgtgagctggtgggcagacagagatgctttctcctgtctgaacgtggctttctgaggcccaagtcatggagtctgatttgtccgtggaaaatggcatttactgtagtgaactgtgttctgttcctgctctccaccaaaacggtacatrcaaaactcgtctactgaagagaaactaggtttcagtgttgggttgggtcctgattggcttctggggttaaggcttacaggcactgggggaggagaagaagaagaatcttggttatgctttgtgtaaggtagaatgattctatctccctgattaccttgcctgcagaaa

SEQ ID NO: 551790 - DNA, 2005 bp, Homo sapiens
  misc_feature 1245, 1246, 1247, 1248, 1249, 1250, 1251, 1252, 1253, 1254,1255, 1256, 1257, 1258, 1259, 1260, 1261, 1262, 1263, 1264,1265, 1266, 1267, 1268, 1269, 1270, 1271, 1272, 1273, 1274,1275, 1276, 1277, 1278, 1279, 1280, 1281, 1282, 1283: n = A,T,C or G
  misc_feature 1284, 1285, 1286, 1287, 1288, 1289, 1290, 1291, 1292, 1293,1294, 1295, 1296, 1297, 1298, 1299, 1300, 1301, 1302, 1303,1304, 1305, 1306, 1307, 1308, 1309, 1310, 1311, 1312, 1313,1314, 1315, 1316, 1317, 1318, 1319, 1320, 1321, 1322: n = A,T,C or G
  misc_feature 1323, 1324, 1325, 1326, 1327, 1328, 1329, 1330, 1331, 1332,1333, 1334, 1335, 1336, 1337, 1338, 1339, 1340, 1341, 1342,1343, 1344: n = A,T,C or G
caacagaatatacatcagaagctgtttctgaattatgtattcccatgtattttgaaaagcttttttacaaaaaatctgaaaaagaattatgtataaaagattatttcctttactgagagtatctcaactataggcataaacatagattagttgagatatgattttcttcttggcttttttcttgctttgtcttaaaatgaaaccagtcctcttataactttttccaaagcacaactttatagcttactcgttgcacctatttgaagtcttacaatttattccatgttgtaatataatcttggtatrttgtttttaatgattacacattaacatattttaaccaagcataatatgcattatattccgtcgtttaatcaatttttctatttaaatggcccatgaacataattacaatattttaatattatggcctaaattgttttactatttttacattgtaattctacattgcaatttgggatgcatgtctttgtctaacgtagataagtagattcacattttgcagggtttacattttgggagtcctttttaataaaatgaattcaaaatcaaaagtacaaagttagttaaggtgaatactaacttaggatgaaaaggcaatcagcacaaattacatttttatatcagacagataccataaacctcacaaatctagaatatgatgtaattataattttacacatctgttgtaagtggctctgtatatttcaaaacttgttcattctcaacttcttaaatgtgggctgagcattataggatgcatacaattttattatttgatctctcgtcttaaattgtcatgacccaagagggctacagcagtatttctagaaggcatttctataccctgaaaagccacagaagtgatggtaccccactaatagcaaaatgaatgtgtcctcaacccaccttctctttggctgaatctcagaagtacctggagtctttccagagccactggacatgagaggaaatgtggatgagtcaaagttagaatagaaggagagtcagtcatcttacttcactcaaaatttcttattttggaaaaatttaaaacacgtatgtcatctattgtcatggtccttctcagtgccagagactcccaccagtgaggaaatctaaagaatagttgctgttagttccatggtaaatgtgcctgtctctttgatgattgatactgaacaactgcacctggggctgtacccaaagtggagaacagtgagnnnnnnnnnnnnnnnnnnnnnnnnnnnnnnnnnnnnnnnnnnnnnnnnnnnnnnnnnnnnnnnnnnnnnnnnnnnnnnnnnnnnnnnnnnnnnnnnnnnntctgtttgaataaatagctttgtacaagtgtatgtctccatcccaggcatccttccactccctgggtgtgtatggaattagaaacatgtaccacttcatcagctttcaaacacattttttaaaatctggaagtgtatagcctggggcctcagtgtttctatttctgtttatttgtcatacagagtgttgcttctcacctgaaccccttgcagacattccagcaaaatgaaaacatgaccttgagccttagtttcacagtccatgaaaagctcaacttttattatagaaattcagggttagagcccttcttttttttctcccacttaaaaagggataaagaaactaacccacccagattgctgctaagcctaacatgagctttgcatagccattgaaaaaggttcccacactctagaatttttattccaccttttaaaatgctcttgtccatctcttctgaagactttggagacaggagatttttcagtcttaatgcattgaaatgaagataatacaaaaagaaagctttttcaaaatttttagtctcaaaaagtcttctcttgggaaaaggcagacctttatcttagtcaaaagggaatgagactgttggcaatgacaaattaaagtttgaggggataattgaaataaggaaatggaaaag

SEQ ID NO: 551791 - DNA, 1385 bp, Homo sapiens
ggctccaaaaacatgtaaataggcagcaagacaatacatgcttttggcaagtgctattatgaactatgaccacacagtaagaratgaatatgggtggtagagaaggcttctttttttttgagacagagtctcactctgtcgccaggctggagtgcagtggcacaatctcggctcactgcaacctctgcctcctgggtttaagtgattctcctgcctcagactcccgagtagctgggactacaggtgcgcaccaccatgcccagctactttttttgttttttgtttttttttttttgtatttttagtagagacagggtttcaccatgttggccaggatggtctcgatctcttgacttcgtgatctgcccacctccgcctcctaaagtgctgggattacaggcatgagccactgtgcctggcctgagaaggcttcttagatgacttatgtgttgagaaataaatgacaagacagtgaacaaaatttggggggaattctttacaagcggaagtaacaacaaataaaaaatgccaagtttgccgatttcaggaacgaaaaggatcactgtgttcagatgatcataactgaggccgaggaacagagaaagatgagttcagatcttgttctgaaaacagaccatgcagggccctgaagtccaagtttggattttattccaaattaatgaaggcccttggaagatttttagaaggggaaggtgacatacttttctttcctttgagagatcactgtggctgctatgtggtggatgcctccagggacccgaaggtggggacaaaggccaactaagaaacacaacaggagttcaggtagaagatgatggtggcttagactgggagcggtggaaatggtatcataatttccatttgacatccattttaccaaaggtttgagatttggaatatgagtgaaagggaggaatcaaggtcatttttggtctgagttactgtctgaagagtcatgccattaacagagaaacagaaggcattgaggagctgactcgatggtggcatgggcaaatcagtggttctccttcggtcatgttacatttgaggtgcttatgatataaagtgagaagttcaatacacacgtctgaaagtaaaaagagaagtctgtgttagacatgtagatgtcatgtcttcagaatgcagatcggtgtaaagctctgggcctggatgcaaccacccagggagaaagtctacttatgggaaaggctggggacaaagcaacatttccaggtctgggaggagagacctggaaaccaagaagaaagggtcaaagcagtgctgaggaacaggcagatttcagttagagcaaaaagataaaagcaatgttcagagaagaaggtgtatgggtatagatgaccttg

SEQ ID NO: 551792 - DNA, 1385 bp, Homo sapiens
ggctccaaaaacatgtaaataggcagcaagacaatacatgcttttggcaagtgctattatgaactatgaccacacagtaagagatgaatatgggtggtagagaaggcttctttttttttgagacagagtctcactctgtcgccaggctggagtgcagtggcacaatctcggctcactgcaacctctgcctcctgggtttaagtgattctcctgyctcagactcccgagtagctgggactacaggtgcgcaccaccatgcccagctactttttttgttttttgtttttttttttttgtatttttagtagagacagggtttcaccatgttggccaggatggtctcgatctcttgacttcgtgatctgcccacctccgcctcctaaagtgctgggattacaggcatgagccactgtgcctggcctgagaaggcttcttagatgacttatgtgttgagaaataaatgacaagacagtgaacaaaatttggggggaattctttacaagcggaagtaacaacaaataaaaaatgccaagtttgccgatttcaggaacgaaaaggatcactgtgttcagatgatcataactgaggccgaggaacagagaaagatgagttcagatcttgttctgaaaacagaccatgcagggccctgaagtccaagtttggattttattccaaattaatgaaggcccttggaagatttttagaaggggaaggtgacatacttttctttcctttgagagatcactgtggctgctatgtggtggatgcctccagggacccgaaggtggggacaaaggccaactaagaaacacaacaggagttcaggtagaagatgatggtggcttagactgggagcggtggaaatggtatcataatttccatttgacatccattttaccaaaggtttgagatttggaatatgagtgaaagggaggaatcaaggtcatttttggtctgagttactgtctgaagagtcatgccattaacagagaaacagaaggcattgaggagctgactcgatggtggcatgggcaaatcagtggttctccttcggtcatgttacatttgaggtgcttatgatataaagtgagaagttcaatacacacgtctgaaagtaaaaagagaagtctgtgttagacatgtagatgtcatgtcttcagaatgcagatcggtgtaaagctctgggcctggatgcaaccacccagggagaaagtctacttatgggaaaggctggggacaaagcaacatttccaggtctgggaggagagacctggaaaccaagaagaaagggtcaaagcagtgctgaggaacaggcagatttcagttagagcaaaaagataaaagcaatgttcagagaagaaggtgtatgggtatagatgaccttg

SEQ ID NO: 551793 - DNA, 1385 bp, Homo sapiens
ggctccaaaaacatgtaaataggcagcaagacaatacatgcttttggcaagtgctattatgaactatgaccacacagtaagagatgaatatgggtggtagagaaggcttctttttttttgagacagagtctcactctgtcgccaggctggagtgcagtggcacaatctcggctcactgcaacctctgcctcctgggtttaagtgattctcctgcctcagactcccgagtagctgggactacaggtgcgcaccaccatgcccagctactttttttgttttttgtttttttttttttgkatttttagtagagacagggtttcaccatgttggccaggatggtctcgatctcttgacttcgtgatctgcccacctccgcctcctaaagtgctgggattacaggcatgagccactgtgcctggcctgagaaggcttcttagatgacttatgtgttgagaaataaatgacaagacagtgaacaaaatttggggggaattctttacaagcggaagtaacaacaaataaaaaatgccaagtttgccgatttcaggaacgaaaaggatcactgtgttcagatgatcataactgaggccgaggaacagagaaagatgagttcagatcttgttctgaaaacagaccatgcagggccctgaagtccaagtttggattttattccaaattaatgaaggcccttggaagatttttagaaggggaaggtgacatacttttctttcctttgagagatcactgtggctgctatgtggtggatgcctccagggacccgaaggtggggacaaaggccaactaagaaacacaacaggagttcaggtagaagatgatggtggcttagactgggagcggtggaaatggtatcataatttccatttgacatccattttaccaaaggtttgagatttggaatatgagtgaaagggaggaatcaaggtcatttttggtctgagttactgtctgaagagtcatgccattaacagagaaacagaaggcattgaggagctgactcgatggtggcatgggcaaatcagtggttctccttcggtcatgttacatttgaggtgcttatgatataaagtgagaagttcaatacacacgtctgaaagtaaaaagagaagtctgtgttagacatgtagatgtcatgtcttcagaatgcagatcggtgtaaagctctgggcctggatgcaaccacccagggagaaagtctacttatgggaaaggctggggacaaagcaacatttccaggtctgggaggagagacctggaaaccaagaagaaagggtcaaagcagtgctgaggaacaggcagatttcagttagagcaaaaagataaaagcaatgttcagagaagaaggtgtatgggtatagatgaccttg

SEQ ID NO: 551794 - DNA, 1035 bp, Homo sapiens
ttgccttaggcactaggggtaaattggtaaacaagacaaaatttcttccctcaaggatctgacagtttgataaaccagaaaataaagataagtactcagcaatttcacacacacacacacacgtatatacatatacatacacacacacatacatatatacccccaaagaattgtaagtaggtattcaattacatgtccatatacrtgagtagcagcattcctcacaataataatgttgtgaaaagaaccccatttccatcaacagaggagaagataaacaaatcgtggtgtatccataccacagaacactatttagccctagaaaagaaagaagtactggtatggatgaaccttgaaaacatgatgctaacattgaaggaaggcagacacaaaaggccacatcttgtacaattcaatttatatgaaatatttattaggttggtgcaaaagtaattgtggggttttgccattatattgaaagttatttgaaagtaatgacaaaaaccgcagttacttttgcaccaaccaaaaagaataggtaaatccaaagagacaaaaagtaggttggtcgttactgggagcagaaaggagagaggagtagggagcgagtggggtttccctttggggtgatgaaaatattttggaactagataagagaggtggttgcacaacattgtgagttcactgaatgccactgaattattcactttaaaatgggtaattgtatgttatgtaaacttcacctcaatgaaaaacagataatgtggtaattgataggatggtggccagtagaaggttctggggcaggaaggatccagttggtaaacagtgaatgctaatgcaagagttaggtcacagaaaagatgaaggggtagtgtttcaagcaaaagaagaaatgcttctgtagatgtgggaggcaggggagccctctcgctgctgtttattttgtgacatggtgatgcacatcttgtatattaaggtgacttctgaagagtaatatagaagcagaaaggtgggatcaccttcagaatgtgc

SEQ ID NO: 551795 - DNA, 687 bp, Homo sapiens
gaaccttaatttaatcctaggtagcccaattccagtagccattataggactgccctgcmgggacagttacttaactcaggaaaagcaacctagctccaagtttagcaaccgggagttccagttgattccattagcgcaccccctgaggcattcccaagctggagtctggtggaagatgaggctcagtgtgattggactgaagcaccaacctatcaaggagaagtcccacccagtctgccctgtgcctatataaaggcgacaagtggcggccgcagcactcattgaagccgccagttgggagaggagcagagccaggccggtgctcccgaaggcagcaagatgttgcgagccacagctccctgctggttcccccctggatacccagaagctaagaaggtggccgaggaggcggccctggaggcaagccgccatttgggaggggagcagagccaggccggtgctcccgaaggcagcaagatgttgcgagccacagctccctgctggttccgccctggatacccagaagctaagaaggtggccaaggaggcggccccggaggcaagccgccatttgggagcggagcagagcccggccggtgctcccgaaggcagcaagatgttgcgagccacagctccctgctggttcccacctggatacccagaagctaagaaggtggccgaggaggcg

SEQ ID NO: 551796 - DNA, 540 bp, Homo sapiens
tataaactctggtaacatcaaccattctcagctccagaatttccctaaattaaaagccttctttggccctagaagcactaccaatcctacctccacactgtgtcaccactaccatgcactggagataaatgtaaacagagtattcattccaaatggtcttcccttggtttaatactgactgtctgtatcataatttaaaatctgtatcacagcctaccaaaataatgacatggtctttgctacaacttctgagaaagtcatactactgctgtcagaatctttcagaacactaaagcttcaggtgctaaaacagcatayaggctaagcttttcaagttatactattagcttctgtttaaatgtttgcataaaatttcaacaaaaggaacacaaaaataatgcttcaagatttcaaagacatcactagtgtttatcaccttatagacgaaaagcaaggaagctgactagataaatatcaaggcacttcccccctctctgcctctaagcttctgaacaaaatttttgctctactttaaaaatg

SEQ ID NO: 551797 - DNA, 503 bp, Homo sapiens
ggccctactctgcattgtcatcacctttactcccattatatgaaacactcacagcttcagtggtggaggaaatgaggaacrtactacaggatatgctagatcttatttatctggctaaagaaagttacgtgagctcgcttgagttcaactggtagaaaagcatcattctcttgcagggaggacactagatattggtaaattctattacaccaccctaggcatcccagccttggggagaaactggagagaaggcattcagtagtttagtcaatgattatataaaagaatgacaaaggatcagatatgagccaggaaagaaaatttcaccaattctgtcttggggctttcacaccaggtagagtggctattttaagtttcttttataaaatattattttctttcaaatattgtaaatatacttttttcaacggttatgccatctggtggtacttaatgagattaggatataacatataggccagagaaaaaataacaattattaa

SEQ ID NO: 551798 - DNA, 503 bp, Homo sapiens
ggccctactctgcattgtcatcacctttactcccattatatgaaacactcacagcttcagtggtggaggaaatgaggaacatactacaggatatgctagatcttatttatctggctaaagaaagttacgtgagctcgcttgagttcaactggtagaaaagcatcattctcttgcagggaggacactagatattggtaaattctattacaccaccctaggcatcccagccttggggagaaactggagagaaggcattcagtagtttagtcaatgattatataaaagaatgacaaaggatcagatatgagccaggaaagaaaatttcaccaattctgtcttggggctttcacaccaggtagagtggctattttaagtttcttttataaaatattattttctttcaaatattgtaaatatacttttttcaayggttatgccatctggtggtacttaatgagattaggatataacatataggccagagaaaaaataacaattattaa

SEQ ID NO: 551799 - DNA, 983 bp, Homo sapiens
gcagcaaaaatataaatgaagtcaaaagactgaatttaaaaaaaaattagcaattayagaatattatttccaggactttgcattttaatttgaaaactgcaactgtttcctgggatttagaagtagtgatttgggtttaaagtctccctttaaaggaagaaaggaaaactgcctacagttagtgaattcttaagttttatacttagctctgggggtaaaaaagaggttctcaggaactaaggctcaaaactgcctatgaaaaggaactggtagctgttcctttatggatcctggaggcagctgggaaagcctgttcctagtgatccattcatactttccactggcaggttaggactttggctgcggagcaccaggcaaggggaaaatctgactgagtgtggcagtagtgatatgctgctggttttctgtccattttgtacatgactgtttatctttagaaataatatattgcagactgctataaacacataatttgaactggaaatatgtttaagaaaaggaagtgttttgaactagaggaattttataaacattcttagatgtctgtaaattaaaagaaactgtcaagtcatttgggcccatgcattatctctcggtgtattatgaaaggcaggctctggaaagtttgcattagaagggtaactaaaatcgaaatcatgtaactttgcagttctttagaaaatatagtttggctgttttatgagtgaaacaaattgcttttgctagggaattttataaaaacaagggctctttctctcttagttgggtattagcagaaggaggatgtcatttaagaaggaaagatcttgaaagatcaggcttgcagaaaatggatgtctgagaagcaatttgagcatgcccttcagcttctgcttttaggacctgatatgtctagttttgatggtaaccacccttcgaggggtagcctaccctgtgtaatatgatcacttaaatggcgcctt

SEQ ID NO: 551800 - DNA, 612 bp, Homo sapiens
tgactgttagatgtgaagaagaaagcatctggacaagaacttgagagtaaagaagaaattgccgaaaacaaaagagtttgtaaattcagtaaaactctacacaaaagcagttgccttctcagtgagttgaggttaacacaaacatgaaagaattgtctcttgtcaactttatttggagaacccagccatccatgtgtgatttaatacttttaaaagtccagatgatgcaggagatacgtggagacatgggccagagcattcagttagctttcaaatttatttcctcacacatggacaaccattcagttcaaatgaaagcatagaagcacaacacatctacagatgtgtccaataaatgtttgctttggtttcagaggttttttttttcttgtttctcaactgatttaaaactggcatgctttaaaagaagtactcagttgtcttaaatttatagcagcagatcagataytatatcatccaacattagatacacataggacagtaccacacctgaatcaaaattcttaaatggcagacgcactaggaaatggtaaaataaactacatgtaaaggtattcttgaagagagctctccaaataaaaaggatgggaa

SEQ ID NO: 551801 - DNA, 564 bp, Homo sapiens
aaaaattgtgcttatagaaggtacaattactttactttcrctcactgaggtctttatattgaacctgcatatattatgttttaatatttttactcctaacacttaagagtaccgtataattttgaattaaattaataaatatccttctttcaggtagagagaatttcacctataagagcatggataaataacaaaacatggtcactgggttttggcactaatcactctgttttaaaaacactagcttcttggcttaacacattgtattacagcttattttgtgtctgtttctgctactgttctcttaatccctggcaagcagaaagtatattttcaaaaaaaaaaaaggtgttctcaatgctttccttaatagttactgaaatacttcagtaaaacagaaaaaaaagtgataataaataaatattttactagatatgacttgtagtgagcatgatatagaaaaaatattaatttaccatctctacttgcctttaagaatatgatcatctctcatgcagagcattattctaatgcttaaatatatgtagtttttgtacaacatgg

SEQ ID NO: 551802 - DNA, 532 bp, Homo sapiens
acaccacagaggggtacatccacaccaagcagcttcaaagccagaaagactatgacaagctttccttggactcttttccgctctctattccagatcccatggctttccatgctaggaacctagcaatggcaccattaactcctgaaaggaaaagtcctcctgtcaacctgagaaattacccaaaaataccctttgctaaaaaattctaattgctttctgtagtccaatacacaatttgacatgccaggagaccatgttgcaatatcttttgaggctgaaagaaggaaactcaatgaaagaattctacatgaggtgtcaatgtatcactaatgtgaataaatcaaattaaatatttcaagaatgsgggtcttatggttaaaaatagtattaaaaataaacattaacgcatgaaacataaacttagatttttaaagttttgaatatttataaaattggatgcaaatagccaaattaattatgtaatgaaattatataatatcaaatgatgtagttgcattaatctgggttatat

SEQ ID NO: 551803 - DNA, 528 bp, Homo sapiens
cgatcgaagtatagagagattttcacataatcctaatactacgaataacttttctttgacttgcaaaaatggaaacaataattggagtgaaaaaaatgtatctgaacaaatgactaatgaagacaaatcatttggttgtccatctgttagagaccaaaacaggagtattttttcagttcattgtaatgtacccttagcccatgattttacaaataaagaaaagaacttagagacagataataaaataaaacaaaccagcagttcagatagccattccttaaataataaaatattaaatagagaggtggtcaactatgtacagaaaaggarttcacaaatttctaatgaaaatgattgtaatttacagagttgttctttaagatcatcagagaatagcattaatctttctattgccatggatttgtattctccaccctttgtctatttgtctgttctaatggccagcaaaccaaaggaagttacaacagtgaaagtgaaagcatttattgtaaccttaactggaaatct

SEQ ID NO: 551804 - DNA, 1148 bp, Homo sapiens
tgatcaaaccctgactgatgcttatggggaatattctgcattttggttgtaaacccacaaatggtcgaaaacctcatgtcacaattctagtaaataccctggtctcaagtctcctctaatgttatggccaccaataactaatgttcttattttttaatcatttatcttggcccaagaagtaacatcctctcccttgttggttcctaggtgatttctacaactatgaatagctgatacacattcgaataagctcaagtttactaagatagaaaatggcacaataatgcatgtcttaccgcacaaggctgttatgagagaaatcaagacaatttattaagaaaaaatgatataatgtataataatatataaattaaaaatatatgttttattttcagtaagtgaagtttcctggctcttaaagcattagactaagcttttgagaattgtgagaatgttctctaaatcttgagatttgttgaacttgggaagaaaagcaaaagcctcaattggctgttcattgccattgatttattgaatcatatttagaaatagagtcgagttgatttgaaatgtgtgtctaattgctggtgggaggaagagaggcatgggtcttagtggggaagctaaaatgaattgcaggaaaaaatgtaccaccatccacatatagacccaaattatatgtatttagggcctgaaccaatggcactttgcctgcctccrggtggtatgactactgcttcaactccactgattgtaattgcaactaaaagattcttgttgcacagaagagaaatgctgaaaagctgttgggagagtgttgatataaatcacatccttggatctgctctttttttttcataacttttctctcccagtcattttcaccttggcttgtacttacaaagctagagtgataataatatcatatgcatatccagttcatcttatactaagggatcttaaaataacagctttaagctacaactacaactggactgtaatagttaatctttaatggttcgaagtgcaatccagagtgaattctctcatctccttttgagttgagaattacgtattattggcaaagaatccctttgcaatttcaagtctctatctgtttacttttgttctacattgagaagcaattt

SEQ ID NO: 551805 - DNA, 680 bp, Homo sapiens
gtagccagaaaccagtctttgctcctcttcctttctctttctataaaccaatttcagagtatctcatgaaaagtttaaactttaatgatgtggtttggctgygtattataccataagagaaaagaaacaaaagaagtttacataaatatggaaagtattagggagccaggattttttcaaataaaaagtcattaagaaatttacactcatcagttcattcagttcattcagtcctcctcttttacccagccatggataaatggggccaaggagcagctgaagacattgcttcaaaggatgcaagctcccagccttggcagcttccacatggtgttggtcccgcgggtgtgcaaaatacaagaattgtggtttgggaaccaccacctagatttcagaagatgtatggaaatgcctggatgtccaggcagaagtttgctgcaggggcaaagctcttatggagaaactctgctagggtaatgcagaaagaaaatgtggggttggagctcccaaacagagtccccactggggaactgcctagtagagctgtgagaagacagccattgtcctccagactccagaatggtagattcactgacatctggcaccgtgcgcctggaaaagctgcagacactcgtcagctcgtgaaagcatttgggaggggggctgtatgcagcaaagcc

SEQ ID NO: 551806 - DNA, 2276 bp, Homo sapiens
cacactgttatcattactgataaaatcacgtcgactatgtctaaaatacttagggtaacctacttgactgttgtttattagtgtgtagaaaaaatatccttttgtttcttaagtttacttctcatctttaaatagtttgaattaggttgagtcctaaaatgagaacattgcacagaacaagttctcagcaaaatttttgataaatgtaaagtttttctctgcctcttccttctctgataccctattcaataatttgtcatgccttttctcaaacagacctttagcttcatttccaactctaggtatattgtcccttgatgttctttattttctgaaaggactattccttccttctcttttctacccataacctccattaaaatgctcgtatttttcagtgaaatgaaggaaaaagtaatcagattttaaaaggtgaataagaatcttttgaagtattagatttttttaagaacagattttctttgcacaaaagacctatcatcagtaataattttcttaacagagagttaaactaaattattttttaatatccattttccctcaaaatactagaaaaaaaataaactaaaatgaaccattaaaaggtttgtaaagatcaatttgtataaaagatcagataaattttaacaacaggcatcagtttcaacgcttagacaactacacagttttcttacaaaattatcccttcttggtgttttgggataaataataagacatgaaatggaaagtggtcaggcctggkgaggtggctcacgcctgtaatcccagcactttgggaggccgaggtaggaggatcacaaggtcaggagtttgatacccgcctgaccaacatggtgaaacccccgtctctactaaaaatacaaaaattagccgggcgtggtggcaggcgcctgtaatcccagctactcaggaggctgaggcaggagaatcgcttgaacccaggaggcagaggttgcagtgagccgagatcacgccactgcactccagcctggatgacagagtgaaactgtctcaaaaaaaaaaaaaaaggaagtggttaaattctgaaatagaaaaatgaaagttacaaaactgagtaaaaacttaatatgagcacaaatagactccataagagtaagagccattttagtcttgcattactaaggctttattttatctaagccctgaattttcattccaaaagtatgatttcagttttaaaatttttctgtttatatgcccctcaaatattcccctcaaaaagttaacataacatatatatcatattggagtctgtactatatttaaagcatgctaatccaccttaatttagtattataagtatattttagtataaattgttcttattaataaacgtttttcatagtaaagaatcctactatatgaattctgggtggaaataaaacaaatattgctgtttataagcttattatttaactctgcaaccactgtgacactatatatacaatagagaaattttgtattatcaaatctctcacaaaccagtgtcacagagtagattatcgctttgggcataagaaatagcaaacctatgacattagttaaaaactttgtaaccagatcatcatatctcacacaaaatccacagttgaattaatttgcttttctattttcagattctgctaccccactcccatctatgctggtctgctgaaaaaacaaaacacgcttgaaatagcatatagaaaataaaatttgcaacttgtagtcacaatttgctttgacactctattaaatattggagttaaaaagagttctccatagatctgaataaacatttactttacatttgcttccagttattagatttttgcaacaaaaaatttagcagtcaaattcaattatttgagttctgaacaatggcttagtcatgtaaaaatactatagaggtaaatgatggttattactccaatatatcttggtgttagttcaaagttactctttcaaataatgttgatagaactttccagaagaatttaacattttattttgggagagagattatcacatactgcattatttaccaatccaattacttagttattaggttgtattttcaattccttttgttgtcactaatggactgatttgtcctgtgtaatgcattcagtctttgaccattataaaatagaaactaaaacgagaacactaaaacaccttcactttcattaaaggcgaagcctcctaaaatcatatcacatgtgagcgaacacaagctgtttagtgcgataaca

SEQ ID NO: 551807 - DNA, 807 bp, Homo sapiens
tatttactttgttttaagtagaatttgtaaaaagttggaaaattgtcttcaagaactttgatgcttcatttcttttcctttaaatattctaacgtaacaagcagaattctaatattttcaaccctttcttgcaatttttttaaatgtaaaagacatgtattgttctttttctataagcaattactgttttgggtatcagaaaactgaaaatatattggtaaatatatcagatacaaatcatataatgtaaagtgatttttcttctcaagcaccaactctttcaattccttcaaattccataattaatctatcattattctttgtgggttttacctctaaaatccagtcaaaattgacagtttttaccaccaaatacaagctatcatcatacctagtctgaactactaaaaccaacttctaaattttttacagtctttatccccataaagattttttgtttttaaatacaatttttctcaaaacctttcaaatacctcctattaattcaaatctgcctatttatatctatctacctatctacctacctacctgtctatttttaaatcttctagttatatttgaagtaaacatggtaatgttaagcaattgaatattattcttaagggtcaaatctgttggaaatatcataaggatttmtcttaattctatacacttttggaagattccttatactacttaactccttgtttcatccaaccttgaaaagcaccattcataaatgccaattccttgtcatagtacacaaagtctcacttaacctggccttgtccacatcttagactacat

SEQ ID NO: 551808 - DNA, 909 bp, Homo sapiens
ttttgctcttatttaggattattaagtgactatgtgtaagctcatgtttgaatacattatcttgcttaggaaactcaccttcaattaacccttttttttgagcttcttccctgaaaatgccagaatctttgtggtgtggtcatctccagatgaactagagaacattaacaaattgttatataaaacagtgagagaaccatggaaggaatgacgcagctacttattagggcaaatgttctccaggcaaaaaattgacccgaagccgttacaaacataagaagaaagtagatagatagtctcacagattgaaaggtaagtgtggcttagagagtatgaaaaaggtaggactttggtgaagacaattaaacctaaaatttaaggagtatcttacctgaaacaataaggaacttgtagactgtattatttccctttatgattatagacaatttctgtttgtttattttgttttattctgttttgagatagtcttgctctgtcatccagtttagagtgcagtggcaccatcttggctcaccccaacctccacctcctgggttcaagagattctcatgcctcagcctcccgagtagctgggactacagttttgcaccaccacacccagctagtttctgtatttttagtagagacrgggtttctccatgttggccaggctggtcttgagctcctggcctcaagtgatctgcccacctcagcctcccaaagtgctgggattacaggcatgagccactgtgcctggtgtgattatagacaattttcagaagatattgataaggatttctgcttagcttctgactacttttattctagaggattaagagttacaaatgtaccctgagaacttacaattcaaggaaaatcttttatatttagtagcagtaactacatgaa

SEQ ID NO: 551809 - DNA, 683 bp, Homo sapiens
ctgctactggcccagaggaagctggttcccaagacactgagtggggccgctctccatcagccgatgagtggacaggcgcctcggatggcttcctgccgagttaatgggtcacccattatgtctccacagatcttcccaggaccctgcaggaaggcaggccagagcagccccaaggaacagcccgggggagggaaggcagatggccacctcaaagccagccccgagcccttcccctctaggcctgagtgtcaagggcagacccagcccatggctttggggacctggtggcactgactccagcaggagamcccccgggctgagccctggcagttagaggaggcctggactcagatggggacagaacactgtctcagcctgatggcggctagaggaggagggtagggcccctggtcatgtgggtcctggctccgtgggcctgctttccacctgacctcagcaggcaggtctctcgggccattcgcacacccagctgcctgggagccccaaactgggactggtggaggggccctgcagaggggaagactagggtccaagaagcccatgaagccatgcgccagggccagagctggcctgcctggtctggatggtatgtcatccttgtgttacaagtgaggaaactgaggctcagggagtaacaccaccggttcaaggtcttaaagccg

SEQ ID NO: 551810 - DNA, 535 bp, Homo sapiens
gttttaagtcacattttatataattcagaagaatttttatagtttttctcatgtggctttctcacatttcttataacatagtttatataaaaatggatttttaaatttatattttattattatttttgatattttgaaaaaccattaactttagtatattaatattgtaactgactaccttactgagctctctaattgtttttagaaaatatttaatgttgatatttttagctatacayatcatatcattgcaaataatgacaattgttccagggtttttttgttttttttttttatcagctcctgtacaagggtgggggtggaaatgtgattcctgtgcacatgggaggtgagaaaggagaggagagctctgcagcaagtgcagaggaaagggtcatactattagttggcttggtggatggtgcattgctcaaaaccaggcaacatctattgctggggttcagatgtgtctttggggaagtcttctgtactagcaggctggctacaactgaagccctatgtctgctagaggctg

SEQ ID NO: 551811 - DNA, 509 bp, Homo sapiens
aactccagcactggctctcctgggccctcagcttgccgactgctcttggttctgtttctctgactaatacaacagctacatcccagtacctagcacaatacttggcactacgcatttgattcatacatgcttaatgtgggaccagatttagatgtttctgaatccctgagccttcaaaatataatgaattcctcaactgtctatatataattcaaaataaaaacaatatggcaagtgcctgtagcccaagctactcaggaagctgasgcaggaggatcacttgagccgaggagctcaaggttgcagcaagctataatcgcaccactgcactctagccgggtgacagagcgagactatgtctcaaaataaataaataaatacaatagtaaaacacaaaatgtatatgcatgttaattttctttattatttgtagatttttggatttaacaattccgtgaaagtctattgaaactgaacctcgagggaagaaaagttctcctactttgctc

SEQ ID NO: 551812 - DNA, 1213 bp, Homo sapiens
gcctgcagcataaacagactctcttagccaggagagccgggtgtgcctggtttctctctgaaattccctttaagcacatgcggtttgccagcagccagccagagtagccaacatggtaaacaggcacccatggtgtagaggtgccattcaggtcagctggcctcagcatcactgtggatttcccagtccacttttcttggacagtaagaaattgttataccttcaggtccacagatgacatttccaactggaaagatggaagatgtaaagcatagtgcttttgaactcagggtctgggaaagtacagagacgcatgaattttcccttttcagcatgcagtccctgtctacctcagcctgaccagcctggctgggcagtggctgtcacctatagagttaggttttaattcagctacctgggcctcacacctgcgatttgcattcrctgcaccatgtcacctaagaccctctgactttcagtgagtggatttcaagccttctgctgaatgttgaagagctctcagaataaaaacccagctgggagcttccagctgatgtgggaattaacaagcgtcatcctgaaacttagtaaatgtgtgatggttttaagctaaaatcatttagagctatggttgatgaccttggaaatggcagaaatgttttcatatatatactttttcattttataaacagttcctgccagggcacacccaggtttttcaacctgaatagatcaaaggaagcttgagttgtgtgtgctgtgattcattccctgctgagtcccaaggacctgccctgcctcctactggagggggtgagaggaaggaaagctggattacccagcctgtgtgcactgccagccgggagcacctgcgatgggtgtgcccagcaggagccgggcaaggtcccaggtctgatggcctctttagacttgtgcagaaggcctattctttttaaactgccacatgcatctgagtctcagactcaaccacatgacatctgcacagatgtttgagaaaggcatcccctgcttggtaagctaatgacttttcacaaccgagtacagatgtggagtccccacgtaaatagcagccattctttcccaggctgagccactcacaggcagaggaagccaggcgttttctgttttgtgctgtgactgtgttagctgcaggatggtgcctgcgtttaacagaagccacactgaaagcacg

SEQ ID NO: 551813 - DNA, 613 bp, Homo sapiens
taattctggcagcatttatttgactaaattctctccagggtggggttgttgctgaagttggtgtttggtttaccaatgcatgcttagaaagtctggagtgaaggaaatattgctcaattttgccattaggaaaagttgttgttcagtataaaagggactatacccagaaatccatagagaatattacaggggatttacacgtgggccagggatcattttttcttccaacaaagtaagakgttattttttcattcattcattcattcattcagtggttttttaaaaagtgtcatttaaggatatatagaagcctaaatgtaggaaaaattcaacttttccttcaaagcaagaaaaatactccaaaaaaagtgatgtaatcaaacatacaggaatgtctattttatggtgccaaggaatttttttttaacagacatttgaaattcaaaggatttgacttttgtaggctatgtatgtgtagtaccagtttatattaaaatcttataatatcagtgttgttttcctgaattctctttattaaatgactgttgggtattagctttcattttagcctagctttgtaaccagcgtttaggatgatggcaattttaggaaa

SEQ ID NO: 551814 - DNA, 613 bp, Homo sapiens
taattctggcagcatttatttgactaaattctctccagggtggggttgttgctgaagttggtgtttggtttaccaatgcatgcttagaaagtctggagtgaaggaaatattgctcaattttgccattaggaaaagttgttgttcagtataaaagggactatacccagaaatccatagagaatattacaggggatttacacgtgggccagggatcattttttcttccaacaaagtaagaggttattttttcattcattcattcattcattcagtggttttttaaaaagtgtcatttaaggatatatagaagcctaaatgtaggaaaaattcaacttttccttcaaagcaagaaaaatactccaaaraaagtgatgtaatcaaacatacaggaatgtctattttatggtgccaaggaatttttttttaacagacatttgaaattcaaaggatttgacttttgtaggctatgtatgtgtagtaccagtttatattaaaatcttataatatcagtgttgttttcctgaattctctttattaaatgactgttgggtattagctttcattttagcctagctttgtaaccagcgtttaggatgatggcaattttaggaaa

SEQ ID NO: 551815 - DNA, 1111 bp, Homo sapiens
cttgatggtctatgcacaatatcatcaagactaaccaccaccaaaatgatcacaatcaccaccaccccaggggcgatgttgtacaagtgaggacgctttcactaggttatgctgtggtaacaaacaactcccaaatgtcaatcatttaagacaagaaaattttatttttctctcatacaaagttcactctgcaaaactctccagagtagctttcctccataggtgggttcagcattccaggccatttgagtcttatggaatctctatattatcacacatttccataatctcccaggcaggaaaacagagcactggatagttctgtgctgaaaattaaatgctcaatcctggatgtggcacacatgtgttctgtccaaaccctgctggccagaactagtcatagagctccacccaactgcaagcttagctgtgaagtttaatcctatcatacactgaaaagaggaagaaactggataaaggcaagtattacagtccactttaatacgaattattttaaattttcaaagtaactttatccagcaaaggttatgtgttcatattaaagatgagatgcaatgtggattaggtgctgagagcataggttttgagtcagtcttgaacccccaatatataatctgtggggctcaggcaagacaaaattcctaaacttgtttcactttttgttaaattgggataaggttatacaccttatagagatggtttgaggcatacatgcaatagattaaatgggtagcatagtttctgacacgttaagtgctctaaaaactttagctcatattattraaaggcaactaattatcagatgttaagaaatatatgtctaatgagtgagggaataattcatctcacatatttcaattgaacaaatcaactcagaaggcacaaatttttacactgggttcaaaactctcatttctctaatttcaaggctctcctttttcccattgtatcacagtgcctcttgtgatatagaatgaattagcaggttgggcccaatttttatgaacagtccctctccctaacccagcctctccatttcagtctgactctatgcatgaaaaggactttggtttaatcacaattgctcaaa

SEQ ID NO: 551816 - DNA, 1560 bp, Homo sapiens
taattttatactgaaaatgtgcttatcattgtggtgcttgtacaacaggtctacaaatgattttacacatctcctatcaagatgcaaaatctaagttccctgccctagaatatgggctggttttagcaactttctgcatgatttcagaggatagaaaatatttttctagttgcttcattctcttcatttggattttaaaacattcattccttcaaacgaaatgaatattagttttttatcagaaaaattaattgttaccatgtcctgctaagtttcatcctgttgtagtatccataagaattttcctgaagtatgtccgttattccacgtacataattccatttgatgttctctttttcttcaaacgtgcgccaatacaaaagaaattggtagtaaattatttttctcacatatcttttcacaaatataaatgctaatccagagarcatatttaaatataaaatatggcaagacatttcttaagcacgagattttctgtcatatatggcttcttttctaatgtttcttatcatatttttcagacatgttttaccctttttagcttctttggtatctgatactttttgaattttgtcttgtaatttatttttctattgattagctgatctttttatattttaattttttccacacccttcttgttcatagttttattttactcttaagtgctctgtctgtaagtttcttcttgccagttttagtggtccataatttccaatggaaagtctgctgccagaacctttctcctccagtgttaatggctgctcttgagaacctgccccgccctccatcatctaatttgagtcaatgagggggcagacaaaacagatggttggcaaggggtgggatgattcactgtttgaaatcatggtgaaacatttttgaaattggtgagggagagggaagcctgacatttgacagagccatgtaaaaattgcagtatccagacgaagttcagtttaattttcactgttattttccagatgtactgatcatattattacaattttaagattatatcgagaatataccttttccaaaatgcactgtaatcatttcaacaaaatgagtttattattgagtgtcaatgtcgggacaattcccaaagttacattgttgccctaacttatttgtttttcctgagttattgaatacctcctctatttctacttacgttaaaactttcttttttgcgtaatctgtttccatgctgtctaattaatttcttcacaaattaggactgtaatgaaatctcaaactactgtgtaagggaataagtaactatatatatatatatatatatatgtatatacatacatttgtacacatttgtgtatatatgtgtatatatacacatttgtgtatatatacacatacgtgtatatatgtgtgtatatacacatacgtgtatatatgtgtgtatatacacatacgtgtatatatgtgtgtatatacacactaacatataattgtatgtatatataatctagtgtcacagatttatggcacaagattatataactaaaaaagtacttatta

SEQ ID NO: 551817 - DNA, 1560 bp, Homo sapiens
taattttatactgaaaatgtgcttatcattgtggtgcttgtacaacaggtctacaaatgattttacacatctcctatcaagatgcaaaatctaagttccctgccctagaatatgggctggttttagcaactttctgcatgatttcagaggatagaaaatatttttctagttgcttcattctcttcatttggattttaaaacattcattccttcaaacgaaatgaatattagttttttatcagaaaaattaattgttaccatgtcctgctaagtttcatcctgttgtagtatccataagaattttcctgaagtatgtccgttattccacgtacataattccatttgatgttctctttttcttcaaacgtgcgccaatacaaaagaaattggtagtaaattatttttctcacatatcttttcacaaatataaatgctaatccagagagcatatttaaatataaaatatggcaagacatttcttaagcacgagattttctgtcatatatggcttcttttctaatgtttcttatcatatttttcagacatgttttaccctttttagcttctttggtatctgatactttttgaattttgtcttgtaatttatttttctattgattagctgatctttttatattttaattttttccacacccttcttgttcatagttttattttactcttaagtgctctgtctgtaagtttcttcttgccagttttagtggtccataatttccaatggaaagtctgctgccagaacctttctcctccagtgttaatggctgctcttgagaacctgccccgccctccatcatctaatttgagtcaatgagggggcagacaaaacagatggttggcaaggggtgggatgattcactgtttgaaatcatggtgaaacatttttgaaattggtgagggagagggaagcctgacatttgacagagccatgtaaaaattgcagtatccagacgaagttcagtttaattttcactgttattttccagatgtactgatcatattattacaattttaagattatatcgagaatataccttttccaaaatgcactgtaatcatttcaacaaaatgagtttattattgagtgtcaatgtcgggacaattcccaaagttacattgttgccctaacttatttgtttttcctgagttattgaatacctcctctatttctacttacgttaaaactttcttttttgcgtaatctgtttccatgctgtctaattaatttcttcacaaattaggactgtaaygaaatctcaaactactgtgtaagggaataagtaactatatatatatatatatatatatgtatatacatacatttgtacacatttgtgtatatatgtgtatatatacacatttgtgtatatatacacatacgtgtatatatgtgtgtatatacacatacgtgtatatatgtgtgtatatacacatacgtgtatatatgtgtgtatatacacactaacatataattgtatgtatatataatctagtgtcacagatttatggcacaagattatataactaaaaaagtacttatta

SEQ ID NO: 551818 - DNA, 1560 bp, Homo sapiens
taattttatactgaaaatgtgcttatcattgtggtgcttgtacaacaggtctacaaatgattttacacatctcctatcaagatgcaaaatctaagttccctgccctagaatatgggctggttttagcaactttctgcatgatttcagaggatagaaaatatttttctagttgcttcattctcttcatttggattttaaaacattcattccttcaaacgaaatgaatattagttttttatcagaaaaattaattgttaccatgtcctgctaagtttcatcctgttgtagtatccataagaattttcctgaagtatgtccgttattccacgtacataattccatttgatgttctctttttcttcaaacgtgcgccaatacaaaagaaattggtagtaaattatttttctcacatatcttttcacaaatataaatgctaatccagagagcatatttaaatataaaatatggcaagacatttcttaagcacgagattttctgtcatatatggcttcttttctaatgtttcttatcatatttttcagacatgttttaccctttttagcttctttggtatctgatactttttgaattttgtcttgtaatttatttttctattgattagctgatctttttatattttaattttttccacacccttcttgttcatagttttattttactcttaagtgctctgtctgtaagtttcttcttgccagttttagtggtccataatttccaatggaaagtctgctgccagaacctttctcctccagtgttaatggctgctcttgagaacctgccccgccctccatcatctaatttgagtcaatgagggggcagacaaaacagatggttggcaaggggtgggatgattcactgtttgaaatcatggtgaaacatttttgaaattggtgagggagagggaagcctgacatttgacagagccatgtaaaaattgcagtatccagacgaagttcagtttaattttcactgttattttccagatgtactgatcatattattacaattttaagattatatcgagaatataccttttccaaaatgcactgtaatcatttcaacaaaatgagtttattattgagtgtcaatgtcgggacaattcccaaagttacattgttgccctaacttatttgtttttcctgagttattgaatacctcctctatttctacttacgttaaaactttcttttttgcgtaatctgtttccatgctgtctaattaatttcttcacaaattaggactgtaatgaaatctcaaactactgtgtaagggaataagtaactatatatatatatatatatatatgtatatacatacatttgtacacatttgtgtatatatgtgtatatatacacatttgtgtatatatacacatacgtgtatatatgtgtgtatatacacatacrtgtatatatgtgtgtatatacacatacgtgtatatatgtgtgtatatacacactaacatataattgtatgtatatataatctagtgtcacagatttatggcacaagattatataactaaaaaagtacttatta

SEQ ID NO: 551819 - DNA, 1412 bp, Homo sapiens
caaacagttgtcagtttccagggcccaaaataggcccctttttaggctccatattcggagaggggaaggacttcaagccaggcatccctattttacacaagcctaaaatgtacatttgcaggccctgaaagcgtttggagcatgcttagggcaaatatttgtagtcagtgtgcctaaaagtgaaaccaagsatgagacaagcaatcaagggactgagacagagtcttgatggacttctttgagttctagatccagctatgtgagaagcaagactaacccttggattttcgagctcctgagtcaataggttagtttgaacatgttttctttcatttgtaactcagagggttctgtctgagacacttttcctttgtactccatcctgaattgacattcctttatctgtaatcataacaccacttataatattcagaactttatcatattctctaattatttaatgcaggagaatttttctttctcaagatttccaaaggatgtttgcaagctgtgcaagaggatggagtttggactcactctgatgtgactaaatgtatgaccttgaataagttagttaacttccttgatacttagtttcttcatcgttaaaatggaaataagcctactcaaagttctaggattgcttaagagattgaatgtaatcagccttgtacacaatagtcattcaacaaataccttgatcatttccttgagggccttggctgtagaaggtaagaaaaccaaattaactgatttaagtaaagtgtctttttaatttaaatatatatttttttaaacatttttgtgggtacatagtaaggtgtataaaatatgataaaagaagcgtcttttaaaaaatcattaatgtaatatctcatggagaaagacgtagataggcaagggttagctggtagcagggacacaaaaaccaaactattttttttcagctctccttacctattccattctttccttttggtgctatctggctttgtctcattctcagtgtacagtgaggtataaggcttccaacagaccctaggtttgtttgcatctgcttcattcaagagtgcatctaaactgagctagaaagttttattcttatgtcaaatttttaggaagtactctgatttctttaatttggaccaatcaaatgtggctaggcaagaggttaaaaattgtattaaccttctgcagtaacataaggttgaagtgaggggaggagaattcccaaaagataacagcactggtgccacaaaaaagggagattaggctagaaaaacatgtgatattagactatagcaatagtttttaagaaaatattctgaatttcctacctttctaacaaaatactaagtacatgttagtgtaccataaacacatgactaaatattttgtgttttgaaactcaa

SEQ ID NO: 551820 - DNA, 1412 bp, Homo sapiens
caaacagttgtcagtttccagggcccaaaataggcccctttttaggctccatattcggagaggggaaggacttcaagccaggcatccctattttacacaagcctaaaatgtacatttgcaggccctgaaagcgtttggagcatgcttagggcaaatatttgtagtcagtgtgcctaaaagtgaaaccaaggatgagacaagcaatcaagggactgagacagagtcttgatggacttctttgagttctagatccagctatgtgagaagcaagactaacccttggattttcgagctcctgagtcaataggttagtttgaacatgttttctttcatttgtaactcagagggttctgtctgagacacttttcctttgtactccatcctgaattgacattcctttatctgtaatcataacaccacttataatattcagaactttatcatattctctaattatttaatgcaggagaatttttctttctcaagatttccaaaggatgtttgcaagctgtgcaagaggatggagtttggactcactctgatgtgactaaatgtatgaccttgaataagttagttaacttccttgatacttagtttcttcatcgttaaaatggaaataagcctactcaaagttctaggattgcttaagagattgaatgtaatcagccttgtacacaatagtcattcaacaaataccttgatcatttccttgagggccttggctgtagaaggtaagaaaaccaaattaactgatttaagtaaagtgtctttttaatttaaatatatatttttttaaacatttttgtgggtacatagtaaggtgtataraatatgataaaagaagcgtcttttaaaaaatcattaatgtaatatctcatggagaaagacgtagataggcaagggttagctggtagcagggacacaaaaaccaaactattttttttcagctctccttacctattccattctttccttttggtgctatctggctttgtctcattctcagtgtacagtgaggtataaggcttccaacagaccctaggtttgtttgcatctgcttcattcaagagtgcatctaaactgagctagaaagttttattcttatgtcaaatttttaggaagtactctgatttctttaatttggaccaatcaaatgtggctaggcaagaggttaaaaattgtattaaccttctgcagtaacataaggttgaagtgaggggaggagaattcccaaaagataacagcactggtgccacaaaaaagggagattaggctagaaaaacatgtgatattagactatagcaatagtttttaagaaaatattctgaatttcctacctttctaacaaaatactaagtacatgttagtgtaccataaacacatgactaaatattttgtgttttgaaactcaa

SEQ ID NO: 551821 - DNA, 880 bp, Homo sapiens
caatagacattgtccagtataatttaaaaccatgttaaattttaaaatgggaatatttgaaaactttaacaattggctcccaaggcagtcctaggtccaaattccattggtccaggaatgtggtacaccctacagggcccagttgcccttcacaaagttgacggagtcaattgtttgctgcccctggaggagcaagcagagatttgacaagatgaccagacagacatctttgggtgctgrttctacctgacttaaggtgtgattggctcctttggtgtgggcactaggccaccagacgggcaaaacttcctctctcttccaagcacaggaatctgagcagaatgacttttcattaccaatgaattctttatagtcttcttttattttttttcaatgagttgcttttatttttgtcaacaaactgtgtcatttaccatagtaagaaaactcctgttgttggaggtctttatcagagttcctacaaatcaggttaattggtgatcaacagagcttttctgtctttaatgaggcctagtagcccaaggcaaggcctacctcttgataagggactttctttttttcttactctgaactctttgatcacttaaaaaagaaagaaagaaagaaagaaagaaagaaactaggaagaacaaccaccgggaatgtcattgttctttaattgcctgattaccaaatgttggagataaaagatagatgttctcaattaataacatttacatagattagcatcactaacaagcctcattagtagctgctgatttttgtttagatggtgtcccaagtcatttgctctctctctgaatgtgcgatcgaatgcacctttagtatgacaaaacattgccttctaatctatttccat

SEQ ID NO: 551822 - DNA, 1382 bp, Homo sapiens
gctgagtcattgttgctttcatttagtccccagaaagcccagtgctaaaggaacttatctttccactgggagacagaggaactgtggggtcacttgcactttcatggacttgggggtaggcgtgggagaagttttcactgttctactctctccctattttggccctaactycttatgtccctctcctgccaggtttctcctagaattctgcacgccataaaccagccaagttcactccatcctcacagcccttgcatcttctctttgggcctggaatagttgcctcttccctcctcccagcaaactctgacttgctaatccacagtcattggtcagccctctgcttagatgtcaccatctctgagaagagttcccacagtctgagttcagtgctcctcatgcgtgtgctcccattctctctatacttccatcaccatccttcattgcctgtttacttttctgtatccaccatgagagagcaagctcacttggcagggattaggtcttgctcttccgctgagtttcatttctgacaggctgttcaatggtcctgaatgaatgcaagaatcaaccaagttcaacaggaaaggctgcaccttcccagaacatgctattttcatttgcctttactctacaaaaccgccagggtctatccaaatgaaattgatgttttgaccactactgtattcaaagccaacattacagaagaaccaatgttggaggtatatggaaataattggttcatctctaataaaactaacactgggaaaaattcataatgcactaaaactgaggaaagttcaaaacaaagtaaaataggagaaatgctttcattggagcttacttagtctaagaagaaagactcagatgggtgtttttgtttcactgtttttaacatggctatatacttaattattgaatcaaattgtagagtttacatttctctcttagaatataccaaatactcttactcttacaatctttggaacatatacaacatatacttggctttgtgatggacaatcagaatgggaagaaaagctatcagaaggcaagcttagcaaggtaaacaaccgattggggcaattcacccttgcctcctacccatgcttgaaagatatggttgatagaggcagaagcttggcacagcacagacgaatgattcagttcttcatttctctttgtgaatgcaggttgaatctggatttggacatatacaacaacaataacataactgatatattcaagcaggagagatatatgaggccctgccaagtgccattcatgcgttacttcatttaatcatcacaagaatcctatgaggcaaaaaatgatttaacaacatatagatgagtaatttgaggctatgtgattaagaaatc

SEQ ID NO: 551823 - DNA, 1382 bp, Homo sapiens
gctgagtcattgttgctttcatttagtccccagaaagcccagtgctaaaggaacttatctttccactgggagacagaggaactgtggggtcacttgcactttcatggacttgggggtaggcgtgggagaagttttcactgttctactctctccctattttggccctaacttcttatgtccctctcctgccaggtttctcctagaattctgcacgccataaaccagccaagttcactccatcctcacagcccttgcatcttctctttgggcctggaatagttgcctcttccctccycccagcaaactctgacttgctaatccacagtcattggtcagccctctgcttagatgtcaccatctctgagaagagttcccacagtctgagttcagtgctcctcatgcgtgtgctcccattctctctatacttccatcaccatccttcattgcctgtttacttttctgtatccaccatgagagagcaagctcacttggcagggattaggtcttgctcttccgctgagtttcatttctgacaggctgttcaatggtcctgaatgaatgcaagaatcaaccaagttcaacaggaaaggctgcaccttcccagaacatgctattttcatttgcctttactctacaaaaccgccagggtctatccaaatgaaattgatgttttgaccactactgtattcaaagccaacattacagaagaaccaatgttggaggtatatggaaataattggttcatctctaataaaactaacactgggaaaaattcataatgcactaaaactgaggaaagttcaaaacaaagtaaaataggagaaatgctttcattggagcttacttagtctaagaagaaagactcagatgggtgtttttgtttcactgtttttaacatggctatatacttaattattgaatcaaattgtagagtttacatttctctcttagaatataccaaatactcttactcttacaatctttggaacatatacaacatatacttggctttgtgatggacaatcagaatgggaagaaaagctatcagaaggcaagcttagcaaggtaaacaaccgattggggcaattcacccttgcctcctacccatgcttgaaagatatggttgatagaggcagaagcttggcacagcacagacgaatgattcagttcttcatttctctttgtgaatgcaggttgaatctggatttggacatatacaacaacaataacataactgatatattcaagcaggagagatatatgaggccctgccaagtgccattcatgcgttacttcatttaatcatcacaagaatcctatgaggcaaaaaatgatttaacaacatatagatgagtaatttgaggctatgtgattaagaaatc

SEQ ID NO: 551824 - DNA, 1382 bp, Homo sapiens
gctgagtcattgttgctttcatttagtccccagaaagcccagtgctaaaggaacttatctttccactgggagacagaggaactgtggggtcacttgcactttcatggacttgggggtaggcgtgggagaagttttcactgttctactctctccctattttggccctaacttcttatgtccctctcctgccaggtttctcctagaattctgcacgccataaaccagccaagttcactccatcctcacagcccttgcatcttctctttgggcctggaatagttgcctcttccctcctcccagcaaactctgacttgctaatccacagtcattggtcagccctctgcttagatgtcaccatctctgagaagagttcccacagtctgagttcagtgctcctcatgcrtgtgctcccattctctctatacttccatcaccatccttcattgcctgtttacttttctgtatccaccatgagagagcaagctcacttggcagggattaggtcttgctcttccgctgagtttcatttctgacaggctgttcaatggtcctgaatgaatgcaagaatcaaccaagttcaacaggaaaggctgcaccttcccagaacatgctattttcatttgcctttactctacaaaaccgccagggtctatccaaatgaaattgatgttttgaccactactgtattcaaagccaacattacagaagaaccaatgttggaggtatatggaaataattggttcatctctaataaaactaacactgggaaaaattcataatgcactaaaactgaggaaagttcaaaacaaagtaaaataggagaaatgctttcattggagcttacttagtctaagaagaaagactcagatgggtgtttttgtttcactgtttttaacatggctatatacttaattattgaatcaaattgtagagtttacatttctctcttagaatataccaaatactcttactcttacaatctttggaacatatacaacatatacttggctttgtgatggacaatcagaatgggaagaaaagctatcagaaggcaagcttagcaaggtaaacaaccgattggggcaattcacccttgcctcctacccatgcttgaaagatatggttgatagaggcagaagcttggcacagcacagacgaatgattcagttcttcatttctctttgtgaatgcaggttgaatctggatttggacatatacaacaacaataacataactgatatattcaagcaggagagatatatgaggccctgccaagtgccattcatgcgttacttcatttaatcatcacaagaatcctatgaggcaaaaaatgatttaacaacatatagatgagtaatttgaggctatgtgattaagaaatc

SEQ ID NO: 551825 - DNA, 1461 bp, Homo sapiens
acagttattctgtatgccattgtaataacagatacaagacattatagatttgttaaaacccacagaattgtatagcacaaagagtaaaccttaatgtatgcaaatacatcatttaggaggtttgggaatctcaggaaacaacacagatggtctatggtaaggcccaaacttcctatgctgcaacaaactgaagctgcttttctgtacttaccttctgtattgttcagcatcattaaggtgcttgttcatccatacaccatgctgcctatggccctctgtcttagtttatggtgcccctccacctgaaatttcctatccctacccccagctcaccttcccctacttattatctgtatatgtggttgtcttctctactcgaccatgaacaatgcaaggccagaatcttattgaatttagaacaagaacagaagatagaaattgcttactttataaaaagcgagagagaaagagagagagactcccttggttcttactgaaagaagctcacatttgaggggagaccagaatataatttgtatcacaaataaaatactagttgctattggaaattttaatccatccttacaaaagtcattagttgggactgaaatcctataaagaaacttttaaaacagtgaaaggcaaaatattttctaatattagattataaatggcttaaagaatggagaagtgttataataatctgagggtgtatagattactgctaggcattcgattcttgaatattttcctctacagtctttgcatcatttgtgtgcatgctgtttatgaaaattcaatctggaaaatgcagaatagcacagaaaattggtttacatttaaatgtaaattgacttatggtaagaatagcacttttcccaccattttagagtattttctaaaagaaaagttccacattttaatgttctacattcacccatagaggtgagcaactctaaaatgaaatacagcatatacaacactctccttagttgaagctcttatgctattcagagttttttgtccaaaggcatgtgtccttgcctcaacccatcatgtggtctctgtttctggatcttgtgaaataggatgaagcacacagggcaatttacgtaaaaaggctctagatttatcatagtgattcgaaacgagacaaaattatattcttttaaaacgactggttttaaattctgtcttttaggacttgctcacatttattgaatcattttgtattgattgtagggtacaggagatgttgactgtcattttaaaattaagaagaacttgaagaatgcatccataagcctggaatctaygaagagcccaggattgtttgttggacttcagtcagatgggcaggcaaaaccaatgatttataccaaggatgagaatgtttgcttctatccacaagtcatccaatgtatgtttactctgaaatgctttgatttttggtttgcttta

SEQ ID NO: 551826 - DNA, 1629 bp, Homo sapiens
tgtttgttagaattgttcatcaataattaagaagtcttacctattcctaaatttgaatatatatttgagtgtctcatgatcagggaactgtagggatgcaaagatgtgggagacccttttttcattgagtttactgtcagtaaatatcttcatattgcaagggtgggcatgactgggaggtgaacatcagaggaagttatcccagataaaggaaaccacatgaaggatggcatagaagtttgagtatcaggctgtggtctttatgcttaatttgatcttagctgtggtttagaaagtttaattttatggctatatatagcataaactagatggtgtagaatgtaaaatggaagagatggtttcatagaaaaatacaacagggcacaagagaggccctaagttacccaatccaaaacttaactcttttacaaatttcacctactccatgttgtttataaaagtactttttaaactcagttaaatccttccatataattttacatatcatttttaaaaattccatttcaatggattcccagaagccctgtgcctttgccacaccacccttggcccctccttccctaagatgttaggtagacttttgcaggggaaatgagcatgagacactgtaaaaacccgatggctgatttaaagtggaggtcagggatgaytctggtttcatgctctgtctaggggagttattagcaaataagaaatacaaggaagggtagatttggtgtacaacatagcacattcagtttagacacatgcttaagttagatggtggtgtccagctggctgcaagaaatgtgggttaggagctaagtgggtttagtaatcctctcacagagatgatggttaaaaaacatggaaatatattttagaatgttgtcaaaagtgatacctttgttgttttctgccccttgtttcagtttcaaaactctgcttcagcaagatgtgaaaaaaagaagaagctatggaaactcatctgattccagatatgatgatggaagagggtacagctttttaaattgataatagttgtttttatgtctttgtatacctttattagatattttaggtagatagagttagacttttggaaattaaaagtttaaatcctattttacaaaattaatgcattactgtaaattaaaagtcaaattgcttctgatttgataataatcagttaatctgacaaagctaaaatatacatgaaatatcccatggaaaaagtctaaattagagggtgaaaactgatggccaccattaaaatctaaagatttcattttaacatctggatttctagttgctaattaaaaacttagaagatcgccaggcacggtggcttgagcctgtaatcccagcactttgggaggctgaggcgggtggatcacgaggtcaagagatcgagaccatcctgaccaacatgatgaaaccccgtctctactaaaatacaaaaattagctgggtgtggtggtatgcgcctgtagtcccagctactcaggaggctgaggcaggagaattgtttgaacccaggaggtagaggttgcagtgagctgagatcgtgccactgcactccagcctggagacagagtgggactccatctcaaaaaaaaagccgtaaag

SEQ ID NO: 551827 - DNA, 1629 bp, Homo sapiens
tgtttgttagaattgttcatcaataattaagaagtcttacctattcctaaatttgaatatatatttgagtgtctcatgatcagggaactgtagggatgcaaagatgtgggagacccttttttcattgagtttactgtcagtaaatatcttcatattgcaagggtgggcatgactgggaggtgaacatcagaggaagttatcccagataaaggaaaccacatgaaggatggcatagaagtttgagtatcaggctgtggtctttatgcttaatttgatcttagctgtggtttagaaagtttaattttatggctatatatagcataaactagatggtgtagaatgtaaaatggaagagatggtttcatagaaaaatacaacagggcacaagagaggccctaagttacccaatccaaaacttaactcttttacaaatttcacctactccatgttgtttataaaagtactttttaaactcagttaaatccttccatataattttacatatcatttttaaaaattccatttcaatggattcccagaagccctgtgcctttgccacaccacccttggcccctccttccctaagatgttaggtagacttttgcaggggaaatgagcatgagacactgtaaaaacccgatggctgatttaaagtggaggtcagggatgactctggtttcatgctctgtctaggggagttattagcaaataagaaatacaaggaagggtagatttggtgtacaacatagcacattcagtttagacacatgcttaagttagatggtggtgtccagctggctgcaagaaatgtgggttaggagctaagtgggtttagtaatcctctcacagagatgatggttaaaaaacatggaaatatattttagaatgttgtcaaaagtgatacctttgttgttttctgccccttgtttcagtttcaaaactctgcttcagcaagatgtgaaaaaaagaagaagctatggaaactcatctgattccagatatgatgatggaagagggtacagctttttaaattgataatagttgtttttatgtctttgtatacctttattagatattttaggtagatagagttagacttttggaaattaaaagtttaaatcctattttacaaaattaatgcattactgtaaattaaaagtcaaattgcttctgatttgataataatcagttaatctgacaaagctaaaatatacatgaaatatcccatggaaaaagtctaaattagagggtgaaaactgatggccaccattaaaatctaaagatttcattttaacatctggatttctagttgctaattaaaaacttagaagatcgccaggcacggtggcttgagcctgtaatcccagcactttgggaggcygaggcgggtggatcacgaggtcaagagatcgagaccatcctgaccaacatgatgaaaccccgtctctactaaaatacaaaaattagctgggtgtggtggtatgcgcctgtagtcccagctactcaggaggctgaggcaggagaattgtttgaacccaggaggtagaggttgcagtgagctgagatcgtgccactgcactccagcctggagacagagtgggactccatctcaaaaaaaaagccgtaaag

SEQ ID NO: 551828 - DNA, 546 bp, Homo sapiens
tgtataaaattaagcttgtatttgtgaacacatagtactttaacatatcaatacatgtatattttatgggaaggaaaagtttatcacactgcatttggtatttttatctcacttcccagaaaaaagcaaactgaaagagcctgttctctggtagccacgtgtcctgggttttccaggacagtcttaacatcaaatgtgtttccaatttttcccatcaaccacaaaaatgttccttatatttcaacatttttgtgtccaaatccatctcccaatctgattctmacacagaagaatcacaaaacatccttctgttgtgctgtctgtaattatctttaaaacacttcagcacagtgcatgtaacaaatgcctgtaggatggttctgaccctcctcccaggagtggtgggttattccagctgagaacataccccagaggtacttcatgagtatgtgaaagccttcctagggaggctcacactccagagtcagcggactccaaattttatttgtcataaacaacggaggctttgttagttagcaaaatgga

SEQ ID NO: 551829 - DNA, 546 bp, Homo sapiens
tgtataaaattaagcttgtatttgtgaacacatagtactttaacatatcaatacatgtatattttatgggaaggaaaagtttatcacactgcatttggtatttttatctcacttcccagaaaaaagcaaactgaaagagcctgttctctggtagccacgtgtcctgggttttccaggacagtcttaacatcaaatgtgtttccaatttttcccatcaaccacaaaaatgttccttatatttcaacatttttgtgtccaaatccatctcccaatctgattctcacacagaagaatcacaaaacatccttctgttgkgctgtctgtaattatctttaaaacacttcagcacagtgcatgtaacaaatgcctgtaggatggttctgaccctcctcccaggagtggtgggttattccagctgagaacataccccagaggtacttcatgagtatgtgaaagccttcctagggaggctcacactccagagtcagcggactccaaattttatttgtcataaacaacggaggctttgttagttagcaaaatgga

SEQ ID NO: 551830 - DNA, 524 bp, Homo sapiens
atgtggtgcttactttctatttcttcttccctttctattccaaaacgtttccaggaagtattttccatggatggtgattccaactaaaggaaagagagaaaagtacactgacgttgaccaagaccttgaggggactaagagggaaagtgasagcatcacataacgagagctgacgtcaaggctggcccaatcaagaaacggcctcaaaaccgtacaatgtaggaaacagaatcatcacaaagaaaaacaatgtgatcttggaacagtggcgacctcaaagcacatctctacatcttgataagaaaaaagaggagacgtagaaaatcccccagaaccagactccagtttggcttacggtctgtcataacatcacaggcaccaggagtgggctctttggtgatgagagcggaactgaaaatggaaatggaaatcaaacacacagccccagtcaggtcccaggttagctgacctgctcctaatgcctgctgggctcaggccaggatatcggtggaggcccctggtcc

SEQ ID NO: 551831 - DNA, 500 bp, Homo sapiens
agaactgtggacaacctgtagcatcttccaataaaggatgtggccacgagccaaagaattctagagcagctgccgtttccaagmcacagtctttcccacgtagagcttgggctgcaagagagctgaggtcgcgcaggtggggagggattcaacacagagggaatcatctactgtggtctcagttgccttcctctggcatgaaacactggtttctccacaaaggacaaagctcttttcacccaatgtaactaaatctaaacctacgagttgtgtacacatggagaagaaaaatcagtattaggaacacgctccagaaagttcttccaccccgtggagcccgtgggaacccatgctctggccaggccaacctgctggccttccctacgaacaattacagctaactgtcgctccctctgcttccctatcccagatgccgggtttctttcatttaactctgaaaatcatacaataagatgagggttattcttcccactatcaaa

SEQ ID NO: 551832 - DNA, 1050 bp, Homo sapiens
ctttagtaggtttatttcctcactcactgcccactgcgaaagtttagtcagatgttgcccagactgctgagtcaccttttttttgagacggagtctccctctgtcacccaggctggagtgcagtggctcaatctctgctcactgcaacctccgtctcccgggttcaagcgattctcctgcctcagcccgagtagctgggattacaggtgcacgccaccaggcccggctaattttttttgtatttttagtagacatggggtttcagcatgttggtcaggctggtctcgaactcctgacttcgtgatctgcccgcctcagcctcccaaagtgctgggattacaggcgtgagccactgcacccggccgagtccccatttttaatgactgtgtaatattcctttaagttgggtatactgtcatttactttattagcctcaaattttagggatcccttgagaaagtctaagcatgtcattctatgctttttcagttgttctctctttctttaaccagatgctaatcctgaggtgacgatgacaatgcttcgctggatctatacagatgagctggagttcagagaggatgatgtgttcctgactgaactgatgaaactagcaaatcggtttcagctacagctcctcagggagaggcaagtcacagcagatatattcaagcacctcagatggtggtggctgagctttaattatgccgagctctgggaaaacagcttcttctgctaatgtaaataacttggcaaggtgttcctttaaaggcgatgctggggacagatgttacctcccttgctttgtgttatcttgtagctaaattttgctaaagcttttgctattctcttttctttcactggtctgttacctgaaattacataatcgtataaactgaaaaattaaatatgaaataatataatccaatgtycaaactttcagctttccttccctttctgtttcccttgacattttactctattttctgatatatcaagttgaatgaaatccttagtcatagtctctttgttggaaacaatgagtgccta

SEQ ID NO: 551833 - DNA, 889 bp, Homo sapiens
acacactataagaaataaaaacatatgaacatgtatccaaataaaaaactgctaaacatggccttaacaccatatgtaagttttgagtgaactatgaagctgcctgcttttcagaaagtaycagaaacaaacattacctgaagaatgatcaaaaagcctgtcagtaccttgaattgtggaagaccaccctctcaattctttcagctgcagccatctatccattaactcattcactcaatattccaagaagtactcagagtcccgattacaacattgtgtacataactaactcttctccagggtccctttccccctaaacagttaaatatttcctctttttcatatgtcatattgaaaactacagaatgtcaataaaaatcttttaaatgaccagagatgaaaggcagtttttccacacaaaaaaaatagcaatctgactgtgaatagactttttatcagcaacaacagatgtcagaaaataatagaaaactatcttcaaagtactgagggaaatgaaccatctatccagaattttatacgcaactaaattatcacagaagggtgaaataataacattttcagatgtacatattttaggagagtttacccataaacccttcttgaaagaactaccaaagatctaattaagcaaaagcaaaaatgaactatgcatggaggaataaaatataagaagcaatggatattacaatgcaaatgctataaccaatttgtaggctttctctcctcactctccaagtgtaagaaaggtgccaaaagtgatatgtaactggttattctcccagtaaatcaggaaattctcttctcaaatgctgaatacaaaatcataataagttaaacattatgatctatacattttaagatattttaa

SEQ ID NO: 551834 - DNA, 914 bp, Homo sapiens
ataatctcagattggtagatgttctgcacaatctcagagtgaggtaccaccaaaattccacaggttcttaagtggtcccccaaaaggcatgcaatatgccccaactgccaggacataattaccaaggatttcaaacagatccagcaggatgtgcgtgatcacaaaggcaatttcaccratggtttctatatttaatgtttattgatccaaaaataaaaataacctgatacaaaacaaattatacatacattgcaggtttgaatggaagttaaaaaatacagggggggatgattgctaatagaccaaaaaaccaaaccctacttcctctggtaatgactcctagttgaaggctggacacagtattttcagttcagtttgtccacgtggtcgttttctaaagattgctcaagaaggaactctgagtgccttcataaccttccttgagaacctggacagagggtaacggaaggtagcagagagatgctgccccttctggctatctgaggctgcctatgtcagagcacacagcttccagctctggaagtaccaaaagctgaaaatacttctcaccagcagaacaggcaatcaacacaaatgaataaacagacaaatgaatgaatttgtgaagcactaattatttttgtatacatttctatactttgatctgtgctttgattttccactttacacagctgttttaaagtctgatctgcatgaagtgaatttctaaaaaaaaaattaaacactattttgtaggagacctatgtttcagatttaatctgagcttctcaaactgaaatttccatgttcatatgattaacatggatattttataataaaaagttggatacaaaacctgcaggaattttttaaataaaattgggacttcaaagaaatattgtgttaccagtatg

SEQ ID NO: 551835 - DNA, 533 bp, Homo sapiens
acctaaaggctggagatcagattgtaacaacaccatgtgtaaagccttccctgaagcagcgggccagccaggcatccttcatttctagtagttcttgatagcagaactttataactaatgttccagtttccaatcaaaatgtatgcaacataattgcccccatcaaaatctttcttttttcttatgtctactgatgtttataaattgccctcaatggtgatttctgacattataattattgcaatgagcatccttgaatatatgttcctaaatatacatgtaagagaacacggaccaagaagtggactttttggatgataggagtgacatccgaaaggtttaatagcctccatgacagaggtactgtcaatcaaagtagttgccgccagggggcgatagagaatgtactgcttcagtattagccttaraagtgtgtggtaccttcactagaaattaccaagtctttgaaaggaagctgtaacaatgtactcttttccacatgttggaactttaggggtttaaatctcctttgc

SEQ ID NO: 551836 - DNA, 974 bp, Homo sapiens
  misc_feature 874, 875, 876, 877, 878, 879, 880, 881, 882, 883, 884, 885,886, 887, 888, 889, 890, 891, 892, 893, 894, 895, 896, 897,898, 899, 900, 901, 902, 903, 904, 905, 906, 907, 908, 909,910, 911, 912, 913, 914, 915, 916, 917, 918, 919, 920: n = A,T,C or G
  misc_feature 921, 922, 923, 924, 925, 926, 927, 928, 929, 930, 931, 932,933, 934, 935, 936, 937, 938, 939, 940, 941, 942, 943, 944,945, 946, 947, 948, 949, 950, 951, 952, 953, 954, 955, 956,957, 958, 959, 960, 961, 962, 963, 964, 965, 966, 967: n = A,T,C or G
  misc_feature 968, 969, 970, 971, 972, 973: n = A,T,C or G
aaggtagtgctgttggaaatagacctcaagatggacatgagccaggtcatcagtacagtgcatgccatgctgaggagtttggatgggatccgatcctcaagctgatggagaactgtggatttgtagcaggagagtgacatgcctgagtttgttggattatcaaaagagatctctttagaagtgtggagaatatttggaggaagatgaggcagaatgatctctctcttccactttgcctctctgagtctttcacattccttagaatacatctcaggttcattttctggactgaaatcctctctagcacagggactgtggtgatctccttgctctgaagcattaagggcacatgtaactaatttctgaattaacaatatgctgcaatgtgacaaaccttgcattttwtttttttacaatctggcacataaggtgatatttatatgtaatagatgtttgtataatataaatgcgtgtagtacaagacatatttttgacaatgtttgtgtaatataaagaatttttgacaaatacttgtaaaattcagcacttttataaatacataattttatatttatatttgtgtaaccataataaagatagagaatatttccagtatctcaaaaagttctctcatgcttccttgcaacaattctctccccacctctgaccccaggcaacaattttactctaaaatgttgtctttcccacaatttcatataaatggaattatatatcatgaagccttttgggtctggagtcttttattcatcctaatgcttgtgagattcatttgcgttattttgtcaactaaaatttctttgcattactgagtaatattttattgtataaataaaccatattttttatgcatttnnnnnnnnnnnnnnnnnnnnnnnnnnnnnnnnnnnnnnnnnnnnnnnnnnnnnnnnnnnnnnnnnnnnnnnnnnnnnnnnnnnnnnnnnnnnnnnnnnnng

SEQ ID NO: 551837 - DNA, 1256 bp, Homo sapiens
ccgcctgcctcggcctccccaagtgctggtattacaggcgtgagccactgtgcccagcctggtctctttcttagttttaagaaatgcaaaggatttgaagttgaaagtaaactttcctattttcatcattttgcaatctgttaaatattaatagagtcagagcttctccttgacaaggataacatctgtcatttccttgggtcctgttgttcctttgtaagagctccacaagcaacctccaaaggaaaatttcctgaatgtaaaacaatgggagcttaccacggggagacataacacttgctgcattgaaattgaacagccctgcatgtgtccaaaggaaatggataatgascaataaagaagaagggcaagcacaataataacagaaaagaagttcaccgaaacttgtagttctatgaaaacaggcttaccaaacatctgcagttggaaagttaaaaataaatctgcgttttttttaaaaaaaaatatgtatatattttttaaaaagttgcctccagtcagctccatttggggaatttttttttttcattttatatcccaagtcatctaaagacatgtaacttagaatgctcgcatttatttatttacttatataatttttggtatatatttaaggtatacagcatgatatttttatacaatagaatgctttatttatttatttatttatttatttacttttgagacgcccaggctagagtgcaatgctgccatcttggctctgcaacctctgcctcaagttcaagcaattctcctgcctcagcctccagagtagctgggattacaggcacccaccctcatgtccagctaatttttgtatttttgtatagatggggtttcaccatgttaaccaggctgttcttgaactcctgacttcaggtgatctgcccgcctcagcctcccaaagtgtagggattacaggcatgagcccctgtacttgattttaatctgttcagtaaaacatcaatttactaaactgcaactaattagaagttttcattaaggaagttttgttttgcttcaaatgattgcttagagacaaggctctgaattatcagagacatttaatttgaatcatttacactatattaaaactcaagcagaaaagtgggttcataattttatccacatgtacttagaaaaattttagtgacaaattaaaggaaatagaatactaaatgccctgagtattccagttaagagattttaaaataaaagtctgtattttattttcg

SEQ ID NO: 551838 - DNA, 1256 bp, Homo sapiens
ccgcctgcctcggcctccccaagtgctggtattacaggcgtgagccactgtgcccagcctggtctctttcttagttttaagaaatgcaaaggatttgaagttgaaagtaaactttcctattttcatcattttgcaatctgttaaatattaatagagtcagagcttctccttgacaaggataacatctgtcatttccttgggtcctgttgttcctttgtaagagctccacaagcaacctccaaaggaaaatttcctgaatgtaaaacaatgggagcttaccacggggagacataacacttgctgcattgaaattgaacagccctgcatgtgtccaaaggaaatggataatgagcaataaagaagaagggcaagcacaataataacagaaaagaagttcaccgaaacttgtagttctrtgaaaacaggcttaccaaacatctgcagttggaaagttaaaaataaatctgcgttttttttaaaaaaaaatatgtatatattttttaaaaagttgcctccagtcagctccatttggggaatttttttttttcattttatatcccaagtcatctaaagacatgtaacttagaatgctcgcatttatttatttacttatataatttttggtatatatttaaggtatacagcatgatatttttatacaatagaatgctttatttatttatttatttatttatttacttttgagacgcccaggctagagtgcaatgctgccatcttggctctgcaacctctgcctcaagttcaagcaattctcctgcctcagcctccagagtagctgggattacaggcacccaccctcatgtccagctaatttttgtatttttgtatagatggggtttcaccatgttaaccaggctgttcttgaactcctgacttcaggtgatctgcccgcctcagcctcccaaagtgtagggattacaggcatgagcccctgtacttgattttaatctgttcagtaaaacatcaatttactaaactgcaactaattagaagttttcattaaggaagttttgttttgcttcaaatgattgcttagagacaaggctctgaattatcagagacatttaatttgaatcatttacactatattaaaactcaagcagaaaagtgggttcataattttatccacatgtacttagaaaaattttagtgacaaattaaaggaaatagaatactaaatgccctgagtattccagttaagagattttaaaataaaagtctgtattttattttcg

SEQ ID NO: 551839 - DNA, 599 bp, Homo sapiens
taaaaatgaaggaaaatggcatactaagacagtgcattagatggtatcacaaattcactagaagtcagaagagctttaagaaaaataaggatgaaaacagcagagttgtgtctgttagcagtgagaactaaaaggccataactttttttatgtagaaggacctcactattctgtacaaatatacaataatatcatgcaatcccaacaaataacaatataatattaacgcttttgtagtagacayggttgcccctgtaacatccgtcctcccattctttcttgctgggtgtccaccttcttctatgcaatatgctcagggaaggtggcccaatccccaatccaagggtatatttggacagatttttgactttcgcagcaatcctgttttccttgtgtattagtctgttctcttgctgctaataaagacatacctgaggctgggttaatttataaaggaaagaggtttaatagactcacagttccacctggctggggagacctcacaatcatggtggaagacgaaggaagagcaaaaagatgtcttacatggtggcaggcaagagagtgtgtgcaggggaactcccctttaaaaaaaccat

SEQ ID NO: 551840 - DNA, 1122 bp, Homo sapiens
caaaaataagacacagaaatcacaagctctcaggactgagaattttggaggaggttaagagggagctgctcttccccatgcttccgatttccaccaccttccctacacttctgaccctcttccagcttttcctcacttctgtttgacttatgggaattttcagtatttgcaacacacacccagaaactctgccacttaccagctttgtaattgtggacaaattatgtagtttcttttgactttgatttcccartctcaaaaatgaaagaaatagtagtatctaagtcatggagctgttaagagtattgaataatttaatatatggaaaggtattatacttcttagaataacacctggtacctagtgtgaatgatgactatttttatagatccaaatttccccttgaccaggatggcattgtttacctccatattagcatcagcatcaaggaatgtgataagaatatatttgtcaagaccaaggaagattatcatgatcagaaagatactgtatttcttattttaatgcattaaaaagtgtactcagaatggcaatgctcacactttagactatgaatatacttttgaatgcttctcacaggagcatatgtttagaaacagtaagcagaaaaattaatttggagaaatatcttaagcattttctcaagtaggttcttgagaagactaattccacagtctgactaaagtatgtatacacacacacacacgcacacacccatgcacacacacacatgaaatatttctgtggccaaataagtatggcaaaacaccaggttaaatagcactaaacagcttttatctcactttaagatatttttaaattttttttctttttttttttttccgagacagagtcttgctctgttgcccaggctggagtgcagtggcatctcggctcactgcaacctctgtttcccaggttcaagcaattctcctgcctcagcctcctgagtagctgggattacagatgcgcatcaccatgcccagctaatttttgtatttttagtagatacggggtttcaccatgttggccaggctggtctgaactcctgacctcatgattcacatacttctgcttcccacagtgctgagattgcaggct

SEQ ID NO: 551841 - DNA, 1083 bp, Homo sapiens
catccataaattcatttgaactgacttaggtcagaaaactcacaatgataccagttccatatgcaaatcatttaaatttatggaaagtcatgttttaccatcaaaaatccctgtgagatatgttgccaaattttgtcttcttacaggttagggattgtaaaggagatttggttgcttttcctcatcagttacataacaaattcaaaatacacacataaaatctaagtaaaaactttaccaagcctctagcctcccatttcagctaggttgctgcttctaagtcacctgccatgtagaayttatcacaaccagtaaacaagcaaatttatgctttcctccataaaaacaaagactcaggaaatttaggtaaattttttaacgtcacaaagtggttgctcaaactcttccttatgtaacctaagcaatgtagattctctaatgatagtttccaataaaagcttaatgaacattcgtgttattttaacctgctattcatgttaagaagttcaaacactgaagtacttgcatttgataaatactgttatttataacagaaagcttaattaactggatacattaacctcattataaatataatatttgatagcttagtaattctgcagttgaaaacaggttaatatatgagttccgtgttcagtctaagttaatagaaagttgcacctcattttcttttcaacgcattcctccctactaaagtttgattgtttatcttcctgaattttatcatagaataggttttattttatttttctaggatgcgaaatgatagctcaggtggaaaattaaacaagacacataatattaaattggtcttagtctattaagaaaaattagggtacaggtatgaaagaaattttgctaccggaatttttagcttttaatacactccacagtatctggcagcagtttttcaggagacactagattgacaggttaattatagaagacgtaaaactatatgtacagatagcaaatcaaacgagtattcattcacttggcactctaccagaaagcggcagacactttttatttgaaactatttgaggatacaaatcatataat

SEQ ID NO: 551842 - DNA, 1083 bp, Homo sapiens
catccataaattcatttgaactgacttaggtcagaaaactcacaatgataccagttccatatgcaaatcatttaaatttatggaaagtcatgttttaccatcaaaaatccctgtgagatatgttgccaaattttgtcttcttacaggttagggattgtaaaggagatttggttgcttttcctcatcagttacataacaaattcaaaatacacacataaaatctaagtaaaaactttaccaagcctctagcctcccatttcagctaggttgctgcttctaagtcacctgccatgtagaatttatcacaaccagtaaacaagcaaatttatgctttcctccataaaaacaaagactcaggaaatttaggtaaattttttaacgtcacaaagtggttgctcaaactcttccttatgtaacctaagcaatgtagattctctaatgatagtttccaataaaagcttaatgaacattcgtgttattttaacctgctattcatgttaagaagttcaaacactgaagtacttgcatttgataaatactgttatttataacagaragcttaattaactggatacattaacctcattataaatataatatttgatagcttagtaattctgcagttgaaaacaggttaatatatgagttccgtgttcagtctaagttaatagaaagttgcacctcattttcttttcaacgcattcctccctactaaagtttgattgtttatcttcctgaattttatcatagaataggttttattttatttttctaggatgcgaaatgatagctcaggtggaaaattaaacaagacacataatattaaattggtcttagtctattaagaaaaattagggtacaggtatgaaagaaattttgctaccggaatttttagcttttaatacactccacagtatctggcagcagtttttcaggagacactagattgacaggttaattatagaagacgtaaaactatatgtacagatagcaaatcaaacgagtattcattcacttggcactctaccagaaagcggcagacactttttatttgaaactatttgaggatacaaatcatataat

SEQ ID NO: 551843 - DNA, 647 bp, Homo sapiens
ataaaacattgactgtttactaaaataaattggtaaaataagttgggcatatattggctttaaacaattttatgccagggcatgtcagcaataatcatagtttgagaaattatggtagattcaaaagtggccataaycttccactctgattataacgacaccttttgcaatatgaatttatagctcctcccatcaagagatggagtctgtttctcctcgcttgaattttagctggccttgtgacttcctttgccaatagaatacagtggaagcaacagtatgacagttctgaactaagacttccagagtccttgtactttcacacttttacttaaaaccctgtccaatggccatgtgaaaaagtccagggtgtggaatcattccaactgaagttatcctagatcaatccatagtcatctggccttctaatagaacaaagcttcctaccaaacccacagctgacaacaaacacaacaaactcaataagtgagcccagccaagaccataagaactacccagctcatgtataggcttgttagcaataacacatgtttcttgttttaagcaattgagtttaaggattgtttgttatgcagcaacagctaacccatacaggtattctcacaatagtaaaataaacacatccc

SEQ ID NO: 551844 - DNA, 647 bp, Homo sapiens
ataaaacattgactgtttactaaaataaattggtaaaataagttgggcatatattggctttaaacaattttatgccagggcatgtcagcaataatcatagtttgagaaattatggtagattcaaaagtggccataaccttccactctgattataacgacaccttttgcaatatgaatttatagctcctcccatcaagagatggagtctgtttctcctcgcttgaattttagctggccttgtgacttcctttgccaatagaatacagtggaagcaacagtatgacagttctgaactaagacttccagagtccttgtactttcacacttttacttaraaccctgtccaatggccatgtgaaaaagtccagggtgtggaatcattccaactgaagttatcctagatcaatccatagtcatctggccttctaatagaacaaagcttcctaccaaacccacagctgacaacaaacacaacaaactcaataagtgagcccagccaagaccataagaactacccagctcatgtataggcttgttagcaataacacatgtttcttgttttaagcaattgagtttaaggattgtttgttatgcagcaacagctaacccatacaggtattctcacaatagtaaaataaacacatccc

SEQ ID NO: 551845 - DNA, 647 bp, Homo sapiens
ataaaacattgactgtttactaaaataaattggtaaaataagttgggcatatattggctttaaacaattttatgccagggcatgtcagcaataatcatagtttgagaaattatggtagattcaaaagtggccataaccttccactctgattataacgacaccttttgcaatatgaatttatagctcctcccatcaagagatggagtctgtttctcctcgcttgaattttagctggccttgtgacttcctttgccaatagaatacagtggaagcaacagtatgacagttctgaactaagacttccagagtccttgtactttcacacttttacttaaaaccctgtccaatggccatgtgaaaaagtccagggtgtggaatcattccaactgaagttatcctagatcaatccatagtcatctggccttctaatagaacaaagcttcctaccaaacccacrgctgacaacaaacacaacaaactcaataagtgagcccagccaagaccataagaactacccagctcatgtataggcttgttagcaataacacatgtttcttgttttaagcaattgagtttaaggattgtttgttatgcagcaacagctaacccatacaggtattctcacaatagtaaaataaacacatccc

SEQ ID NO: 551846 - DNA, 566 bp, Homo sapiens
gctttccatgaatggatggagcagacctattctaagtgctttgtatataaattccttttatactgaggagtacatattactatgattttcatacagattggaaaataatatatttctttacctacatccttaaaatttcaggacaaatatttcaactacacaaggaatgttgaaaactctttactcctaaaaatatgtattttagcttttacaaactgactcattatttgataaaasttgatacttattaaacctgacatcgaaatataaattgatgatacaaattaaagtacaatttttcttccatttaattattcagtatatttagtccactatttgtattataaatttttgtcagagaagtgatattacaaaaagatcatcaactcctttggaatttttaggaaacattgtgcctaacagtttttaagacaaatagaagaaaaagacacctctgtaatcttacccaagctagtggacataatttttataagctatgtatacattactctactctgtgctgtaaactgatttttctttattacttccttaattattttattatg

SEQ ID NO: 551847 - DNA, 529 bp, Homo sapiens
gaggagcctgtctcacatgaactttggtaatatacctactktattgaagcctcagtcaaaaatgtggttggaaacctcattctaacatcctgctatatttatttgtttgattaccttctatttttaaaaagtggaccaggcatggtggttcatgcctgtaatcccagcaatttgggaagctaaggcaggtggatcatttgaggtcgggagtttgagaccagcctggccaacatggtgaaaccctgtctctcctaaaaatacaaaagtagctgggtgtggtggcatacactccagcctgggtgacagagtgagaccccatctcaaaagaaaaaaaaaataatatcttttttccatttatgatagagaacttattttttaaattaatatacttgattatatagtgaatcaatttaaagaataaatattaaataatgaaatacaggagatacatatataggactgaaaacatagagatggtaggctgggtgcggtggctcacgcctgtaatcccagcactttgggaagctga

SEQ ID NO: 551848 - DNA, 529 bp, Homo sapiens
gaggagcctgtctcacatgaactttggtaatatacctactttattgaagcctcagtcaaaaatgtggttggaaacctcattctaacatcctgctatatttatttgtttgattaccttctatttttaaaaagtggaccaggcatggtggttcatgcctgtaatcccagcaatttgggaagctaaggcaggtggatcatttgaggtcgggagtttgagaccagcctggccaacatggtgaaaccctgtctctcctaaaaatacaaaagtagctgggtgtggtggcatacactccagcctgggtgacagagtgagaccccatctcaaaagaaaaaaaaaataatatcttttttccatttatgatagagaayttattttttaaattaatatacttgattatatagtgaatcaatttaaagaataaatattaaataatgaaatacaggagatacatatataggactgaaaacatagagatggtaggctgggtgcggtggctcacgcctgtaatcccagcactttgggaagctga

SEQ ID NO: 551849 - DNA, 664 bp, Homo sapiens
tctttcagaaaatagaagatgagggaatactttccaacttactttatgaggycagcattatcctgataaaaaaagcagacaaaaatagtactagacaagaaaacttgagaccaatatagcccataaatagaaacacaaaaaccccagcaaaatgttagcaaattgaatccagcaatatattaaaaaaaaataggcactacaatcaaaggagtttatcctggtaattgcagtgttggttcaatatttgaaaatggttcgatataatccttcatgttaataccaaaaacagccttaagaaaatgaaaagaccttgaaaacgattcacatgtttttaaaagaaaagaaaatgaaagggcaaacaaaccacagacagaaagaaaacatgtgcaaaacaaaacatatatctgacaaaaaaattgcattcagaatatataaagaattctcaagactttacaaagagaaattggacgaaagatttgaacagatattttaccaaagaagatatattgatggcccacaagcacatgaaaagatgccctaaattcttagtcattagggaaattataactacaatttacccgctaggtgggctgaaattaaaaaggttgacaatactaagccttggtgaatgtggagcaactagaattgtcacacattgttagca

SEQ ID NO: 551850 - DNA, 664 bp, Homo sapiens
tctttcagaaaatagaagatgagggaatactttccaacttactttatgaggccagcattatcctgataaaaaaagcagacaaaaatagtrctagacaagaaaacttgagaccaatatagcccataaatagaaacacaaaaaccccagcaaaatgttagcaaattgaatccagcaatatattaaaaaaaaataggcactacaatcaaaggagtttatcctggtaattgcagtgttggttcaatatttgaaaatggttcgatataatccttcatgttaataccaaaaacagccttaagaaaatgaaaagaccttgaaaacgattcacatgtttttaaaagaaaagaaaatgaaagggcaaacaaaccacagacagaaagaaaacatgtgcaaaacaaaacatatatctgacaaaaaaattgcattcagaatatataaagaattctcaagactttacaaagagaaattggacgaaagatttgaacagatattttaccaaagaagatatattgatggcccacaagcacatgaaaagatgccctaaattcttagtcattagggaaattataactacaatttacccgctaggtgggctgaaattaaaaaggttgacaatactaagccttggtgaatgtggagcaactagaattgtcacacattgttagca

SEQ ID NO: 551851 - DNA, 664 bp, Homo sapiens
tctttcagaaaatagaagatgagggaatactttccaacttactttatgaggccagcattatcctgataaaaaaagcagacaaaaatagtactagacaagaaaacttgagaccaatatagcccataaatagaaacacaaaaaccccagcaaaatgttagcaaattgaatccagcaatatattaaaaaaaaataggcactacaatcaaaggagtttatcctggtaattgcagtgttggttcaatatttgaaaatggttcgatataatccttcatgttaataccaaaaacagccttaagaaaatgaaaagaccttgaaaacgattcacatgtttttaaaagaaaagaaaatgaaagggcaaacaaaccacagacagaaagaaaacatgtgcaaaacaaaacatatatctgacaaaaaaattgcattcagaatatataaagaattctcaagactttacaaagagaaattggacgaaagatttgaacagatattttaccaaagaagatatattgatggcccacamgcacatgaaaagatgccctaaattcttagtcattagggaaattataactacaatttacccgctaggtgggctgaaattaaaaaggttgacaatactaagccttggtgaatgtggagcaactagaattgtcacacattgttagca

SEQ ID NO: 551852 - DNA, 556 bp, Homo sapiens
ctttattcttgcatatgtcttggtggagggtaccaaaagtcaaaacaatttaactgtatattcccttgaagaggcctaagcctcatgtctatagacacaacacacagtaagcctgaatatatttaatattcttttcctttcttgtttcttttgtatagctgtgcttataatgctactatgttgttcaagaaaatagatatgtagaaaatagttaacctaaatagctgggcaatactaaaaatggttaattgttaatttgaaactattaatcaaaacctgcaatgatatatgaaaagttatttgaatttrgtaaaaacaatgtgtgtaaacatagaaaagtggttgaggtatacaaaaagttcataaatgttgaaatacaattaataaatgtagaaaaagatgttcaatttctcttgtaattaaaaggaagtgtcattttccattaaattgacaaaataataaaataagctgtgcttttagtgttattatgtcattaaagaaaatagatacatagaaaatagttatcctaaatagctgggcagtattaaaaactata

SEQ ID NO: 551853 - DNA, 595 bp, Homo sapiens
attacattacactgatataccatattttwtatatatatatatagctaatgcaataactaaactatttcctgaatgcttctgatttaaattcccttattgacaaatcagtttctctcttcttatcccatccattattaagttcccaaggaaaggaaaggaaaattacgtcttgggaaaaaggggaatataatgttaaaaatgtcctatcagacagaatgatggaagaaaagctagcttatttcatcctggtcttggaagaagtgcaaagacattagggatggggcagtgaggtcagatataggtcctgatttatctttttcaggttggaacccttaggtgtaaggggcctggtggggaggctagaagcatccaaaagggatttatgcaatgggaatgagctattggcacacttcccagcttcagggaagcctgttactggccatgttcaacacgccttggaggtggcagaacaccactggcaggggtacgggctatatagatgagcccaagctgaggctcctggatccctgcagcttgtgaagagcatgcaagggaacaaaaagcccacacgccctgcttagagagtttcttgttt

SEQ ID NO: 551854 - DNA, 595 bp, Homo sapiens
attacattacactgatataccatattttatatatatatatatagctaatgcaataactaaactatttcctraatgcttctgatttaaattcccttattgacaaatcagtttctctcttcttatcccatccattattaagttcccaaggaaaggaaaggaaaattacgtcttgggaaaaaggggaatataatgttaaaaatgtcctatcagacagaatgatggaagaaaagctagcttatttcatcctggtcttggaagaagtgcaaagacattagggatggggcagtgaggtcagatataggtcctgatttatctttttcaggttggaacccttaggtgtaaggggcctggtggggaggctagaagcatccaaaagggatttatgcaatgggaatgagctattggcacacttcccagcttcagggaagcctgttactggccatgttcaacacgccttggaggtggcagaacaccactggcaggggtacgggctatatagatgagcccaagctgaggctcctggatccctgcagcttgtgaagagcatgcaagggaacaaaaagcccacacgccctgcttagagagtttcttgttt

SEQ ID NO: 551855 - DNA, 1808 bp, Homo sapiens
gggatccttctgttccacagaacagttttgaaaaggtggctctagatgtattctcatgggatatctcgtggtcagataggtcaacacaagaggaagaaacaaagaaaacattttctattccttctgcctctaactcccagatatgagtaggggtgaggtggagcaaagagggaattgcagcattaaataaaataccactgtgaatccagaccaaaggcaattctctgtggaaaatgatgaagagactcaggctgagctgagttcaaggaactcagggaaggaaagttaggaaccaagaaaagaaaatacttcatttcctcacctatctagaaaaatgccttcatcctggtcccagggacagaaattaagcaaactaaccaaaatgaaacagaaaaagggaaaaattaaagcataactcaggagattgaggctgaaggggactgagagcacctttcctgggttccccatggatgtacttcatccccatggagggatacttcaatcccctgccacttcaggacaagcccacagatactcactgttgatcacatctggcctgccaggctggagttactccaaattcttgtagccctgtctttcctctagcatccatctgaccctaatcagtgaaattaatttcagttcttatcccttctagatccccctgccctcactcagttaaaggtccctctctagctgtatcmtgagctatgactggcatttaactccctctcaccttgagatattagcaaaatatggagttttatcatcctagcttatagctgcagaggctttcttaaatagcattgaacttagactttgaattaatgatagagcatagtcacatattagtttaaattaatgtgacatgagtgaacggacttctaattgggagtggtatagcattaacaataagagccaaaatctggagccagactgcttgagttcaagtccgagttggccacttggtagctttgcaatgtgaggcaaagcatttggcccttttgtgtcttagttcttccatttgtaaaatgcaaataaaattgatacctatctcataggatttgtatgaagattaaatgcatgaatacatattaaatgtaacctacatagagtaaataatatataaatgtgagatgttatcattctttttattgttattattattacagacttgatagaaatcagccatgctgagaaaatgagcattttagtgtgaggatacattttgtatgtaattttgatgacagtagcactttagattttaagatcatcttggagttgccccataggagggagtttagataggtaaggtgtcaggaagtaccagaacattattaatgcaacattaaccaacacaaagtatactccagtgtggcttagaatgacataataaaaggaagatgctgtttaattagtacaatattaaaaatggaataaagggttgagccacaaagtaaaacttattataaaatgttctacttttctagaaatggtaggtagtgcttaacattatgcagtattcgtgtgtgtttatgtttgcacgtgtgtgtacgcacacttagctttaacatgttttggcactaggtacagtatcacctattaaagtttgtacgatatggtatcaggttggaggtttaggctcatgctgaaatgatatgcctgcatgcaaaaggaattgtttgtattcaaatgcctgtgtcagggtcctgtacaacataaatatgccttcacaaactacttctatgaatttaccagccattacaatatttatgatttcttctttgtcctttcttttgtctgtctca

SEQ ID NO: 551856 - DNA, 1161 bp, Homo sapiens
  misc_feature 845, 846, 847, 848, 849, 850, 851, 852, 853, 854, 855, 856,857, 858, 859, 860, 861, 862, 863, 864, 865, 866, 867, 868,869, 870, 871, 872, 873, 874, 875, 876, 877, 878, 879, 880,881, 882, 883, 884, 885, 886, 887, 888, 889, 890, 891: n = A,T,C or G
  misc_feature 892, 893, 894, 895, 896, 897, 898, 899, 900, 901, 902, 903,904, 905, 906, 907, 908, 909, 910, 911, 912, 913, 914, 915,916, 917, 918, 919, 920, 921, 922, 923, 924, 925, 926, 927,928, 929, 930, 931, 932, 933, 934, 935, 936, 937, 938: n = A,T,C or G
  misc_feature 939, 940, 941, 942, 943, 944: n = A,T,C or G
aaatatttcgcttatctctgtccaaaccaagccagtttccataactttatatgcttttataaacaggactggttccgggatccagtttttctcaacatcctgctgttcctaggtaaaggccctctgtagcctaaccttggccttcagtaactgcctctcagtcatgaagctgacctgtgagccagtgtgtgtatagctttagagaggctggagaagtcttaccagctgcttctgggtgcagtttcactgataggtcaggtggtggccacaaagccattttctgcttttaggaccatctccagatgggcacctcagtgatgactgtaaatacttgtttcttctcccattctccccacaagtaatcctccctggttatctacacatattgctctttggaggctgataaaatagtgttccaggctttagacaaagaacacaactgacttcattctgactgcctcccttatgtaccatgaaagtaagagagagagagagagagagagcagcagagcttacagtctgtctataggtattttttctgtatcagaaagggagagatgtcatctttaagataggagttagggctaggcatgatgrgaggccaaggcaggaagatcacttgaggccaggagtttgagatcagcctggtcaacatagcaacacttccgtctctacttaaaaaaacaaaaaaaaattggaattaaaggaaattagtagatcagtgggtaaagaatatagatcaccatgcctgagcaaaaggtagctactcagtaaatacttaaatgaagcagaaatatgtcttctagactgagagttagatctggcaaaacagcaggcagatcagnnnnnnnnnnnnnnnnnnnnnnnnnnnnnnnnnnnnnnnnnnnnnnnnnnnnnnnnnnnnnnnnnnnnnnnnnnnnnnnnnnnnnnnnnnnnnnnnnnnngattccagaagtctaatgactatatgtagggctcaaaaaaaaaactactcacaagctgagttttaattttttcaaattcttctgggaaattgacagaatatacattataaaccaaccaatagatgatatgtggggttttattatcttattgcttttcctcttacaaaattaataactctagatctggaaagggacccaaggaggttacctatataaa

SEQ ID NO: 551857 - DNA, 519 bp, Homo sapiens
aaaaaagtcaattaaatgcattagtggcacgggaggcactaaatcgtaacctttgtttccatatgagtaatggagcaggaaaccaaattggaatggattgtagaatgattagaggtatagacaactcttttaagatgcctagctatgaagtggagaataaagcggggaagttgggagaatgaggatttgctttgtattaatggaagaggcaaagcataaaatggaaaaamtttgaaggcattgatgaaaccacacctgaattagtccattatagtgtctacaatagaaattaaaggcttgggccaggagcagtggctcatgcctgtaatcttagtactttgagaggccaaggcaagaggattgcttaaggccaggagtttgagaccaggctaggcaacatagcaagacctcatctctacaaaaattgaaaataaaaaaaatattaaccaggcatggtggcacatgcctatagtcctagctactcaggaggctgagttgggaggatcccttgatcccata

SEQ ID NO: 551858 - DNA, 1317 bp, Homo sapiens
gttagtgaattaataaatacagcagtaaagaatagagttgtggttgggaatggtgtctcacgcctgtaatcccagcacaatggcatgccgaggcgggtcaatcacctgtagtcgggaggtggagatcaccctgaccaacatggagaaatcccgactctactaaaaatacaaatcagcctgtcatagaggcacatgcctttaatcccagctactcgggaggctgaggcaggagaatcacttgaacctaggaggcagaggttgcggtgagccgagatcgcgccattgcactccagcctgggcaacaaaagctaaattctatatcaaaaaattaaaaaaaaaaaaaaagaaggctgtttgttgaccatttgagtggccagtcttggtgcttcctggtgggcgaggagagccctgccccattcctacccattccagtagtcatggcataagagtgattctcactttctgctatagcctccttatccattggctgaaatgattgttttttaatgtgtcttataaatgcgtccatagcaaaaaaaattgaattgacttttgtagggactctttcggggattgttacccatcattccataatttgtttgtactcctagaaaagggaagtatgccgagcacagtggatatttcgtctcaaataataaataaataaccaaatagaaaagaaagaaaaggaagtaaagggaaatatacaaatatacaaggtgttaggagagagttgctaatcgtgattcccccttaattgtccaaacagaccacctctggggatctattcgtaaaagactcgttagaagtgcagactcatgcatttgagaatcactcagggaaatctgaagatgacctgtggtgggggtgtaaatggatacttaaatgtgtcttgtgattgtgtgagagtgtgactgtgtgtttgtgtgtgtgctgtcatctgtggagtgggggatcctcttttgccttgagaaagctcatctctgtccacttactctgggctctaccatctgtgccttgtatccagtagaaataaaacagtttgcggcagaaatggagttttattttatttyactttactttttattaggattatttgtagaccgggtctcactctgtcactcaggctggagtgcaatggcacgatctcagatcactgcaacctgtgcctcctgcactgaagccatcctcccacctcagcctctggagtggggagatcccacacctgtgtaatttttgcattttttctagagatggggtttcctcatgctgcccgggctggtttccaacgcccgggctcaagtgatccacccgcct

SEQ ID NO: 551859 - DNA, 1317 bp, Homo sapiens
gttagtgaattaataaatacagcagtaaagaatagagttgtggttgggaatggtgtctcacgcctgtaatcccagcacaatggcatgccgaggcgggtcaatcacctgtagtcgggaggtggagatcaccctgaccaacatggagaaatcccgactctactaaaaatacaaatcagcctgtcatagaggcacatgcctttaatcccagctactcgggaggctgaggcaggagaatcacttgaacctaggaggcagaggttgcggtgagccgagatcgcgccattgcactccagcctgggcaacaaaagctaaattctatatcaaaaaattaaaaaaaaaaaaaaagaaggctgtttgttgaccatttgagtggccagtcttggtgcttcctggtgggcgaggagagccctgccccattcctacccattccagtagtcatggcataagagtgattctcactttctgctatagcctccttatccattggctgaaatgattgttttttaatgtgtcttataaatgcgtccatagcaaaaaaaattgaattgacttttgtagggactctttcggggattgttacccatcattccataatttgtttgtactcctagaaaagggaagtatgccgagcacagtggatatttcgtctcaaataataaataaataaccaaatagaaaagaaagaaaaggaagtaaagggaaatatacaaatatacaaggtgttaggagagagttgctaatcgtgattcccccttaattgtccaaacagaccacctctggggatctattcgtaaaagactcgttagaagtgcagactcatgcatttgagaatcactcagggaaatctgaagatgacctgtggtgggggtgtaaatggatacttaaatgtgtcttgtgattgtgtgagagtgtgactgtgtgtttgtgtgtgtgctgtcatctgtggagtgggggatcctcttttgccttgagaaagctcatctctgtccacttactctgggctctaccatctgtgccttgtatccagtagaaataaaacagtttgcggcagaaatggagttttattttattttactttactttttattaggattatttgtagaccgggtctcactctgtcactcaggctgsagtgcaatggcacgatctcagatcactgcaacctgtgcctcctgcactgaagccatcctcccacctcagcctctggagtggggagatcccacacctgtgtaatttttgcattttttctagagatggggtttcctcatgctgcccgggctggtttccaacgcccgggctcaagtgatccacccgcct

SEQ ID NO: 551860 - DNA, 613 bp, Homo sapiens
gaagcatcaaggtggtctctacgaccccaagtaggggctcttctattgtaaagaatctttgattatatggctgtcctcctcattccaggggcaggaggtgagaggtatgtccctttctctactttgggttgtgttctcagaagtccgctggactaaaaaggcttttccagaactccagtagtagggtagagcagctaccagtcagggataagtgaatcttcaaagaagcaagtttactggtaagtagccaagtaagtggttgcttctttgcctgaaaacatcttgacctataagggacatttttgtagtaacaatgctatctgtttcaatttgccttctaactgtaacaagctttattgatataattaaaatcaaggaaaatacatttaactctcaaaataaatctttttttaagactacccaccatttaaaaatttaactgtatttatgaattaaccataagtgatgtttttaggacatctgttctcaagttgggakttttgaaataagaaagaatgtcattttattttttgaagtatcttaaaaccaccaccactcccaactgtattttaacattaacccgattttgattggattagatatttggcaggca

SEQ ID NO: 551861 - DNA, 1821 bp, Homo sapiens
aatcaagtataattgaatacttggaagataatatactgtgtttagacaactatatccagtatgaaaagtcttgagatactagttggcttggaggaaataaatatgaagcaaagtttacacattatttcttcaatttttttttttttttttttttgagatggtgtttcgcccttgttgcccaggctggagtgcaatggagtgatctcggctcactgcaaccttcacctcccaggttcaagcgattctcctgcctcagcctcccaagtaactggcattacaggcatgtgccaccatgcccggctaattttgtatttttagtagagatgaggtttctccatgttggtcaggctagtctcgaactcccaacctcaggtgatccgcctgccttggcctcccgaagtgctgggatcacaggcatgagccactgcacctggcctatttcttcaatattttaaaagttatattttttctagagtcagcaaaaacagtgatttctttcgtaaatggaaaaagccataatctgtcaccagctcacaaatgtaactgaatccccagctggtgcacactcttagaaatggaggttgaagtcttatctattaactgttaaattttggactaatgtatggtttcttgttcattaaactgttaaatccttggttagaggttgtatctatgaattattgattatccctaaatttaactggatttttggggggaaaaaatctagagttccaatctataggggctgaaatttttaatctataatgttcattcttaattttcccaatcatgccatgggcatgtccatatttaccatattaagaaggtgaaatcaaattttcaaagtagtaaaagatagtatctctcccacatcaaagtagcaagtgctttccaagcaaatagaaagattgactataccatgtacaggtaaccaaagaatgtggaatgctagattgttagaaatccaaattttaattgttttgttctattgcctttttactgatcaaatarggatgaagagacaaagacaatccacatccaattttattgttaaccttcctaggtgtgataacagtatcatggccacgtaagaggctgatgcatgctgtactttctagggatgaatgtgatgatatcagcaattcatttttgaatgattccacaaaaaacacatttataacatacatatatgtataaattccacatgtgtaatactaaaaattgttaggcttaaaatttagttatttatcatactattatcccatatttgtgtacatttgaacaaagttataataaaaaattggggaggaaaagggatggcaaagatgtggaaggttttctcctggtaaattattctgttcctatcacatccaaggttcacctcatcactccccatccaccaccccaaaaaacatactaagtctcagtatccttcaaaatattgctagggagcaaaaaatagtccctttgccgtctacaaattgttgtctacttattttcagagttaaatgagctattttgagtaaggcacgtaggacggagcttggcacagtgcaagtcctcaatacaagctggctgatgtgactattattatctaaaacacaatgcagatcagctgtcatggctcacacctataatccaagttctttgggaggccaaggtgggaggatcacttgaagccaggagttccagaccagcctgggtgacttagtgagaccctgactctataaaatatatatatttgtaattagctgggcatgatggtgcatgactgtagtcctagctactcaggaggctaaggcaggaggatcacttgagccc

SEQ ID NO: 551862 - DNA, 486 bp, Homo sapiens
aatagatcacatgaacttttgaagtttcatctattcaggggaattgggatgtattagaatgacatgtaggaaacaaacagtaattgctaatacaaatgaatactcattktagtattttagcatgaagattatttatgtttgtgtatttataaatcttttctcctgtctcccattccatatgtctttctgtatatctatcagtcattataatttattgttcctggaagtgtcctatttcagttactttggattcaaacattaataactatattttgatgcacatattttaaaaaagtagagaattaattgatattggtatattctcaaaataagataataaatcatgactcaagcaaaaatttattttgactataataaagcaacagtcttatattgaccagaaataaaactggtagaaatctcaggcattaaatgtgggataaactacacttactactattataattctctattatcttctacccc

SEQ ID NO: 551863 - DNA, 2351 bp, Homo sapiens
gataagggaaggacctctgaaagtcatagctcacagccgtaagtgcttataatgctctgggcacggtgctaggtacagcaaagtgctacagaactggagagtgagtactggaatcatatccatttcatgaagaggaaacgaggcagtcttagtgaaatcactggctcagcttcacacagtgaggaccagagctggaattcagacccaggagtttggaatacaaagcccaccccttagccacatcactccacagtggtgttaaatcaataagtcgttgttcatctgtttatgttagggttggggaaactgaggccctgcatgtgagcggtttccagcaggagcacttagaagcgaaaggctcaaacagtcaaaaccttggagtgtcaggagatgctgaggacaaggtttcctagtatgggcctttgcctgcctgtgtgtgataagcccttgaccatgtaaacagcagtgtcctggggaaacaggaagggcagacaggggccctggcatgctggctggcggggggcagattagctgatggctgggaaggagaggctcaatgtctgggctgtgcttcccacccaggggaagctgctgacagggaataggaaggcaggggcctcttccaggggtgggacaggcctggccccccgctcctctaccaattgtgcaactggggcagggctgccctgctttttgttcctgaaactagggctgatttaaagtgaaatcttccattccatgagcaaatattgagcacttactatgtgccagatgagggacagctgcagataggatccccctcccccagcctattgtttagcgagggtgctgccctctcccggggatggggacatagcacattagggggcacctcctggcgggagccctggaggaaatgattttcaatgaaccctaaaatgtgagtgggcagagggaatagccacacccaggctcagagcctggtaggcatgtcatttttaaggtgggaaggaacttgattggtttggctttttgttttcaggtgaaattcacataacgtaaaccatttttaaatgtacaattgagtggcaattcatacagccacaaggttgtgcaaccattaccctgtttagttccactgcctcctgcttctcacccagacctcggtggtttcctgctccgaatgctgggattccaccattccaacagcagaggcaggtttggccgtgtcatcacgacacaccctttgctcacataaaatgatatcatattcacaaaaaccatttggaggtagatatgatttgcccattctacaggtggggatactgaagaaaagtggagagatttgcctaaagtcacacagtcatgggcagagccagccttggcatgcaggcgtcagaggctcatgtctcaggcactgtggctcccaaatatagatcttcagaccagctgggcacctggtcaataatttagacttgggtctggggcctaggcatctggattccctttaaggcctcccctccctgcccaggacagggaggtaccttgccccaggccttgcctgactcaggtcccaggcacagggttctggggacacagccagcctcaaggtgggacttttcagggaaggcagctggtgcactggcagcttgagggtgatgggcatgtgggggtggcagggagggcaagtggagccagaaatctggcccagtcagtcccaggacagaggcttcttgtcagcatccccgggcgttggccctgctgacaaatgggccacgacttctctcgtgaatttgcggagtgacgtgtaataataaaacgctccttaaagccgggacatggcaggagtgactgcttttccaggtcctaataaggatcattaactgtgtatgaaaggttttataaacatttgttaagctccctgaactaactgtgcccatggcctgtagctccctgagatgtcacggccagctggagccagctggaagggtagagacacrggacctcagatcttgctgctccagatctcagaggttcccccactcccaggcttctgccccttggctgcggcatgatggggcagcttggagtccagaagccctgggataatatgtgtcccaggaatgaagtgctggagagatagcggactccaccacttcctctttgagtctcaagctcctcgcctgtaaggtagagatcataggtactcccatgctgctggggggagatttggtgaaataaaatccatgggtgtgagcttcccttttcttccccttccctccttttcccctgccttctcccctctctgcagaagctagcggtcctcccctagaagctcaagaagaaggaggggttggggctacagggatcca

SEQ ID NO: 551864 - DNA, 831 bp, Homo sapiens
taatacattgattttggccctcttactttaataagctttgccattgcaattaattgtacttaaaaaaaaatcctggcattcacaaagattcagtgaaaggcatcaatttttattactctgatgtttacttctcagcccctccattgggggttttagaactttggactgtgtcttatatgcatttaagagccatgtatttaaatttggagcacggttacataagccacactagacttgttaatgaataaggcagtctaatttacatcattcattatttaatacaacttgcaagctggagttgagaacatgctgtcttcatagtgtaggtatttacagacatcagcttggcacaactgtgtggagtctttttagtttcataccttcaatctctgcaatatggacacttttgttaccctgggtaaaacagtggaaaagccttgtgacccttttgaccctactttcttccacctcccctakccatcacccattatttatacaggaaaatgggtttgatttttttcttctctgaaaagtgatatttccttatgggaattcagaatgctggagttaagacaagagcctgggctgtatgttattacaagcaagtattgggaagttgaagcaatgtggtcccagttccctagtgtggagtttaggtctgtttaaggtctctcactgtttctatcccataaacctctgtttgtgtctgcttcaatattcccttataaaggtgttttctaagctgaagagttggctgaacagctgagagttgaggtctctttctccctagtaatattctgtatgatctctttgactatatctaggtcatag

SEQ ID NO: 551865 - DNA, 1137 bp, Homo sapiens
ctggttaaaactctcaaatgtcatcacatattttaacacattgtcttgtccttatattatctcatcatttctaaaatcatcaagaatgaagagaataattgattttcttagtcatattccctccaccccaagggaatgtataaatgcttcaaccttccattttaaaattttaggaaagtcttttaattatctcaaacttggaacttaattaataatcttttacctcataattagctcattgctttatcagatatacatgtatttgctaactcatgattggaacatttgttctagttattgttttaggtgctgcagaggaaagggtgaataacacatgcattcagccctccatcagcttgcagtctttgagagaaaaacatttatgaaaattatgaaaccgtactaccacagtgcttaaaaagaaaatctgtgtgggatcttcctagaagaatgtgtacaaatccggaggaaaagccatcaaattcagtctcaggtgtagtaaactaggctgaaaaaatctgtaaggtaaagtgatgtaaatgacgtcttcatcttgaagtgcaaatgcaaataagagctgcagaccagttgggaggttactacaatagcacaagagacaaatggtagtatgtttcataccatggtgatacttaagctggggagatttatactgagatagctttggtaatgcattcattaagtctcagttaattggattcaaggggtacatagacggagtctcgctctgtcgcccaggctggagtgcagtggcgtaatctccactcattgcaagctccacctcccgggttcacgccattctcctgcctcagcctcccgagtagctgggactacaggcgcccgccaccatgcccggctaattttttgtatttttagtaaagacggggtttcaccgtgttacccaggatggtctcgatctcctgacctcgtgatctgcccgcctcggcctcccaaagtgctgggattacaggcgtgagccaccgcgcccagcctcaaggggtacatattcttaattaaataatataatcataaataagcmgaattcaagctctgagtttctagtatttattaagaaactatgctatattatgcacagaaatgtttattatgaaataggaa

SEQ ID NO: 551866 - DNA, 1488 bp, Homo sapiens
cagcattcactgtcatctcaggaacttgaaggaagagaatagagaggataggtaatgaaatttagcacttcctagacctcaagtcctttacagagaagggacttggaaagttaaatattgtgtgtgcatgcataaaaatataaaaatgtgagtcaaaattaatacaaggtgactggaaattccacggtgacatttaaaaatatatagcatattctatttactgcctcatagtgattacgctaaaaaaaaaaaaaaaaaaagcttaatttttttttttgagatggagtcttactctgtcgccaggctggagtcagtggcatgatctcggcttactgcaacctccacctcccaggttcaagctattctcctgcctcagcctcccaagtacctgggactacaggcacgcaccacaacacctggctaaatttttgtatttttagtagagacagggtttcaccatcttggccaggatggtctcaatctcctgaccttgtgatccacccaccttggcctcccaaagtgctgggattacaggcgtgcgccaccacacctggccaattttttaaatatacaactttacccaagcaaatcacatctgcgaaaaatatataacttcaatttattcgtgagaaaatgtcagtagtgggacagtctactaaaaaactgaccagtactctcaaaagtgtcaagttcctgaaaggcaaaaaagattgaggaactttccaagattggagaaaataaaagagatacaattaaatgaaatgtggaatcgttggattttggaatagaaaagggacattagtggaataattggaaaattttgaataagatctgtagattaattaatagtaaaaagtattaaatcaatgttcattttctggtttcaataacactactatgaataaataagttgtcaacatttggggaagctgggctcagggttatacaagaatcaygtgcactgttctgcaatgtttttggaaatctaaatttttttttaaagttagaccacaattataattttttaaaaagggggaaagagtatacataaaaatgtttacagcagctattttccacaaataatttgttgacatgccagacattattttggtactagggctacagcaatcaatgagacagaaaaatccctgctcttatgcaaggctctcttcttcataaggtaaacagaatatgtgtaagatcatttgagctagtgttaaatactgtgtagaaagtaaatcagggtgagggagtaggaacagacggtatgggtcactttagctgaagtggtcaggacatctctctttgaggggctgttaattgaatgagacctgaatgacctaaggaactgactttgtatggaaaggacattttgggcaggttaaaagcaaagcaaaggccctggggcagaagcaagtatgaagcgtgttaagaagaggaaggccagcctagtcaaaagtggaatgttactagctttccaaatcagac

SEQ ID NO: 551867 - DNA, 1304 bp, Homo sapiens
ggcaggagaatcacttgaacccgggaggcagagattgcagcgagctgagatcacgccgctacactccagcctgggtgacagagtgagactctgtctcaaaaaaaaaaaaaaaaaaaaaaaacaaaaaacctttttcagttgtccattataagcaatattgttggctagatcactttgggaggctgaggcaggaggacaactcaaggccaagagttcaagaccagcctggtcaacatagcaagtcgtctctgcaaaaaagaaaacaaaattagcctggcgtggtggcatatgcctgtagccctaactacttgggagactcagatgggaggattccttgaggctaggaggttgaggctgtagtgaggtatgatcataccaccacactctaccctgggtgactgagcaagaccctgtgtctaaaaaggtaaaacaaaaaccaacattgttcgcaattttgaattgttatccaaaacttttttatttttttgagacaaggtctcgttctttcacccaggctggagtgcaatggctcgatcccagcccattgcaacctctgcctcccaggttcaagtaatcctccctcctctgaccccagaccagctgggactacaagtgcctgccaccacactcagataatttttgtattttttggtgattgtctcattatgttgcccaggctggtcttgaactcctgacctcaagcaatacaccaacctcagcctcccaaagtgctaggattacaggtgtgagccatcgcacccagccaatccacaactttttaatatatctctcctgtatatttacccaaattattaaagagagctgggttaaaaagtagagccctgtgccatagctctaaaratttccctcctttcttttctttcctttcccttctccctctccttccctcccctccccttccctctgctacccttccttacctttcccttcctttccctacatttttattaggcaattgggtgccattaactgcaattagatacgtaggtggaaacactggtttgtgccaaaatctcctctctatgaggagccagagcagtatggctggagagtctcaagatctagagaagggtgttttaggcagaggtctatatacaaaggccatgagctgcaagtgaacttggcattcaaagaacagaaggaagatagcatttgagcactactagtaatctgctaggtaccccaggatatctcccaagaaattggcagcttgctctgagctcaaatttcttggcggggttaatgacaattttctacctgtccatattactgaatatcacttg

SEQ ID NO: 551868 - DNA, 563 bp, Homo sapiens
tcgtggatgacacattgcatttagtacacatgcctctttagctccctttgctaaaactggactgcggtggcagcaccatctcagctcactgccacctctgtttccctggctcaagcagtcctacaatctcagcctcccaagtagctgggattacaggtatgagccaccatgcctggctaatttttgtatttttagcggagatgaagtttcaccatgttggccaggctggtctcaaactcctgagctcaaagtgacccaccagcatgggcctcccaaagtgctaggattacaggcgtgagctatggcacttggccttatttatttatttatttttgctcactgtcacccytagataattttttttttatactttaagttctgggatacatgtgcagaacgtgcaggtttgttacataggtatatacgtgccatggtgttttgctgcacccatcatgctgtcgtctacattaggtatttctcctaatgttatccctcccctagcccccctttccctaacaggccccagtgtgtgatgttcccctccctgtgtccatgtgttctca

SEQ ID NO: 551869 - DNA, 655 bp, Homo sapiens
caccatgttggccaggatggttttgatctcttgacctcatgatctgcctgcctcgtcctcctaaagtgctgggattacaggcgtgagccactgtgcccggtcgttttatttttattttttttaagtgatgtgatttctttcctaacctggtctcctttctttttagctaaaatgcagactctaggcctgcagctcccgacatcattttagtcagagacattactttgggaatgaatatcgtgaaagacaaagcaaacaataaatgtaactttatctctaacaagaaacatcattttagttctagaccaactatgtgaagttttcttgcaattgaaaggaaaagcagcatccttctttttttaagcaactgtgacttgaggtgttatgttactacttcgtgagcttaatcccaactaatgaagatgaccagtaagaactcagattatttttaaaaaagtgtactttttgtattcagagagaatatattgrctgtggagcatgataagaagtaatggtggcaacggtgtttcatccaatataatcaaaagtttttatttcagaaattttttaaaaataactttaaaagagaggtacaaaatattttacacaaaagaattatagttcaatgcatacaaatataagcaacataaataaa

SEQ ID NO: 551870 - DNA, 764 bp, Homo sapiens
ttggccaatttactcagcattctgggttaaaggcttttatttattttatttatttatttatttatttatttttgagatggagtttcactcttgttgcccaagctggagtgcaatggtgcgatcctggttcattgcaacctccgcctcccaggttcaaactattctcctgtctcagcctcccaagtagctgagattataggcacatgccaccacactgggctaatttttttgtatttttagtagaaatgagatttcaccatgttggtcaggctggtttcgaactcctgacctcaggtgatctgccctcctcggcctcttaaagtgctgggattacaggygtgagccaccacgcctgccctaaagtcttttaaaattcacttgtataagttgacttagttttctttaaccttgtagaaaaatacaaaaatggcaatctcttttatcacacaaataatgtctttttaatggagtgatttttttctaattgaggtattatgtacttttcatttactaattattgtttacatttgaagtgttttatgaattaatatttaattgcatagatgaagattactagttataggcattttactaaccaatactcattaagcatagcgtggattcatatgacatcaaggagctattttatttggtaaaacgaaaaagcacaagaatgaacgaacgcaagaactgaaacagtggagacacctagaatgacttgtctaagatctaaatcattttgttgtcttcccagcgtacttatt

SEQ ID NO: 551871 - DNA, 729 bp, Homo sapiens
atttgcttcaaagagcccatcagcaagctgtccttcctgttttatcagtaagcaaagctgagagcaaataacagatgggactgtcccttggtggtggcgcagagcatgcatgaaatatagcacaatcttcctccagtgtgttatgcttttaacagtggaagatcatagcaggagaggtgtgggccaggatgaatgactgtctctgatgaaacattcttctcttctagcaagattcctgtagcaaattgagctctggcagttgatctcagtggcttgatagagtgtcattataaaaacrcacctggaagattctgtggaaaagacaacctcagaagaccaaggtgaatccaaggcctgatctggactcttaatgggtggttaaattctagttcctttaaataagcatcaaagacgccacaaaaccacagataaagctgccatagacagctatatttgggactcatttatcatttgtcacaagcatttcatcctcttgcaatatttttttctacttagtacttctacaagaaggtgagtagttgtgcatttgatgtgtgttgggggctgtgaggctaaaatcttctgcctctgttgtttgtgtaaccacactgaaggctgttactagggctgtggaagctggatttagtatatgttattcctaatggaaaaatctatcagccccacttcagttgctattattaaacagcttttagtcagtcagatacgaag

SEQ ID NO: 551872 - DNA, 819 bp, Homo sapiens
tgggggaaataatactcttcctctcacaaggttgtgatgagattaaaccttattaatgaggttaaatggattacatgagttaacacttttaaatcacttcctatagctttgcatatgctcatttctaggaaactgttctgtaagcttgattgtgaaacatctggtaccctccttggtactcttttcttagtagaaatccctttaggcaattgcattaagtaggttggctaagtgaaattgcatcagagggagatagggatagagataaatttgttaagataccatgtctgacacatctgaggtctaaaaatatgtgactgactgaatagatttattaatatttatgtgtctggagcacaaataaagaaacaaagtgccatcttaataaacagccttaaggaactcttcaaaatacagttctccttaagggagttacagaacactcaggcagtgtgcagtggtaaaaacaagcacacaatacagtagtaaaggcagaaggtacatgaccaggaaaataaaattcaataatgaaaagcwcatcattggctgtgaagatattgtcctcaaacttaaataaatctttatgacatctagtttatgaatcagcatttgataatcataacaataagaaagaaaaaggaaatttatggggactaattttataatggagttcaatatctttgcacaaaggtagagttcatcaaatgaaatctatttcagtattctgtcataccaaaaggttttctttaagtccacatactaaattttacatgcttatatgtaatcaagaaaaatcaaatttcttctcagcttaagagt

SEQ ID NO: 551873 - DNA, 614 bp, Homo sapiens
tgacctcctccttcccttgcggcaaggctattgcaaggatgtgcacatgcttgtgatctatggacgggaaaatgccatggcagtagtgtgtctttgcattggccctcatgtatcctggcaaggacatattggtgttaccagcatgtcctataagggattttaggaagtaaaaatggaatgaatctaggatacgcttaacctaaggaatcattggcagcacagttagtactttattttgggggtayagtgacatagggggtgggaagacattatttaaaagcaaaaataattttaataatttcctgttttccctccttttttattatcttttggctcttcactggattcagtctcatgaccagaaaatggaagaagttaaaagcttattggattgacaaaaaaaaaaataaataataataataacaaaaaaaccatggtgaagattaattctgagaagctgtttaaacggcaaactttttgggaaaataaggaaaggcaatatcaaaaagaccttgggtgatcatgttgccagataaaatacaggaggttcagctaaagttgaatttcagataacaattaagttttagtaaagtgtgtctcaagtattgcatggg

SEQ ID NO: 551874 - DNA, 614 bp, Homo sapiens
tgacctcctccttcccttgcggcaaggctattgcaaggatgtgcacatgcttgtgatctatggacgggaaaatgccatggcagtagtgtgtctttgcattggccctcatgtatcctggcaaggacatattggtgttaccagcatgtcctataagggattttaggaagtaaaaatggaatgaatctaggatacgcttaacctaaggaatcattggcagcacagttagtactttattttgggggtacagtgacatagggggtgggaagacattatttaaaagcaaaaataattttaatwatttcctgttttccctccttttttattatcttttggctcttcactggattcagtctcatgaccagaaaatggaagaagttaaaagcttattggattgacaaaaaaaaaaataaataataataataacaaaaaaaccatggtgaagattaattctgagaagctgtttaaacggcaaactttttgggaaaataaggaaaggcaatatcaaaaagaccttgggtgatcatgttgccagataaaatacaggaggttcagctaaagttgaatttcagataacaattaagttttagtaaagtgtgtctcaagtattgcatggg

SEQ ID NO: 551875 - DNA, 614 bp, Homo sapiens
tgacctcctccttcccttgcggcaaggctattgcaaggatgtgcacatgcttgtgatctatggacgggaaaatgccatggcagtagtgtgtctttgcattggccctcatgtatcctggcaaggacatattggtgttaccagcatgtcctataagggattttaggaagtaaaaatggaatgaatctaggatacgcttaacctaaggaatcattggcagcacagttagtactttattttgggggtacagtgacatagggggtgggaagacattatttaaaagcaaaaataattttaataatttcctgttttccctccttttttattatcttttggctcttcactggattcagtctcatgaccagaaaatggaagaagttaaaagcttattggattgrcaaaaaaaaaaataaataataataataacaaaaaaaccatggtgaagattaattctgagaagctgtttaaacggcaaactttttgggaaaataaggaaaggcaatatcaaaaagaccttgggtgatcatgttgccagataaaatacaggaggttcagctaaagttgaatttcagataacaattaagttttagtaaagtgtgtctcaagtattgcatggg

SEQ ID NO: 551876 - DNA, 502 bp, Homo sapiens
caatctgaggctcggagaggcacaagcctggggaatgttggcctggtaggctctggctgggcttgaaatagtctgtaatctggttggaaaatcattcctgtatctactatttccccatgatggtggatccccactgatgctgtgcattcattcatggaggtctagttcagagccagacccaggctcagggctgggggctgggggatgatgcagaacccctttttgtgccaaaggagcttccactctcaagttgggggaggactcctaacaaaatctgggtggtgacagggttgtgccataggatggacaagaccaacagccacactacaagctggcctcggcatccctctctgttcacccccattaccctccctcactcactgcacgtcggccacaggggcctgtggtcagtcactccccaaagcccctcccacgtggcatggctcctayggcgcttcaggtggctgggtcacttcacctttcaggtcctcctagctcagct

SEQ ID NO: 551877 - DNA, 501 bp, Homo sapiens
aagggagtggagaaaatggaaaccaacaaaatagaaaaataagtacccagttagcccaattaagaaaaataataaagacaaaacagtactcaaaattaggattgggaaagggaatatgaccattggtatcatatggaagatgttataagactaatataaaactatatataccaacaatgtaaaaaatttgaagtcaaaatcaaatgcacaattttctatgaaaatataagttgttaaaattaactttaaaaaataaaaattttatcagacaaaagtctggaataatttggggggaaaattcatgaatyacagctctaaacaattttcatctttttaaaaaagcaaaaggctcaaatagttttatatagagtatttcttccttcaaaatttcagagaataagtaattttcaagctatataaactattacaggatatttaaaaaaagatgaaacccaattcttttttcaaattagagtatgattaataaccattggtatagtt

SEQ ID NO: 551878 - DNA, 642 bp, Homo sapiens
aaataacatttgtaatttatgtgaatagaaggcagggcacccacaatttatgccctctctgctttgacattttcagaagatacatttgatttgagcmgtatttactgtctatcttacgcttcctgtccccaccaccttcactgattctctttctaccagattccttttttgtttacagaagcagaaattgtaaaccgtttatggtacatttctgcttgttagttttgttaatgctcttagtctgtctttactgggatatgcaaatttaaaactaatagattatttccttcacttttgaaattatccatctatcttctgtctatttacaaatataaaatgagcgacatctaccacatgtatgtactgattctgcttttagtattaaaacactggccatcagctaagctctctgctcttgcctgtctgtggttcactcagctccagcaaaccaagtctaccagttgcttcttaagcactccaggcatgctaccatgtcagggttttgcacttcctctttcatcagtttagaatgctgttccttaagagagcctctttctttgcctcctccaaatctttcccaaaatgtcttaatagtgaggtcattgtaaaccaccctatttaaaattttacctccaattatgg

SEQ ID NO: 551879 - DNA, 642 bp, Homo sapiens
aaataacatttgtaatttatgtgaatagaaggcagggcacccacaatttatgccctctctgctttgacattttcagaagatacatttgatttgagcagtatttactgtctatcttacgcttcctgtccccaccaccttcactgattctctttctaccagattccttttttgtttacagaagcagaaattgtaaaccrtttatggtacatttctgcttgttagttttgttaatgctcttagtctgtctttactgggatatgcaaatttaaaactaatagattatttccttcacttttgaaattatccatctatcttctgtctatttacaaatataaaatgagcgacatctaccacatgtatgtactgattctgcttttagtattaaaacactggccatcagctaagctctctgctcttgcctgtctgtggttcactcagctccagcaaaccaagtctaccagttgcttcttaagcactccaggcatgctaccatgtcagggttttgcacttcctctttcatcagtttagaatgctgttccttaagagagcctctttctttgcctcctccaaatctttcccaaaatgtcttaatagtgaggtcattgtaaaccaccctatttaaaattttacctccaattatgg

SEQ ID NO: 551880 - DNA, 642 bp, Homo sapiens
aaataacatttgtaatttatgtgaatagaaggcagggcacccacaatttatgccctctctgctttgacattttcagaagatacatttgatttgagcagtatttactgtctatcttacgcttcctgtccccaccaccttcactgattctctttctaccagattccttttttgtttacagaagcagaaattgtaaaccgtttatggtayatttctgcttgttagttttgttaatgctcttagtctgtctttactgggatatgcaaatttaaaactaatagattatttccttcacttttgaaattatccatctatcttctgtctatttacaaatataaaatgagcgacatctaccacatgtatgtactgattctgcttttagtattaaaacactggccatcagctaagctctctgctcttgcctgtctgtggttcactcagctccagcaaaccaagtctaccagttgcttcttaagcactccaggcatgctaccatgtcagggttttgcacttcctctttcatcagtttagaatgctgttccttaagagagcctctttctttgcctcctccaaatctttcccaaaatgtcttaatagtgaggtcattgtaaaccaccctatttaaaattttacctccaattatgg

SEQ ID NO: 551881 - DNA, 642 bp, Homo sapiens
aaataacatttgtaatttatgtgaatagaaggcagggcacccacaatttatgccctctctgctttgacattttcagaagatacatttgatttgagcagtatttactgtctatcttacgcttcctgtccccaccaccttcactgattctctttctaccagattccttttttgtttacagaagcagaaattgtaaaccgtttatggtacatttctgcttgttagttttgttaatgctcttagtctgtctttactgggatatgcaaatttaaaactaatagattatttcyttcacttttgaaattatccatctatcttctgtctatttacaaatataaaatgagcgacatctaccacatgtatgtactgattctgcttttagtattaaaacactggccatcagctaagctctctgctcttgcctgtctgtggttcactcagctccagcaaaccaagtctaccagttgcttcttaagcactccaggcatgctaccatgtcagggttttgcacttcctctttcatcagtttagaatgctgttccttaagagagcctctttctttgcctcctccaaatctttcccaaaatgtcttaatagtgaggtcattgtaaaccaccctatttaaaattttacctccaattatgg

SEQ ID NO: 551882 - DNA, 642 bp, Homo sapiens
aaataacatttgtaatttatgtgaatagaaggcagggcacccacaatttatgccctctctgctttgacattttcagaagatacatttgatttgagcagtatttactgtctatcttacgcttcctgtccccaccaccttcactgattctctttctaccagattccttttttgtttacagaagcagaaattgtaaaccgtttatggtacatttctgcttgttagttttgttaatgctcttagtctgtctttactgggatatgcaaatttaaaactaatagattatttccttcacttttgaaattatccatctatcttctgtctatttacaaatataaaatgagcgacatctaccacatgtatgtactgattctgcttttagtattaaaacactggccatcagctaasctctctgctcttgcctgtctgtggttcactcagctccagcaaaccaagtctaccagttgcttcttaagcactccaggcatgctaccatgtcagggttttgcacttcctctttcatcagtttagaatgctgttccttaagagagcctctttctttgcctcctccaaatctttcccaaaatgtcttaatagtgaggtcattgtaaaccaccctatttaaaattttacctccaattatgg

SEQ ID NO: 551883 - DNA, 642 bp, Homo sapiens
aaataacatttgtaatttatgtgaatagaaggcagggcacccacaatttatgccctctctgctttgacattttcagaagatacatttgatttgagcagtatttactgtctatcttacgcttcctgtccccaccaccttcactgattctctttctaccagattccttttttgtttacagaagcagaaattgtaaaccgtttatggtacatttctgcttgttagttttgttaatgctcttagtctgtctttactgggatatgcaaatttaaaactaatagattatttccttcacttttgaaattatccatctatcttctgtctatttacaaatataaaatgagcgacatctaccacatgtatgtactgattctgcttttagtattaaaacactggccatcagctaagctctctgctcttgcctgtctgtggttcactcagctccagcaaaccaagtctaccagttgctycttaagcactccaggcatgctaccatgtcagggttttgcacttcctctttcatcagtttagaatgctgttccttaagagagcctctttctttgcctcctccaaatctttcccaaaatgtcttaatagtgaggtcattgtaaaccaccctatttaaaattttacctccaattatgg

SEQ ID NO: 551884 - DNA, 528 bp, Homo sapiens
tatccaagaagcaaattttgctgttcctaattwaaccttgtattcttctagtgttcatgtgttcattaaggccaccaaatcccttttgttaccaacccagaaatctaagtctcctattcttcccccatatgtattccatcacagtccagtggattttaaattctgtatcactgaagatggtttagctacgtgtaatataaatatttgtcaatttaaatttatttaagttttttttttttaatgtcaagtaataagaagtcctagtataagagatatccagggttggttaagtcagaaccagcattcttctctacttttctctctgttatcattaacaagtctgccttgttctgagactatttctattatagtagcaagttgactgcagcacacttcagtttcacacacaatttcaacaatgcccagcggataaaaaggccatctcgtcttaagtatctccttttaggaatgcagaaacatttttccagaaggctcccagtggcctctcccttacatatcatttgcctg

SEQ ID NO: 551885 - DNA, 973 bp, Homo sapiens
acttcgcaaattctctgcacttctgccccgtaccattaggtgacagcactagctccacaaattggataaatgcatttctggaaaagactagggacaaaatccaggcatcacttgtgctttcatatcaaccatgctgtacagcttgtgttgctgtctgcagctgcaatggggactcttgatttctttaaggaaacttgggttaccagagtatttccmcaaatgctattcaaattagtgcttatgatatgcaagacactgtgctaggagccagaaaacaaagaggaggagaaatcagtcattatgtgggaacaacatagcaagatatttagatcattttgactagttaaaaaagcagcagagtacaaaatcacacatgcaatcagtataatccaaatcatgtaaatatgtgcctgtagaaagactagaggaataaacacaagaatcttaacagtcattgtcattagacactaagtctaattattattattagacactatgatatttgagatttaaaaaatctttaatattttaaaatttagagctcttctatttttccatagtattcaagtttgacaatgatcaagtattactctttctttttttttttttttttttttttttgagatggagttttggtcttgttgcccatgctggagtggaatggcatgaccatagctcactgcaacctccacctcctgggttcaagcaaagctgtcgcctcagcctcccgggtagatgggattacaggcgcccaccaccacactcggctaatgtttgtatttttagtagagatggggtttcaccatgttggccaggctggtctcaaactcctgacctcagaggatccacctgcctcagcctcccaaagtgctgggattacagatgtaggccactgcgcccggccaagtattgctcttatacattaaaaaacaggtgtgagccactgcgcccagccaggtattgctcttataca

SEQ ID NO: 551886 - DNA, 566 bp, Homo sapiens
attagctgggcttggtggcgtgtgcctgtaatcccagctactcaggaggctgaggcacgagaattgcttgaacccgagaggcagaggttgcagtgagccgagatcacacactgtactccagcctgtgtgacaaaatgagactctgtctcaaaaataaataaaaataaataatttaaaaaataaaaaacttcactgtttaagaagaattaaagggtcactctcccacccactttataactaggcrctgataattaggtgtggcctgaaattatatacaatagtactttcctcatcataccttaataacctacagcttttacaaactgctttagtgggaggatactacagaaattaattctaaaaggcctatagtctttacatagaacattttgaacaaaggtgtagtttttaaatgggagtttaattttgtttcttggcttcatttttttttcttaagctttaagtgaaagtttgaagaatatgagtgcttcatgttttataacactgcacggtctgcacttagcattcaatacctgggatatatctttttcacatagcaatagaaa

SEQ ID NO: 551887 - DNA, 625 bp, Homo sapiens
tttaatctctacagcagtctacgaggctggcactattactatctccattttacagatcaagagactgacgcagagagaggtgatcaggaagagctgggactggtacgtagtatgtgttagacatttaagcctgggagctgaacactaccctttgctacttcgccaaaaattctatcacactgtaaaactgtctacacttatttttagtttggaaaatrtagtcactgctccacagctgagtctgatgcaaggaacagccctgcccctcccatctttgggctcctgtccagcctcctgacaaagctgattgaccaagctgactgctgacaggcaaaggaaatacacaccaggctcaggcccaggcccagaaaggaggcctggagggagaagacagacaaatgggcagaagccacactcacgcacaggcatctggtcaccctcctcccaattgtgcaactaagactggggagagcatcgtgaacaggcatcttgctcactcctgaaattgcagtccttggcacatacaaggcacccagtgagtatttgctgaatgaatgaatgaatgaatgaattaacacatgttaggtttttcccatcgtccaaaagagggcaaggaactagggct

SEQ ID NO: 551888 - DNA, 522 bp, Homo sapiens
atatcccaaagtttattttttatacaattacaaagaagtagtcactgtaagacagagttttcattcacttcattatttctactattatttaccaaacagtaacgtctgatcgaaatctaatgaatcaaaataaagaaaatcayaatattattttataattatattttagatgttaatttatgtctcatcacttgtaaaaatgatttcttgcactttgacatattgagtagttttggtggagtttctcgttttgttttccatttcttcattcgattatttacttacattatgtgtggaaatgtcccacaagagctgcatattcttaaaattgttaagaaggtatttgaatttgaaatgtaactgaggacctctgagacaagatttatcgtgttggctttacattttttttttttttttttgaaatggagtcttgctctgccacccaggctggagtgcagtggcatgatctcggctcactgcaagctctgcctcccaagttcacgtcattctcctgcctcagcc

SEQ ID NO: 551889 - DNA, 522 bp, Homo sapiens
atatcccaaagtttattttttatacaattacaaagaagtagtcactgtaagacagagttttcattcacttcattatttctactattatttaccaaacagtaacgtctgatcgaaatctaatgaatcaaaataaagaaaatcataatattattttataattatattttagatgttaatttatgtctcatcacttgtaaaaatgatttcttgcactttgacatattgagtagttttggtggagtttctcgttttgttttccatttcttcattcrattatttacttacattatgtgtggaaatgtcccacaagagctgcatattcttaaaattgttaagaaggtatttgaatttgaaatgtaactgaggacctctgagacaagatttatcgtgttggctttacattttttttttttttttttgaaatggagtcttgctctgccacccaggctggagtgcagtggcatgatctcggctcactgcaagctctgcctcccaagttcacgtcattctcctgcctcagcc

SEQ ID NO: 551890 - DNA, 408 bp, Homo sapiens
aagctactgaaggctggtgcagtggcttatgcctgtaatcccagcactttgggaagccaaggcaggtggatcacctgaggtcagaagtttgaaaccagcctggccaacacggtgaaaccctgtctctactaaaaatacaaaaaattatctgggtgtggtggtaggcacctgtaatcccagctacttgggaggctgaggcaggagaattgcttgaacctgggtggyggaggttgcagtgagccaatatcctgccactgccctccaacttcagtgacagagtgagactctatctcaaaaaaagaaagaaaaaagaaaaaaagaagctactgaaggatttacctgtccccaaacactgtctccacattctgcagtagtaataacagttatgtcactttttgagttattttt

SEQ ID NO: 551891 - DNA, 408 bp, Homo sapiens
aagctactgaaggctggtgcagtggcttatgcctgtaatcccagcactttgggaagccaaggcaggtggatcacctgaggtcagaagtttgaaaccagcctggccaacacggtgaaaccctgtctctactaaaaatacaaaaaattatctgggtgtggtggtaggcacctgtaatcccagctacttgggaggctgaggcaggagaattgcttgaacctgggtggtggaggtygcagtgagccaatatcctgccactgccctccaacttcagtgacagagtgagactctatctcaaaaaaagaaagaaaaaagaaaaaaagaagctactgaaggatttacctgtccccaaacactgtctccacattctgcagtagtaataacagttatgtcactttttgagttattttt

SEQ ID NO: 551892 - DNA, 651 bp, Homo sapiens
aacttccctggttgaagctctttgcatgttgtcatagcccatgcaactccactggaagaaggcaaatgaaagctcacatctggatcctcttggacttcaagctacataccttttccctttgttgattttcatctgcatcttttagccataacaaatcataaccatgagtttaacagcttttctcttaagttctatgagtccttcgagcaaatcatcaagcatgatgggttggtcttggggattcccaacgcacactccaagaaatctacgtgccccagcaaaaagtcctaagagatggtagctcataactaccaacatttcggactccarctttttcaaacacaggcatctagtcactaatttttgtatttttagtagagatggagttttgccatgttgaccaggctgatcttgaactcccggcctcaagtgatccgctcacctcggcctctcaaagtgctgggattacaggcatgagacactgcgcttggccctcaacatgttattaatataatagttattaactttttttttggtgagcgataataaatgttattgtctgaagccactaaggtttttttttttttaatttttaaaaaagttgtaaaatacacataacaaaattcactatctttaccatttttaagtgca

SEQ ID NO: 551893 - DNA, 651 bp, Homo sapiens
aacttccctggttgaagctctttgcatgttgtcatagcccatgcaactccactggaagaaggcaaatgaaagctcacatctggatcctcttggacttcaagctacataccttttccctttgttgattttcatctgcatcttttagccataacaaatcataaccatgagtttaacagcttttctcttaagttctatgagtccttcgagcaaatcatcaagcatgatgggttggtcttggggattcccaacgcacactccaagaaatctacgtgccccagcaaaaagtcctaagagatggtagctcataactaccaacatttcggactccaactttttcaaacacaggcatctagtcactaatttttgtatttttagtagagayggagttttgccatgttgaccaggctgatcttgaactcccggcctcaagtgatccgctcacctcggcctctcaaagtgctgggattacaggcatgagacactgcgcttggccctcaacatgttattaatataatagttattaactttttttttggtgagcgataataaatgttattgtctgaagccactaaggtttttttttttttaatttttaaaaaagttgtaaaatacacataacaaaattcactatctttaccatttttaagtgca

SEQ ID NO: 551894 - DNA, 1161 bp, Homo sapiens
ttgtattgttataaaaagtaraaaatagcagtacatctcctcaaattaagaatatatcatttgtaatgaaatctgtaagatatattttaggagaaacgtacaaatacagccttatctccatagcacagttggatgacctcagagccatcatgcatgagctgtttgatgatggccctcctagacattccaaatctctgcttctggttgccactgtccacagtggtgagagagaatacccatttgtgtgcttgccaatgaagatgaggtttagtggaataaggcgtctccaccacagatggttaagagtgattcacaaaagaaatactttggcctggtcttctctttagtgaatcaacaccaaccattacaatcggatggtttttaagaatattgcccataaaggaacacagaaaaaaaattatagctatattttaggcacctagcaaagtacttggtacattgtgagtggcagacaaatttttgtcaaaataagttgaattgttcttaactctgattttttaaaaaacaaataaggactatgtaaattcagtaactgacataggtgagtgttctatgtttggtgaatggataagcatataaatggagataaaagagtctttttttttttttttttgagacggagttttgctccagtggtgtgatctcggctcactgcaatctctgcctcccgggttcaagcaattctcctgcctcagcctcctgagtagctgggattataggcatgtgccaccatgcccagctaattttgtatttttagtagagacagggtttttccatgttggtcaggctgatctcgaacttcagacttcaggtgatccacccaccgtggcctcccaaagtgctaggattacaggcatgagctactgcacctgacctgataaaagagtcttaattaatttacttaaatttgttctgatcatactagtagatactctccttacataagaaaacattttagagagtagcaacattgttcaaagctgtaataatcatgaggtagaaacgtcatgactttgaaaatctctaaatacttgaaacaaatattagcaagaaatttataagagctgtttatactctttatgattatatacctatatatgatataaaatgtgattaccttattatatatggttttatgca

SEQ ID NO: 551895 - DNA, 1161 bp, Homo sapiens
ttgtattgttataaaaagtagaaaatagmagtacatctcctcaaattaagaatatatcatttgtaatgaaatctgtaagatatattttaggagaaacgtacaaatacagccttatctccatagcacagttggatgacctcagagccatcatgcatgagctgtttgatgatggccctcctagacattccaaatctctgcttctggttgccactgtccacagtggtgagagagaatacccatttgtgtgcttgccaatgaagatgaggtttagtggaataaggcgtctccaccacagatggttaagagtgattcacaaaagaaatactttggcctggtcttctctttagtgaatcaacaccaaccattacaatcggatggtttttaagaatattgcccataaaggaacacagaaaaaaaattatagctatattttaggcacctagcaaagtacttggtacattgtgagtggcagacaaatttttgtcaaaataagttgaattgttcttaactctgattttttaaaaaacaaataaggactatgtaaattcagtaactgacataggtgagtgttctatgtttggtgaatggataagcatataaatggagataaaagagtctttttttttttttttttgagacggagttttgctccagtggtgtgatctcggctcactgcaatctctgcctcccgggttcaagcaattctcctgcctcagcctcctgagtagctgggattataggcatgtgccaccatgcccagctaattttgtatttttagtagagacagggtttttccatgttggtcaggctgatctcgaacttcagacttcaggtgatccacccaccgtggcctcccaaagtgctaggattacaggcatgagctactgcacctgacctgataaaagagtcttaattaatttacttaaatttgttctgatcatactagtagatactctccttacataagaaaacattttagagagtagcaacattgttcaaagctgtaataatcatgaggtagaaacgtcatgactttgaaaatctctaaatacttgaaacaaatattagcaagaaatttataagagctgtttatactctttatgattatatacctatatatgatataaaatgtgattaccttattatatatggttttatgca

SEQ ID NO: 551896 - DNA, 784 bp, Homo sapiens
caggaggcggaggttgcagtgagctgagattgtaccactgaactccagcctggggtagcaagactctgtctaaaaaaacaaaacaaaacatgtactttaagtgaattgaattgttattcaaaaatctatttacaatctctaggcatgttttaccctccttgaaggaacaggtgcctatttctgttaagctagaatcatagtatctaaacaaaacaatagcaaaataaaaagaaaaatatagataaatctcatttgtattggcctgttttctgttgcttataacagactatttgaagatatcttaaattccttttaaaaagtaatttatttcttacagttatgaaggctgagaagtccaagttccagggtccacatttgttgaaaactttcttgctggtgaagactctttgcaaagtttctaagcaacacagggtcacacatggcgagggggccaagtgtgtttctcaggtctcttcctcttctttatgaagcagttagtctcatttccatgataactgattaatcaattcatctattaatccataaataaattaatctrttcatgaggtctctgccctcatgacacaatcacctaaggctctagctttcaatgctgccacattggggattctcaaaccataacatcacttgagaacatatatgcaaaaacacaaaaatgcataacttttatgtatatacatacaagtcagcctaacaatatgttttttaaagccatgaacatgtaatgtttatcataaaatgcagaggtttaaaaataggaaat

SEQ ID NO: 551897 - DNA, 518 bp, Homo sapiens
cctgaggggtttgaggctgagtggggtccacttggaggagtctggtctgaggcccactggcttcctgccactccgggtcctttcttgggactcagtgcaagcccaggaggaagccagtcaggcccaaaatcagccataggagttgggttggtcatgagccacgtcctggagcaaaagtcctccttgggagggaggggtagatgttggggctagagcttcccatgcatcagagccagagggcctaccgcccacgtgcccagccccgcgtctgctagacgataaggtgggcctcccccggtgccaacaaccgwgtctcaggagggcgggctgggagccctggggcttccccactgatcttgaggttttctcatctccggccttggcctcatccctttcaggaattgccgtgtgcaacatcccgtctgcagccgtggaagagacagcggactctaccatctgccacatcctcaacctgtaccggaggaacacgtggctgtaccaggcactgcgggaaggca

SEQ ID NO: 551898 - DNA, 553 bp, Homo sapiens
tgaaggaactgcactgcagtccttgctactccttgccttcctcactggactgcacgccacttggggacagagaccgtgtcatattcatttatatccccaaagctaagcactgggcctggtatactgtggacactcatttgttgaaataaaaagcaataacattaaaatgctaattactactaaagattaatgtaccttgtagacagagagcagctaattccacagctgtttcataagggcatttcaatcttgaaaaaaataaaatgaaattaattcgaaataggaacttaagtacaaccatacaaaatgtcattaaaatcatttttcaaaaggtagcgmtatttagataatgacttgtattcttagtcatatttttgctgtctacattaaagaatgcaacaagcgacttgcactacaaatttcccaaagtcaattctcatcatagggcaaaataacccaatgtaggtatagtttctatcaatcgtgtacaattttactgaatttggcaagaatggaaaagtttggaaaacagaatgaaaagtattccctttgc

SEQ ID NO: 551899 - DNA, 3396 bp, Homo sapiens
tctcccaccaagctatgggggcaaaacaaaacaaaacaaaacaaaacggaaaccagttcagtatggcgtgaagaattctcattaggatttcaggaggcctgagttttgatttcagctccgtatgtacctgataaggtgagtgagcctgggcgagccacctccgactccctgccttggagccctggtagggaatcaaacagatgttgattttagggaggctctgcaagttctgccaataaagaattaacaatagaatgttccctcctctccagggactcaggcaggtcttggtttaagtctctcacttgccatgcagccttgggtaactttcttcccctctctgggcctcggttcctcttgtgaggtatgaggtgtagggcttagggtggggggagtgaggataacaggccccagggacgggggtgcccaaacagggtggggtgaggccagagtgggccagtggggcctgtgccagctgccgcagagcaatgaaaagctcttaaccacacagaattgttaacagctcccaaatcctgttgtaccasaggcttagaaaggcttaaactgttaaatgcataaacttcctcaatcaacgggcctctcttgccagattctaaagcccagccagatgaaaaggcagtggctggagggcggggaacttcccagctgtttatggtcctgctggagtgatctggaggcagcctatgtgttttcagggtccagatgagccagtctggggccgagagaggacagtgcagggctccagggtcagatgccctgggttctaaccctacttcttcctagctgggtcatcttggacttttcccctcaatttcctcttctgtgaaatagggatgaccttatctaaccctgtagggtgactgagggccagtggatactgcttgtatcagaagaaatcagaagtggaaggcacaaaggcatagacctgtccctgccacctaagaggggtgtgacattggccaagtctcagtttcctagtctgatgagaggattcaaggaggtgactgggcaggaacggcccatccgggtgagcatttggtatgtgcggtgtgggacagactgggggcttttctctctagccagaggtcagccagggtggggaagcctccttccctgaggcttccttattcccgagccttcgtcctgggactgtgttccatcctgccttgcatcgcttgataggaaagcacctcgtcattcaaggcccagacccgggtctcctcctctcccaagaagccctcctggttaccccagtagggtcagccccctctttcctttgaggtcccacagtcctaaacatgagccccttagccggttatctgccaagctcttttcacttccaccatctcaggggatcctccgtcatctggaggtaggcaggccagggtgtaatgtttccatttcccaggtaagcaaactgaggttctttctatcacaccctgctggtcactctccatagggtctacaggattgggactcaatgaccatgtggataagacatgggcctcaggtataaaaggtgagtacattcaggtataaaaggtgagtacatctggacaacttattaatctcttcaggctaataagttgtcccagcaagctgcagaaagccaggttcaaattctagcttggctacttagtggctgtgtggccttgggcagcttgatgaccctctctgggcctcagtctcatcatttgtaaaatagagctaataataccaacagaagtttcaataagataatggaagcatagcatataccacagtgcggaacacacaggtggcacctttcacctccctgtctcgggcctcctccaggcctctcaggactaccctcagcctgcgagggcagtagaactgaaaccctggcagcccttccaccatcctcccttggccaagaacacctttcttctgctcttccctggatggctgcaccttgtctggggataagcaagaggctagggtttaaaaagaaaaaaaccaccaccatttccaaccatttttttcctggactaattgccctttcagcccttggttcttctcatcctccaaagccctgggaaaatggctcctcctccaggaagccttcttggctctctccccattccctcctaagcaccccaagtctgtagttatggatagagctctctcctgcgccctagactggcagcccgagggacggtacggagggccttcagcatctgggcagctcccacacctggcctaggaactggtacacagcaggtgtcctggaagtggtatttgagtgaaaaatgaatgagctgttctgaagcccaaattgtcccatatttcctacccagatcactaggaatttgaagaccagagagaaagaatcatctcatgtcctgagatccagaaccttccatttagctgactcagagaggagagaggactgaggtgactgacccccacccttcccaggagcatgcactctggctgcctccaggcctttccacctcctcctcacctgcctaactcttgctcctcgctcagcttccaccgcagtggcccctcctcctggaggccgtcctctgaccgcctgttcctggctgacgctcccctggatgggctgggtgcctccgtcagcttccacagaccctccctgcctgctctgctttcctcagcacaaccccagtccccctgcaccttcactgtctgtagatgtatctgtcaccatctctaggctgggtgggccttgggggcaggggtcatcatggccatttccaaggccccctaatgcctggcacatgacactcaacaagtgttagcttcctggtcctcaatgaagacatcactgagccctccaagaagaagaaaaatcaagagctgaatgatttcagtggatgtctgatggatggatgtatcatggacagatggatggatggatggatggatggatggaccaatggatggataggaaaggggaagttggggagggtgtagaatttttcctatttttaagagcaaaggcctgaatcacttgagtacattggccagggtccctatctaattcccttcacaaaaggctggcctgtgtggtctcagccctggcctgagcctgggggtctgcaggagttgtctgtccccgctccttctccctcaactgggtgtctccaccctgtccttgaagagaagcagcagaatttctatgtgggggtctgggcctcccctcccacccagcattccaaccctcacacccttccccagtcagcatagcacaggctgccagctggcggcctccctcccagagcccaccccattgaccgcaccccacccccgcagactcccccagacacttctgggccactggtccagcctctgtaagaagggctcgagctgaaagcagggtgggaagga

SEQ ID NO: 551900 - DNA, 630 bp, Homo sapiens
tttttaaatatttttagtagagacggggtttcaccgcattggtcaggctggtctcgaactgctgaccttgtgatccacccgcctcggcttcccaaagtgctgggatcacaggcrtgagccactgcgcctggctgttgtttttaagagacaatgtcttgctctgttgcccaggctggagagcagtggcgcaatcatagctcactgcagccttgaactcctgggctcaaacaatcctcccacctcagcctcctgagtagctgtgaccacagatgcacaccactacacccagctaatttttaaaaattgtgtagatgcaggtcttgctatgtcacccaggctggtcttgaactcctgggctcaagtaatcctcctgccacgggctcccaaagtgcttctatgtttcctttgtgcatgtcatgcacaggtttcatagactcatagcctgtggaggttggaagagactttaagggtcatcttagctgacctaactgtgacctctgcgactccctaaacagaagacctaagcctgggcatgaatgcatccagagacgggagctcatgactcacagtgacttctacctgctgctctgtcctctggagccacacagtacaagttgaattcatcttttc

SEQ ID NO: 551901 - DNA, 630 bp, Homo sapiens
tttttaaatatttttagtagagacggggtttcaccgcattggtcaggctggtctcgaactgctgaccttgtgatccacccgcctcggcttcccaaagtgctgggatcacaggcatgagccactgcgcctggctgttgtttttaagagacaatgtcttgctctgttgcccaggctggagagcagtggcgcaatcatagctcactgcagccttgaactcctgggctcaaacaatcctcccacctcagcctcctgagtagctgtgaccacagatgcacaccactacacccagctaatttttaaaaattgtgtagatgcaggtcttkctatgtcacccaggctggtcttgaactcctgggctcaagtaatcctcctgccacgggctcccaaagtgcttctatgtttcctttgtgcatgtcatgcacaggtttcatagactcatagcctgtggaggttggaagagactttaagggtcatcttagctgacctaactgtgacctctgcgactccctaaacagaagacctaagcctgggcatgaatgcatccagagacgggagctcatgactcacagtgacttctacctgctgctctgtcctctggagccacacagtacaagttgaattcatcttttc

SEQ ID NO: 551902 - DNA, 664 bp, Homo sapiens
tgcagacttttccccagccctttgacattctggacctcatctctcttgaaacycttggcccagccctggactagccaatgccagtggggagccttggaccagccaatgccggagggcctgagcacacaaagcagaacaggaccaccccttcccttgccctaaacactccaaataagctttatcagatgctgagtcactgggctgattcatagagaatgcatcatcttcttggcaggtgctgctgtttgatcctctgtctcccattatggacttacacagctgggtttggggcattagcttgatttattttcttggagagtcagagccatggggagggccagggagggatgagtaaagacccttgcatttatctgtttatctatgctttgtgcaccatctctggctgcctgaatgtctctggggctgcttcgctacgcagtgtccttattacacatccccaaccagcctttgtctggctcagcaccacaagcaggacagctcagccagcagtctgatacagctggaacaaactaggaatgggcaagagcagtatcctgtggcctgtgattaagaatcactctcagatgggcatggtgactcacacctgtaatcctagcactttgggaggctgaggtgggaggatcacttgagtccaggagttcaa

SEQ ID NO: 551903 - DNA, 664 bp, Homo sapiens
tgcagacttttccccagccctttgacattctggacctcatctctcttgaaacccttggcccagccctggactagccaatgccagtggggagccttggaccagccaatgccggagggcctgagcacacaaagcagaacaggaccaccccttcccttgccctaaacactccaaataagctttatcagatgctgagtcactgggctgattcatagagaatgcatcatcttcttggcaggtgctgctgtttgatcctctgtctcccattatggacttacacagctgggtttggggcattagcttgatttattttcttggagagtcagagccatggggagggccagggagggatgagtaaagacccttgcatttatctgtttatctatgctttgtgcaccatctctggctgcctgaatgtctctggggctgcttcgctacgcagtgtccttattacacatccccaaccagcctttgtctggctcagcaccacaagcaggacagctcagccagcagtctgatacagctggaacaaactaggaatgggcaagagcagtatcctgtggcctgtgattaagaatcactctcagatgggcrtggtgactcacacctgtaatcctagcactttgggaggctgaggtgggaggatcacttgagtccaggagttcaa

SEQ ID NO: 551904 - DNA, 1252 bp, Homo sapiens
gcacctgtcatgacctccgggacagccccacactggctgtcaccagctgcatgtgtttcacagtctggacactgacaggtgctctggggagctcagatggctttctggaaagcttcccagtccccagcggtcttccattctgggcggacctgcatcccaaccagacaccggcagctgcggctgtacaacacagatgtgtgggctgacagcagaacacagcagacatggggccaaagctgggggtggcagggtgacccctcctggaccgaggtgggagccgagagcctgatccccggatacacccctgtctaaccagaactcaagtctggggcctcaggcttggataccccaccccgacccctccacaccccaccaggcactttctcactctcgctccttcccttccctttgtgcccaccggacccacgcggaccctcgtgcagctgtcctcctcccagacttctgcctacccgctgcactgactgccaaaggcacaaatcaggtttcatcagaaaccaccaacccctgagccctgctggctcggtctgcagaatccagtccaaatgcctgatactagggagcatagcctcacccccccatcacctgcctctcaccactggggacagagggtgcccagctggtggcccaccaaccccacaagaactgtgggctcaaggggtgcaggtgtgcacaggtaggtgtgcacaggggtgagcagtgtgggtgtgcatggctagctgtgtgtgtggggtaagaggtgagggatgtgggtgtgcacaggtagatgtgtgtacaggggtgggggtgtgagtgcacaggggtgagcagtatgggtgkgcatgataggtctgtgcacagcagtgagagctatgggcatgtatgggtaggtgtgcacaggggtgagtggtgtgggtgtgcatgagtagggtgtgtataacgaagatgcaggcatgcatgggtaggtgtgtacagaagtgaggggtgcaggcatgcacgggtaggtgtgtgcaatgggtgaggaatgtgggtgtgcaagggtaggtgtgcacaatgggtgaggggtgtgcatgtgcaggggtaggtgtgtgcaaagggtgaggggtatgggtgtacatggtatatgcatgcagagggttaaggggtgcagagaggcaggtgcggggcagagggcctggcagtggccctgtgtgctcaccccatccgcactgcctgggcctacctgttcctggtctccggtcccccttctccggcc

SEQ ID NO: 551905 - DNA, 535 bp, Homo sapiens
cgactcactgcaagctccgccycccgggttcacgccattctcctacctcagcctcccgagtagctgggactacaggcgcccgccaccacgcccggctgatttttttgtattttaatagagactgggtttcaccgtgttagccaggatggtctcgatttcctgacctcgtgatccgcccgcctcggcctcccaaagtgctgggattacaggcttgagccactgggcctggccctagagtggttctttcttcctcacgacgagctccccaggtccgtcccagcgcacccgtcacccgcagccccttctcccggcgccccgcagcctaacttgccgcgccgccgacccctctgtgggtgcagctgagcgacggcccctcaggaccccacctgtccctggcgagagccaagtccgtcttgctgactcctgaatcccaaaacctcgcccgcccctaactcgtccccattcctgggggaaggagctgcggggaggctccacccctccctcgcaggccgcatggagtgctcccctcctttgt

SEQ ID NO: 551906 - DNA, 535 bp, Homo sapiens
cgactcactgcaagctccgccccccgggttcacgccattctcctrcctcagcctcccgagtagctgggactacaggcgcccgccaccacgcccggctgatttttttgtattttaatagagactgggtttcaccgtgttagccaggatggtctcgatttcctgacctcgtgatccgcccgcctcggcctcccaaagtgctgggattacaggcttgagccactgggcctggccctagagtggttctttcttcctcacgacgagctccccaggtccgtcccagcgcacccgtcacccgcagccccttctcccggcgccccgcagcctaacttgccgcgccgccgacccctctgtgggtgcagctgagcgacggcccctcaggaccccacctgtccctggcgagagccaagtccgtcttgctgactcctgaatcccaaaacctcgcccgcccctaactcgtccccattcctgggggaaggagctgcggggaggctccacccctccctcgcaggccgcatggagtgctcccctcctttgt

SEQ ID NO: 551907 - DNA, 535 bp, Homo sapiens
cgactcactgcaagctccgccccccgggttcacgccattctcctacctcagcctcccgagtagctgggactacaggcgcccgccaccacgcccggctgatttttttgtattttaatagagactgggtttcaccgtgttagccaggatggtctcgatttcctgacctcgtgatccrcccgcctcggcctcccaaagtgctgggattacaggcttgagccactgggcctggccctagagtggttctttcttcctcacgacgagctccccaggtccgtcccagcgcacccgtcacccgcagccccttctcccggcgccccgcagcctaacttgccgcgccgccgacccctctgtgggtgcagctgagcgacggcccctcaggaccccacctgtccctggcgagagccaagtccgtcttgctgactcctgaatcccaaaacctcgcccgcccctaactcgtccccattcctgggggaaggagctgcggggaggctccacccctccctcgcaggccgcatggagtgctcccctcctttgt

SEQ ID NO: 551908 - DNA, 526 bp, Homo sapiens
gaccaggcctgggcctgtcttgccagcttaagggcagtgtccgttcccactgctgcccctcatccactgcacgtccttgccgtccttgaggcccagggagctgggaggggggcaggaggagtgttgtccttgtgtacaggtggggaaactgaggccccaccccaaaggcctgcgtgagaagcagagctgggacaggagctgctctcctcgttctctgcaattccccacccccgtctgggcctcagcttccacgtgaagagcgtggggagcacagtactcccagggtggttggaggatagaaatgacccatatgggttgaagagctggtgtggcagttgaacagccccacagagatgtccacatcctaacccctggaacctgtggctatgtgaccttacagggtcaaagacactttatagakgggcttaaattaaggctcttgagaggaggagtggagcctggatgaggcatgtaatcacaaaggtcctgagaaggaagcaggaaggtcagagtcagagaggagacg

SEQ ID NO: 551909 - DNA, 539 bp, Homo sapiens
agatactattgaagtttgaaataatattttatagtcagtggcatttgcacatcctaataccaaaatctagattagacaaactcacccactttattagttaggataggctaattgctgttacaaggaggccaaaaatatataatggttccaacacrtagtagatttattttctgttcattaaagctggagagaagctgcacagattggtgaggccatcttattccagtataaaaatggtattatcttcaacattgagcttctaaattatcctggccatcctctccatgtcagccagcataagaaagagcatatgaaagtttcttttttgttttctattgtttattggggttgagggtgctgaaatgttgcatatcaattttattcacctctcattacaaaaaaattattcacaccatcattcctaatgagaaaaaaaagctagaatttcaacgtatagtgtgtgtgtgtgtgagcacgtgcgtgtgcaaaggaaaagaagaatatagatatcgatgagcatttgaaagtttccaccacag

SEQ ID NO: 551910 - DNA, 552 bp, Homo sapiens
atgtgcaccaagccatcagtattacatcaaatcagtgattttctatgctctttgagaatagtcctaactgtactgcagcctcatataacatgcattagtcaaatcagaaaaatacattgcaataaataaaaaggcaaattgcaaaaatagtagtgtaacagcatgaaaaaggagagaatagttgctcattcaggtgttggcagcaaatttcggagtctaccaatttacttttctatcttaaaataattttgttgcctagaatattgcctaatgtatttaggtgctcaatacatatttgttaaatggatmaatgcattttcaggcactgccagtactcattctacaaccttgctgaaattataattacttccttggagtaataatggatttacggaaatgaatcccaaactttcgaacttggttttagggcaatatgaggcttactttttagagttgagtgagataagtgttatcctcagggtgttctttatctaatcttatttttgtttgatggctttgtttgaaattagtctgggtataggagtaataagt

SEQ ID NO: 551911 - DNA, 637 bp, Homo sapiens
gaaagctagacagtgaagactgcagccatcaggaggccttgcaaggaggaagtttccttttgatctgtcaggtatggtctatgctgtgcagaaaacagagaggagacaggaacttctcttccctttttagctgcatttggatttagcaggcattaggatgtaactggcttagtcctaccttttgtaaattttatatgtctagtgttttttgagcacctactatatgttagaccctttatataaattaattcagccaatccttgcctacggaggacaaggaacctaaggctcacacaagcttagtgacttggtcacaaccacatggttggtaagtggtagagctcagctgtaaacaggtccacgtgattgaaatgtcattgttaccactgcaccccccacctcactactccactctggaacccaaagatgctccaaacagagcttcccactgctgtgctgtgctgccaatgggctacagctatggcaccactggggcatacctccccaacaaagtcacctgctgcaggccagatcacctacctactcccatcctgcttggatctcatgggggcctgsggactttctgcttcccctagggcagccagttaaataaaggaagcctccctcctatggccca

SEQ ID NO: 551912 - DNA, 637 bp, Homo sapiens
gtcctgtggtgtctacagtagaataaacagtaaagccttgtacttcaataatagatcctccaggggaaaaaattattctaagtggatttatgtgtagagatggttttaagtgatgttcctatctctttagcactaaatcagtggcagtaactattgaggaggaagcaagaaagaagccaagatccacagtggctgcttccaagtkgcatatggactagttgcttgtggcagggagagacatgggttccgaaatccagtctgttctttggaggggcctgaccatggctgtgactccacggtgctattctagatagattaattcagactttgcttggttttgcatcctaagattgcgttatagaaagaggagaatgaaggccaggcacggtggttcacgcctgtaatcccggcacttgggaggccaaggcgggcggatcacaaggccaggagatggagaccatcctggctaacacggtgaaaccccgtctttttactaaaaatacaaaaaattagccaagcgttgtggcaggtgcctgtagtcccagctactcaggaggctaagtcaggagaatggcgtgaacctgggagtcagaggttgccgtgagccaagatcacgccactgcactccagcctgggt

SEQ ID NO: 551913 - DNA, 659 bp, Homo sapiens
cttacagggtaactgcagggagataggttataatcatgctgtcttagcccctgtcaacatgatttattgtttcagctactggaacraacagagatgatgatagatacaaaacagaaaaaattaaaaagaaacattacagaattattttctggatttttttgccttaataactaaatttcccaaaaacattcagtttcctatcactgaataaagaatgcattcctcgatatttaggtagaaccaccacataagttaatgtgttattaaaatcagaaaaacccagccaatcatattatttttatcaatgcaagtcaaaattgaactgtgcggacttgtattttattgtgaccacattctaagataaaacagaataataaaactcgacattcagtttgatagaaaaaaactaatgggtttattaaacttcagattaaaaaaatcaaaaaataaaaatgtatttaaaaaacccttttttgatttatttttgctgtttgaaaggatctgtttctctggtctactgataagcaatgggttatataatatttatatgataaatatgagttgtaagtgtgagttgtaaatagtgtatcagcatttttcaaatctctacaaacacatgcccatgacacatcatgttaattttttttttttgagacaaa

SEQ ID NO: 551914 - DNA, 1256 bp, Homo sapiens
gcataagaaagcaaaatagtaatctggatgcaaaattcctgacttggacttcagctcttttaaagaagtataaagtctgtcataagtagtgagaaagccacttaggcctatggactatgtggatcatctctggaatttggaattaatttctgtaccaatagcttttagtcataaaacacatttatagastctggagtccaatatacaagaacttgagtactgactctttatttattatgatttttctttctctttgtttccttctctgtaaaacaggaataagacaacatcgctcatgctatctttgtgaatattataaatatgttaaatcacctaacacacagtaaacagccaattaatgttagcaaggatgtgactcaagagtaatattgttttttcaaatatttacacattgacataagatgggagcttagactggggctcccaaagagggatcctagtctgccttgaggtcaatgttaactcattggctgtgatcacactccatgcaattccctcttcctcataatcacactcttacccaaagttgtaggaaggaagagataaaaaacaaaaacaaaaaccagaaaccagtcagttgatttagttgatctagaatagaagtcaactattcaatagcatgtcaccagatgtatgccactgaatccagaatttcatggctagaatcactcatgtcactggaactgaaagtgactagtgtctgttgagggaaagggtgaagattagggacgtgggtttctgggatgggatcctgatttggattcaccagcttttgccttagtcttttcctgagctcttgctttttctcttcatgcattgtgcttgcatctctaggggcacaagaggttatctaagctctaaaactttcatggaaaatttctttggatcactaaaaggaagagctgctcaagcataaaatgagccacctcataaagtagtgagttctctgtttctaaatgtgtgtgaatagaggctggataattacttcactcaggcatcagaaaggaatatgtacgggcaataatggataaagaatttcccaggatggaattctatgattccagtacatcagtgagcattatgctatctacactgattcatggcattagcattttaaaatctgaattgacagaatattatttaaaatatatttaatattgacatataatctttctatattttaaaaatagccatagagttgttttcactagttaagctattgtatactttaacac

SEQ ID NO: 551915 - DNA, 1256 bp, Homo sapiens
gcataagaaagcaaaatagtaatctggatgcaaaattcctgacttggacttcagctcttttaaagaagtataaagtctgtcataagtagtgagaaagccacttaggcctatggactatgtggatcatctctggaatttggaattaatttctgtaccaatagcttttagtcataaaacacatttatagagtctggagtccaatatacaagaacttgagtactgactctttatttattatgatttttctttctctttgtttccttctctgtaaaacaggaataagacaacatcgctcatgctatctttgtgaatattataaatatgttaaatcacctaacacacagtaaacagccaattaatgttagcaaggatgtgactcaagagtaatattgttttttcaaatatttacacattgacataagatgggagcttagactggggctcccaaagagggatcctagtctgccttraggtcaatgttaactcattggctgtgatcacactccatgcaattccctcttcctcataatcacactcttacccaaagttgtaggaaggaagagataaaaaacaaaaacaaaaaccagaaaccagtcagttgatttagttgatctagaatagaagtcaactattcaatagcatgtcaccagatgtatgccactgaatccagaatttcatggctagaatcactcatgtcactggaactgaaagtgactagtgtctgttgagggaaagggtgaagattagggacgtgggtttctgggatgggatcctgatttggattcaccagcttttgccttagtcttttcctgagctcttgctttttctcttcatgcattgtgcttgcatctctaggggcacaagaggttatctaagctctaaaactttcatggaaaatttctttggatcactaaaaggaagagctgctcaagcataaaatgagccacctcataaagtagtgagttctctgtttctaaatgtgtgtgaatagaggctggataattacttcactcaggcatcagaaaggaatatgtacgggcaataatggataaagaatttcccaggatggaattctatgattccagtacatcagtgagcattatgctatctacactgattcatggcattagcattttaaaatctgaattgacagaatattatttaaaatatatttaatattgacatataatctttctatattttaaaaatagccatagagttgttttcactagttaagctattgtatactttaacac

SEQ ID NO: 551916 - DNA, 528 bp, Homo sapiens
ccaggagtttgagaccagcctgggcaacatagcaagactggtctcttaaaaaaaaaaaaaaaaaaaaaaaaattggccgagcgcagtggctcacacctgtaatcccagcactctgggaggccgaggcgggcggatcatgaggtcaggagatcaagatcatcctggctaatgcagtgaaaccctgtgtctactaaaaaatacaaaaaaaaaaaaaaattagccaggcatagtggcgggtgcctgtagtcccagctacttaggaggctgaggcaggagaatggtgtgaacctgggaggtggagcttgcagtgagctgagatcgcaccactgcactccaggctgggcaacatagtgagacccccccmccactccacacacacacacacacacacacacacactattcaaacagaatattcatgtaatacctctccaaggacttccagcacaaggctacattgtaattcagagaagacatttcaggaggggctgagacaatattgtccaacaactttgttgatgataaaata

SEQ ID NO: 551917 - DNA, 922 bp, Homo sapiens
acatccaactctgaaaaattaaaatgttaataatttttatgaataattgcctaatatacacattcttgggtttaatttgaatactgtactgattatacaagcctttgaataattcatatgtagaccatttgtttttctcatttcaaagttttcctgatggatccctataacaagagaaaaattgttctattggggccccaggtccaagaacaaaggacaaatttaaattaatagtaaatgatggttgggtgcaatgtctcatgcctgtaatcccagcacattgggaggctaaggagaaaggytttcttgagcccaacgtctgaggctgcattgagctgagatggtgccaatgtattctgccttggcaaaagagcaagaccttgtctctaaaataataataataaagaatggtcatgtcatttttatagaaacctagaatcatgtcatttttatagaaacccagaacctagctgaaaaattgaccttttttgcccatatatatctgttactatatagtagacaggattatttcaccagtggagaaagtgtgatgttggctaattaggatggtatctttacttgggaaagaatagaacgaaagagaggatagcggattaattcctgaatcaagagatagtgacaggtccggttataaacactcataacattgactgacccatgccgaaaggtatattggtctttgtgatagctaactctgtgtttcaacttgagtgagctaagggatgcccagatagctggtaaacaaattatttttggatgtgcctgtgaaggtgtttccagaagagaatagtatttgaatcggtagactgagtaaagatgatctacctttgccaatgtggctggaatcatccaagccactgagggatggaatagaaaaaagaggtaaagaaaggacacattc

SEQ ID NO: 551918 - DNA, 1004 bp, Homo sapiens
taaataaataaaataattcttggaatgttttttcttctatatcccactatccttggtcagatttttttcttatttgtgttactgtctattaaatgtattttctcttaagctgagacacagatctcttaagactgatggtttagaatatagcagaccatatttttatgctgctttagactcttgtccaggtgaaaaaatttttaataaatgttgtgaacttctgataacaatctctattttgtttagatacatctctttttataattaaaaagtagtcagatactaagcaaaaacagaagaacaacaacaaaaccccacagctactaaaagatgaagagacattgaattgagaattaagcaaaacccttgcaggcagcaggacaggccagagctgaagaagctgggagtggtgargtgcccctaggggacactgacagagccttgaacccactggtgcaggaggcagggatgagtgaagcctgtctctgtcttcaagattatggtcccacagtcctctctttacctcatacgcattgcctgattttgaagagttaaggtttccttgaagcacaggtgcctcaacctctataccacgaaagacacctctacagattctaagaatcaccttacacatgggtgccatatgttttacctggggccactgttctttaatatcatcccttccctcaggtttccatctggattccacaaaagccacccttcctgaagttggtccctctcaccggatttatccgaagacctcctctctcattttccgaccattcctttaggtctgcctctaaacaagaggccaagcttgaaattcaagtgtgaaacaaactcctggcaaaatggcagtatcttagaaggtgtgagatattcttgccttccaggaatagttgcatttaaaaagacagatgaggccaaggagggcagatcacctgaggtcagcagttcgagaccagcctggtcaacacggtgaaaccccctctctactaaaaata

SEQ ID NO: 551919 - DNA, 1004 bp, Homo sapiens
taaataaataaaataattcttggaatgttttttcttctatatcccactatccttggtcagatttttttcttatttgtgttactgtctattaaatgtattttctcttaagctgagacacagatctcttaagactgatggtttagaatatagcagaccatatttttatgctgctttagactcttgtccaggtgaaaaaatttttaataaatgttgtgaacttctgataacaatctctattttgtttagatacatctctttttataattaaaaagtagtcagatactaagcaaaaacagaagaacaacaacaaaaccccacagctactaaaagatgaagagacattgaattgagaattaagcaaaacccttgcaggcagcaggacaggccagagctgaagaagctgggagtggtgaggtgcccctaggggacactgacagagccttgaacccactggtgcaggaggcagggatgagtgaagcctgtctstgtcttcaagattatggtcccacagtcctctctttacctcatacgcattgcctgattttgaagagttaaggtttccttgaagcacaggtgcctcaacctctataccacgaaagacacctctacagattctaagaatcaccttacacatgggtgccatatgttttacctggggccactgttctttaatatcatcccttccctcaggtttccatctggattccacaaaagccacccttcctgaagttggtccctctcaccggatttatccgaagacctcctctctcattttccgaccattcctttaggtctgcctctaaacaagaggccaagcttgaaattcaagtgtgaaacaaactcctggcaaaatggcagtatcttagaaggtgtgagatattcttgccttccaggaatagttgcatttaaaaagacagatgaggccaaggagggcagatcacctgaggtcagcagttcgagaccagcctggtcaacacggtgaaaccccctctctactaaaaata

SEQ ID NO: 551920 - DNA, 1004 bp, Homo sapiens
taaataaataaaataattcttggaatgttttttcttctatatcccactatccttggtcagatttttttcttatttgtgttactgtctattaaatgtattttctcttaagctgagacacagatctcttaagactgatggtttagaatatagcagaccatatttttatgctgctttagactcttgtccaggtgaaaaaatttttaataaatgttgtgaacttctgataacaatctctattttgtttagatacatctctttttataattaaaaagtagtcagatactaagcaaaaacagaagaacaacaacaaaaccccacagctactaaaagatgaagagacattgaattgagaattaagcaaaacccttgcaggcagcaggacaggccagagctgaagaagctgggagtggtgaggtgcccctaggggacactgacagagccttgaacccactggtgcaggaggcagggatgagtgaagcctgtctctgwcttcaagattatggtcccacagtcctctctttacctcatacgcattgcctgattttgaagagttaaggtttccttgaagcacaggtgcctcaacctctataccacgaaagacacctctacagattctaagaatcaccttacacatgggtgccatatgttttacctggggccactgttctttaatatcatcccttccctcaggtttccatctggattccacaaaagccacccttcctgaagttggtccctctcaccggatttatccgaagacctcctctctcattttccgaccattcctttaggtctgcctctaaacaagaggccaagcttgaaattcaagtgtgaaacaaactcctggcaaaatggcagtatcttagaaggtgtgagatattcttgccttccaggaatagttgcatttaaaaagacagatgaggccaaggagggcagatcacctgaggtcagcagttcgagaccagcctggtcaacacggtgaaaccccctctctactaaaaata

SEQ ID NO: 551921 - DNA, 1168 bp, Homo sapiens
actgttaaaagttcataatataaggcttcacttaagaactactggcctgtgacagaatatataaattcttaaatcaaaactaaaataaagttaaacatatttacttacaaaagatcccttaagaacaaaggtggcaaattgttgtgacacattgaaataaggaagaaatggccgtatgcacttagaatgtttatgactctgaaaaaaaaaatcacatacattatccaaatgatgtataagctaccttaggggaaaaaaagttcaatagttaatgcccaagattaacagaaatttacatatactagataacaaatatgagtttatttcacatttttaaagacttttttataatataatatttactgaatgtgtattgtatgttcctagtcaaatgcaaaggtcaatggcgtttcaactggatcaaattttgaattcgtagctaaactgtagagacatatatggcatacagattaattttttgttataactgttttccaactaaaatacatcaaataaaaagcaaaagtaaggatgttttcactgaaaagacatctcatctaaatataactttcgttctcatgtaagaagtaaaaaatatatatatatatgtatgggtgtgtgyatatatagtatatatagatatcaaatacacactaaggtcagctaaatatatgtaacatagttctcacattgccatcactgtttactaaatagtcacaactatgggctgggatcaaaagaagtatgagacataatccctactttaagagattccacagtcacagaatacttatagtacacagttctatttcaggctttgcagaccattaaaaaattactttcataatcagagatttcaatatccatctcttagtaattgatagtacaactagatggacaatcagcaaggatataagagatttgatcaacactaccaaacaacatgccatctataaatgcctccatctagcaacagcaggatgcacattcttttcaagcgcacatggaacactgaccaaactacaccatactctgatccataaagcaagtcctcataaatacaggaagattcaagtcacacaaagtacttttttaaccactatagaattaaatcagaaatgaataactgaaaaccttctggaaaagtcaaaaatatttacaaactatc

SEQ ID NO: 551922 - DNA, 1939 bp, Homo sapiens
tgggccctctgcatctgaaacaaagtcctcactttttgctcgctcactgtgctccggccacactcgcgttcttctgtagactgtggttctgccctccacagggcctcattacactccatgacctttggcaggaatgtgcattatcacagaggactcttcccattacaaggggcagaaaatcaactcagtataagcaaaatgaagaaactggtgatgcaggggtggagatttactggctatttttttttaacctgaaaagtccaatcaggcatggctgggtccaagaagtcaaatgatacctcctcttcccatctcttagctgggttttcttttgcattgacttcattctcaggaaggttctaccatctgagttgaaaatggtcagaggtagctccaaatgtacatcgtgctggcctatcatacttctttgctgatagtttaaacaaaagtccttggtattttcctcttactggggggcctggcttggatcatctgccaacctcctgcccgatcaggagtgaccaggagtggaattcactcattagccatgcctggcttgcatgcccactctggagtaagagcttggggtcagccccacctacatgcactgaaagtgatataggaagctgtttcccaaaggaaaattagagtgtgttaaatgagcaagaggaaaggatgctgggcaagatttaagacaaaaatagatgctcattgcttctcttccttgttctctggactgattcttgcccatccctctaggttccagctttttgccacttacatggagaagaacttcctgatttattgatctaagccaggacctttcaatctctttatttcccttttagctcttaatataataatagctaacatttattgagcactttatttattgagacactgttctgagtgttttacatgtattaataaatttagttctcataacaaccctattaggtagctgttttatgatctcaatattctagtcaaggaactgagggctgttgaagttaggcaactcactcaaggtctcacagccttgcagggatgggatcccagcccaggccatcactcttcagagctcacctctaacaaggctgtctaccttcttctatacatcatcatgcaaggctcacatggcctgacttgcacttccatgtattatcaacataattatttgcttcgtgtctgtctcctccaccagactgaatctcacagaggcaggaccctgtctgtctcatccactgtgggtccccagcactcaatgccctgcacagcacatggtaggacttggtgtcctcacttttccagtgagaataatgagactgcccaaccctgccttccatgcaagggggctttggaaagtcaaatacaaaataatgaagggagccatctctcctcttcccttcttccttgctcactctccctttccttccccctctctcccctccttcctgccctccctcatcctctctgccccctcctgatgccctccctccctcaccctgctttctctgcctctgtgctatactctctcctctacttcccagacccccactctgagcaaattaaacgatactgtggaacctgtttcatttgcatttgctcaggggccttggtgccttcagctgcatgttcattaaatggctccgtgtagagggaagtaatgaaccaattttattacaactgtcatctctgcccatcctagggggcacttacatattcatcaggaaraaagagaaccacaaacctcagctaatagcacttgaagttctgggctgagcagaaggctgcctgaggcctatgctgtgtttgtggtgggggcagggaaggcaaggctgggcacagtcagtgcctgtcaccgcagcatccccataactgtgaatgtcagaaatctcattggctttgaccagggtccaaaattcctgattattgcaaa

SEQ ID NO: 551923 - DNA, 535 bp, Homo sapiens
tcatttttgtgttttgctcacatattcactattgagtgccaactgtgtgacatgcagatgcctacactttggaaagggctcacttggtgatgaaatgaaccagacaatgttgagagaacagtcctccctcccacacactaccgtttgatgaatttgttcttttcttcaaagctatccttcaaccaaagcaacaaatgcacactaaacatatgtattaagatcctccataatgtaatgaaacagggatgccaaaataaaaattatactaatttcttctcggaagtctttcttgactactcccctaccaaatacccttcttctattgagctttaatctccaattcctcttactatttaaaatattatgaatatatttcagagtaatgtgtcatcagagagtgtgtgtgtgtgtgtrtgtatgtgtgtgtgtgtgtgtatgtgtgtatgtgtgtgtatgtgtgtgtgtgtgtgtgtgtgtgtgtgtgtgtgtgtgtgtgtgtgttagtataggggggtggtcaaggaagaaatggcct

SEQ ID NO: 551924 - DNA, 535 bp, Homo sapiens
tcatttttgtgttttgctcacatattcactattgagtgccaactgtgtgacatgcagatgcctacactttggaaagggctcacttggtgatgaaatgaaccagacaatgttgagagaacagtcctccctcccacacactaccgtttgatgaatttgttcttttcttcaaagctatccttcaaccaaagcaacaaatgcacactaaacatatgtattaagatcctccataatgtaatgaaacagggatgccaaaataaaaattatactaatttcttctcggaagtctttcttgactactcccctaccaaatacccttcttctattgagctttaatctccaattcctcttactatttaaaatattatgaatatatttcagagtaatgtgtcatcagagagtgtgtgtgtgtgtgtgtgtatgtgtgtgtgtgtgtgtatgtgtgtatgtgtgtgtatgtgtgtrtgtgtgtgtgtgtgtgtgtgtgtgtgtgtgtgtgtgtgttagtataggggggtggtcaaggaagaaatggcct

SEQ ID NO: 551925 - DNA, 529 bp, Homo sapiens
cccagttacttgaagaataatttttgtaggtgtaaaatttaaggttacagtaatwttctattgatattatataggaattttaaaaaatttctttagacctatctgcccaaatgctattttttctgctaggtttttaaacaatttaatcaatttttaaaacttaaaatttcaactatatttacctatagttacaattggttagaatttatttctagtcgttctatattgttgtattcctaaaacttcacataggtggatggtctctttttttttttaacaatatttgtcataatcttctacattttctttttggtataacatatttttgttatagtatctatctggtaatttcggtgcttaaaatgctttgctttctgattctgcaatttattttaattattgatcaacatttatgtccacttagaaacaaaaattatttcagcagaatcatgtagtagcactgggagcacctttctaattttgaatttgttaaaattttaggattattaattcttaaaattgtttgcct

SEQ ID NO: 551926 - DNA, 529 bp, Homo sapiens
cccagttacttgaagaataatttttgtaggtgtaaaatttaaggttacagtaattttctattgatattatataggaattttaaaaaatttctttagacctatctgcccaaatgctattttttctgctaggtttttaaacaatttaatcaatttttaaaacttaaaatttcaactatatttacctatagttacaattggttagaatttatttctagtcgttctatattgttgtattcctaaaacttcacataggtggatggtctctttttttttttaacaatatttgtcataatcttctacattttctttttggtataacatatttttgttatagtatctatctggtaatttcggtgcttaaaatgctttgctttctgattctgcaatttatttwaattattgatcaacatttatgtccacttagaaacaaaaattatttcagcagaatcatgtagtagcactgggagcacctttctaattttgaatttgttaaaattttaggattattaattcttaaaattgtttgcct

SEQ ID NO: 551927 - DNA, 529 bp, Homo sapiens
cccagttacttgaagaataatttttgtaggtgtaaaatttaaggttacagtaattttctattgatattatataggaattttaaaaaatttctttagacctatctgcccaaatgctattttttctgctaggtttttaaacaatttaatcaatttttaaaacttaaaatttcaactatatttacctatagttacaattggttagaatttatttctagtcgttctatattgttgtattcctaaaacttcacataggtggatggtctctttttttttttaacaatatttgtcataatcttctacattttctttttggtataacatatttttgttatagtatctatctggtaatttcggtgcttaaaatgctttgctttctgattctgcaatttattttaattattgatcaacatttatgtccacttagaaacaaaaattatttcagcagaatcatgtagtagcactgggagcacctttctaattttgaatttgttaaaaktttaggattattaattcttaaaattgtttgcct

SEQ ID NO: 551928 - DNA, 661 bp, Homo sapiens
gggggtcattttattttattttccctttgccagttaaaaatattaaatcataaaacagtataacttcccccatgccaatatatacacgagggaaagtaaatggtatcagtgactgatgagctctgtcactggaagttgaaaattaatggttgcattctatttattcattccaacacattttaagctgtcctttgctcaggttagatgctcagtctcatctaattagctcctcttcagtcagcaatagcatcagaaatgcttaggtttttttggaaggtagatatgttactaatatttgaagactgccagctctgtgccccgtcttaagtttgtccaatttcttgttcagtggccatatggtaagtcatctaggtaattagtctgagtgactrgtttcagggaataaattaatagtattttcttgtatcaggcattaagaacacatacaactttttattttctgatgtataggaagcttatagccaaattttctataatactaaaataataataatcacagtttatgtattatatatatataaaataaaaccctggggttgagaagttttgttttacttttattctgatcatctgagggcaatgcttcttttatatttagaattcttcaagctttggcaattaatcatacattgtaattgaa

SEQ ID NO: 551929 - DNA, 661 bp, Homo sapiens
gggggtcattttattttattttccctttgccagttaaaaatattaaatcataaaacagtataacttcccccatgccaatatatacacgagggaaagtaaatggtatcagtgactgatgagctctgtcactggaagttgaaaattaatggttgcattctatttattcattccaacacattttaagctgtcctttgctcaggttagatgctcagtctcatctaattagctcctcttcagtcagcaatagcatcagaaatgcttaggtttttttggaaggtagatatgttactaatatttgaagactgccagctctgtgccccgtcttaagtttgtccaatttcttgttcagtggccatatggtaagtcatctaggtaattagtctgagtgactagtttcagggaataaattaatagtattttcttgtatcaggcattaagaacacatacaactttttattttctgatgtataggaagcttatagccaaattttctataatamtaaaataataataatcacagtttatgtattatatatatataaaataaaaccctggggttgagaagttttgttttacttttattctgatcatctgagggcaatgcttcttttatatttagaattcttcaagctttggcaattaatcatacattgtaattgaa

SEQ ID NO: 551930 - DNA, 555 bp, Homo sapiens
gaggctttacttttgactgaaagactactgacacttactacatttgtaaggtttattcactgacagtctgatggtcagtgacaactggtacttttgaaagcattgccacatgaggaagttcataggatttccagcttgagttttactggaaggatgtcccacattccttaggcatatgttgtaatacatttatttggtttgcctgctgtgtgcrtgcttgaataaaaatgagatataatttcttctgaatgcacatctacatgagaacaatcacgtgatttctagcttgcctgtgctctctggcagacagggagggtgtctccttcgttttggtggaaaaataaattctgaaaaactctttttttcctcatagtcctcttattttaactatgaggtttcccttaggataaattttctcttattttattttgaggagtgatttctcatattcatatactcatcaactgtctttcttggaggatatattacataattatatgtgtactagtgtattacaattaataaatggttctcaaaatatttttctttcttttt

SEQ ID NO: 551931 - DNA, 600 bp, Homo sapiens
gaaaggtagcactgaagtagagacgggggtttttacagatttccgctacaggggttacttagttttgaaaatttatgcatttaaactgaataaggcctggccatctgtgaaggtaacgccattcttttatgaagtaactactcatagtaagatgttttattcatttgggacattttttycccccagtaaaaaacattaaagtattactggatgatgccaaataacagtatctctatttaatcttcaactatatatatcttttgcttaatttttacatttgtatatttatttatttacttaatttttttgtgacagagtctcgctctgttgcccaggctggagtgcagtggtgtgatcacagctcactgcagccttgacctcctgagctcaagcagtcctcccacctcagccgcccgagtggctaggactacaggtgtgccaccatgcccaactaattttttaaaaagttttttgtagagatggggtctcactatgtttcccaggctgatctggaatacctaagctcaagcaatccttctgcctctgcctcccaaagtgctgggattacaggcctgacttagccactgtgcctggcctaca

SEQ ID NO: 551932 - DNA, 600 bp, Homo sapiens
gaaaggtagcactgaagtagagacgggggtttttacagatttccgctacaggggttacttagttttgaaaatttatgcatttaaactgaataaggcctggccatctgtgaaggtaacgccattcttttatgaagtaactactcatagtaagatgttttattcatttgggacatttttttcccccagtaaaaaacattaaagtattactggatgatgccaaataacagtatctctatttaatcttcaactatatatatcttttgcttaatttttacatttgtatatttatttatttacttaatttttttgtgacagagtctcgctctgtygcccaggctggagtgcagtggtgtgatcacagctcactgcagccttgacctcctgagctcaagcagtcctcccacctcagccgcccgagtggctaggactacaggtgtgccaccatgcccaactaattttttaaaaagttttttgtagagatggggtctcactatgtttcccaggctgatctggaatacctaagctcaagcaatccttctgcctctgcctcccaaagtgctgggattacaggcctgacttagccactgtgcctggcctaca

SEQ ID NO: 551933 - DNA, 596 bp, Homo sapiens
tcacccctgaccccgaacccagcagcaggttagcagaactggggatggtctctctgcatcctcaccccagacccagcacccagcagcaggttagcagtgctgagcacgcccccactgcagcctctgcatcctcaccccggacccagcaagacgccttcctggagtgttccttgaatcccagagagaggagcaggcgccctgtttcctttccgctgctccctaccttgcgaacgtccctgattttccggcgcagctcaagctgcttgtggtggaagtcggtgcgggtgagcgccttcctgtccatcttgcgctgcccctcggcctgggtggtgacggtctctctgcgggcaaccgccaactccatggcacggatcatyttctcctgctgcttcagcagctgcccgagcctgacctgggagacaggacagaggggctggggctggggcaggcctgagctgcagctgcagagagagtggccggggcgctggcctcgctcatcctccggtgacacgcatggggatcggcggggaaacagtgaggcctgtgccgccaggaggaacaagggacatggaggcagcagccctgggtgggaaccc

SEQ ID NO: 551934 - DNA, 596 bp, Homo sapiens
tcacccctgaccccgaacccagcagcaggttagcagaactggggatggtctctctgcatcctcaccccagacccagcacccagcagcaggttagcagtgctgagcacgcccccactgcagcctctgcatcctcaccccggacccagcaagacgccttcctggagtgttccttgaatcccagagagaggagcaggcgccctgtttcctttccgctgctccctaccttgcgaacgtccctgattttccggcgcagctcaagctgcttgtggtggaagtcggtgcgggtgagcgccttcctgtccatcttgcgctgcccctcggcctgggtggtgacggtctctctgcgggcaaccgccaactccatggcacggatcatcttctcctgctgcttcagcagctgcccgagcctgacctgggagacaggacagaggggctggggctggggcaggcctgagctgcagctgcagagagagtggccggggcgctggcctcgctcatcctccggtgacacgcatggggatcggcrgggaaacagtgaggcctgtgccgccaggaggaacaagggacatggaggcagcagccctgggtgggaaccc

SEQ ID NO: 551935 - DNA, 650 bp, Homo sapiens
tgcaaagtatcttaagctgatttttgtaatcattttgctrgtggtagtcttctatttattcgagactgttgcacatgtgtattatgaatacagcaaatgaataattatattcatgtcaataaaatttgaaatttgacagggaaaaggacactgtgaaaaaagtcctctacttgaatttgaataggaaacatcatgaattcatgatgaatattattttattaaaatacatgttttctagctttgttctctgaaaagatggaacgtgctcaacccttcacacacagataatgttctctacataccattttccactaaaaggaatcacaggctccctgaagaaatagctgattacaggtctgtggaaggaagtgtacaagacggacctggaatatcataaacggctttggtgatatcagaactctgcaattaagttaactctgcaatgaactgaggcacatcaaatattaacattcatgaattcctaataatactgttaaaataaaatattattgatcatccttggaaaatgcaaggaaaccaaaatcattattttaaaaactggcaaataaaaggaagagatcaaacatttttcctaacttccctatacatattattccaagtaaccaagcagttgatgagatgtttctctt

SEQ ID NO: 551936 - DNA, 650 bp, Homo sapiens
tgcaaagtatcttaagctgatttttgtaatcattttgctagtggtagtcttctatttattcgagactgttgcacatgtgtattatgaatacagcaaatgaataattatattcatgtcaataaaatttgaaatttgacagggaaaaggacactgtgaaaaaagtcctctacttgaatttgaataggaaacatcatgaattcatgatgaatattattttattaaaatacatgttttctagctttgttctctgaaaagatggaacgtgctcaacccttcacacacagataatgttctctacataccattttccactaaaaggaatcamaggctccctgaagaaatagctgattacaggtctgtggaaggaagtgtacaagacggacctggaatatcataaacggctttggtgatatcagaactctgcaattaagttaactctgcaatgaactgaggcacatcaaatattaacattcatgaattcctaataatactgttaaaataaaatattattgatcatccttggaaaatgcaaggaaaccaaaatcattattttaaaaactggcaaataaaaggaagagatcaaacatttttcctaacttccctatacatattattccaagtaaccaagcagttgatgagatgtttctctt

SEQ ID NO: 551937 - DNA, 1541 bp, Homo sapiens
taacaataaaaagcctatacatttgcattggctaaagtaatttatcaccagtggtatgtgaactgcaccatggaaaacagatatattttcaatttttcaatctttaataatctgaaaacttgattctctcagtttattcagatagaggaatacatagttatgatttctatactattagccttttttaccaatataattaattttaataatatattttgtttgacatatctaaatataaatttcaacatgtactaaatataacaattattaatgagaaatattacattcttttggctttgtactaaacatttgaaatgtgctgtacatttttcacttatagcctatgcaattaaaatgctatatttttattaggaatatttaatctaaatagatatcttaaaatttacatttgaaaaaaatagattcagatacctaagttgttacaagcatacgtaaaagttttcagtgactgaattgagtatcaatcagttttaaaatttaaatcagtgaaattaattaaaatgaaatgaaaatttagaaactccatttctcagtcacactggccacatttcaagtagaaagcctttgtttttaattcactttgtcctaaagctgcaagtagaatttctacatcttatcagaattgacttgtttaaaatatttttcaattaaaacataatacaaagccacttagatatgtaaaatttaaaaattctcccttttctctcttccatctttactgttttccccaaattcgagatcaaattaataaatatatttaaaatgtttctaactttaaaagttaagtattgaattaggcttacttagacttcacttgtaatacagtatttcttacatgtctaacataataggtgctcaaaaatattaggtaatttgtctccgtttattagatcaggaattatttaatagtatctaaacttttacttttgcttttacccatttatgaaaaaaaatcattccagcttagcatgctttaatatcttattgggataaataaataaataagattaaatatctaaataatttacagaaagatatcttacattctctatagcaaaacactgatgaatacagtgtatatattgaaagtaaatcttggtggtttttttttttttactcacgttgcaccaaagcgagagaacactagggggcagtgtggttagagcagaactctcaagaggcttggaaaggtgcgctgaaatcaccaacagctggtgcgataaatggggtctaatagcaagaaaagaatgcattcgtttaactttactttgtgaagttacgtggcccacatgcatattattcacaaggtcttggaagagacgctttgttcaaaccctgagcccataagyttagggacaagctcttcctggaaaggtctttcttacggaattttctgtcccgaagaagatacaaaagagtagagcattgccagagagtaacaattcataaatactaaccccaagtgccagtataatatttagttcctacctcattttaaccttcacttgtatccaccattc

SEQ ID NO: 551938 - DNA, 660 bp, Homo sapiens
cttgaggcaactttggaacccagtctgaacactaagccaaggcactctaccatttgacagatgaggaaaataaaccctagggaggtaaataaacctagggaggtaaatgctctcattctcaaagctagcacagtcagattgttttccagaaaataattaatacctaacatacctggaaacgagcgctatttgcagggtgatagtcaagttattaaaccagtgtccaatcaaaatggctctgcgtagtcagagcctcgtcctgtgtcgagcattaacttttcagttgctaaatcataggacatttttgtgggaggcagggtgtcaccattgaagggtccagtatccggggagctcaggacaataggtaattaccaactggtataaaagtgattttaacaaggtacaatcataccagatgggtaacagctaaatgtcagccctgggcrtttgaagatgtcctccgcaggctagaaaaaaatccacgttggattggaatcctgctgagaatagctacactataattggaactctggagactgtatctgttccttctcatttggtctttctagaaatcaaagttctcctctggactcttccaaaacatttagacatttactggcttccaaaagaaggaactcatggtgatattgaccattttta

SEQ ID NO: 551939 - DNA, 634 bp, Homo sapiens
aaatttattcttatattacttttacaactaaaaaatgaataagaaaggaataaaaattaaagaaacaaaagtttttgctgtccagtctaaaaataaatttttaaaaaacaataatatactcatggagaagagttagaaaataaagactaaaataaatcaatcaaattagccgtcctctttatgcccagaaaaaccacatttaggctggccactgtggttcacatctgtaatctcagcactttggttggccaaracgggaggatcacttgagcccaggagcttcagaccagcttggtctcaagaccctgtcttaaaaaaaaaaaaagaaagaaaagaaaagaaatcagaaaaaacacatttaacattttggagaattttctttcaggccttttcccataaggtatagaatatatatagtaccctttattttaaggaattttctctcttccatttataggaacatgttgtatctgttgatgattaaatacccttgggtgtcctggctattgaaaaatgattataaaacctttagtggctgaaagaaaattatgatgaagtctagaagagaatcctctgactagaagagatttggaaactatatgtgaacgtgtacccacttttgcttttctctttt

SEQ ID NO: 551940 - DNA, 977 bp, Homo sapiens
gtttggcttgttcaaggagtgaacatggaaaagagtagtggtagatgaggtcagaagagcagtggggaagcagatcaggaaggacttgtaggtcattattagggtttggcttctactctgagtgatgtggaagccactggcagtttgaagcaaagtatttcataatctcgcttacattttaaaaatatcaattggcygctataaggagaagagaccacagagattaagggggaattgagaagtccagtgaggagactactgcagtaataccgacagaagatggtggcaagggctcaggtggtagcagtggaggtggtgacaagtgatgagatactggatttattttgaaggtgacaggatttgttgatagactgagcatggggtatgaaagagaggaatcaaaagattcaaaactttttggtttgggactgaaaagatgaagttttcatttatagaaatggggaagccaatctctagagtaaaccaccagagtttggcttagttaagtttgaatatgctgaatagacacgtggttaatgtaagtgtaagctttagacttcagccttttaaagttaggtcgaaggctaaaggtctgtgattgggcatcatcagtacacagacggcactaaatccacaagatcagatgctatccagtgagcctgtttattcccagcactcagcacaatgtctgatgtagtggatgctcaataaatatttttttgagtaaattaaagaaagagtaatatatttcagataaaaaacaagcttatacagaatatcaggactaggttcactagtagtgattgaatcagagactaaaatacttcatctctttgattaattattaaagtgtttgtaaatgttgcaaataccttctactcttttcacccacatctgcttcttattcttctgagtgtgtttatagaattttgtatgtctactatgtgacttattcaatggattttcaatagttttaa

SEQ ID NO: 551941 - DNA, 659 bp, Homo sapiens
ggggcctgtcatggggtggggggcagggagagggatagcattaggagaaatacctaatgtaaatgacgagttaatgggtgcagcaaaccaacgtggcacgtgtgtacctatgtaacaatcctgcacgttgtgtacatgtaccctagaacttacagtataattaaaaaaaaaaaaaagaaaagacaaaaaaacacattcgtcctccagtatctgtgagggtttggttccaggattcctcatggataccaaaatccatagatgcttaagtctcttatataaaatggcatagwatttacatataacttatgcatatcctctcatatactttaaattatctctagattgtttgaaacacctaataaaatgtaaattttaggtaaatagtggttatattttgttttttaaagtgttattttctgttcttgtattattatttatatagtttttccaaacattttcaatgtatggttggttgaatctatgaaactcatggatacagaaggccaattgtatttattacacagtcaaatttgtgttttgtaaaataaaaaacagtatataagactttgtggagaatgctcacatttttttaacacacacccacacatacacagaaataggttggaaaacataaaccaaaattttaataaagatatttc

SEQ ID NO: 551942 - DNA, 659 bp, Homo sapiens
ggggcctgtcatggggtggggggcagggagagggatagcattaggagaaatacctaatgtaaatgacgagttaatgggtgcagcaaaccaacgtggcacgtgtgtacctatgtaacaatcctgcacgttgtgtacatgtaccctagaacttacagtataattaaaaaaaaaaaaaagaaaagacaaaaaaacacattcgtcctccagtatctgtgagggtttggttccaggattcctcatggataccaaaatccatagatgcttaagtctcttatataaaatggcatagaatttacatataacttatgcatatcctctcatatactttaaattatctctagattgtttgaaacacctaataaaatgtaaattttaggtaaatagtgrttatattttgttttttaaagtgttattttctgttcttgtattattatttatatagtttttccaaacattttcaatgtatggttggttgaatctatgaaactcatggatacagaaggccaattgtatttattacacagtcaaatttgtgttttgtaaaataaaaaacagtatataagactttgtggagaatgctcacatttttttaacacacacccacacatacacagaaataggttggaaaacataaaccaaaattttaataaagatatttc

SEQ ID NO: 551943 - DNA, 606 bp, Homo sapiens
tctatagttcttattttctcttagttcaaattttacctttggcaccaaatactctgttattttacttgaggtgacaatctcactttattcatttttgaggaagcatttatgaaatatttaagtctaaaataaccatagtttgtcttacttaatttaaagtaaaagcagtgttccawgaaaaaaaaaaaaagtttaggttaactcacagttcaattaccaagtgttttttttctcaagaaaactaatatacaaacttcactgttcagcagaactgcttttgtgcctttcccgtgtggtcacacacaatattaaatgggtatgaacataaaggtcaaggcttaatgaaattaattagtactggtgtatcaaggacattcgtaagtgaaactgccattcattttactataagtatgtggtaataatttggtgccacgctaaaatgacagcagttttacccctttttgctttgtaaaatatatatgtttttatttttttggtgctctacatgctcagaaaactatattaatgaactacagaaatgacccctgaaagtacagtctttgcttttgtgccatcagtggaaatgtaaagatagtgaaaaaggca

SEQ ID NO: 551944 - DNA, 606 bp, Homo sapiens
tctatagttcttattttctcttagttcaaattttacctttggcaccaaatactctgttattttacttgaggtgacaatctcactttattcatttttgaggaagcatttatgaaatatttaagtctaaaataaccatagtttgtcttacttaatttaaagtaaaagcagtgttccatgaaaaaaaaaaaaagtttaggttaactcacagttcaattaccaagtgttttttttctcaagaaaactaatatacaaacttcactgttcagcagaactgcttttgtgcctttcccrtgtggtcacacacaatattaaatgggtatgaacataaaggtcaaggcttaatgaaattaattagtactggtgtatcaaggacattcgtaagtgaaactgccattcattttactataagtatgtggtaataatttggtgccacgctaaaatgacagcagttttacccctttttgctttgtaaaatatatatgtttttatttttttggtgctctacatgctcagaaaactatattaatgaactacagaaatgacccctgaaagtacagtctttgcttttgtgccatcagtggaaatgtaaagatagtgaaaaaggca

SEQ ID NO: 551945 - DNA, 606 bp, Homo sapiens
tctatagttcttattttctcttagttcaaattttacctttggcaccaaatactctgttattttacttgaggtgacaatctcactttattcatttttgaggaagcatttatgaaatatttaagtctaaaataaccatagtttgtcttacttaatttaaagtaaaagcagtgttccatgaaaaaaaaaaaaagtttaggttaactcacagttcaattaccaagtgttttttttctcaagaaaactaatatacaaacttcactgttcagcagaactgcttttgtgcctttcccgtgtggtcacacacaatattaaatgggtatgaacataaaggtcaaggcttaatgaaattarttagtactggtgtatcaaggacattcgtaagtgaaactgccattcattttactataagtatgtggtaataatttggtgccacgctaaaatgacagcagttttacccctttttgctttgtaaaatatatatgtttttatttttttggtgctctacatgctcagaaaactatattaatgaactacagaaatgacccctgaaagtacagtctttgcttttgtgccatcagtggaaatgtaaagatagtgaaaaaggca

SEQ ID NO: 551946 - DNA, 539 bp, Homo sapiens
catgagcgcatgcttaaattttccatcctacagagaattgttgaatttacctgtgttataagtatagaatccgtattgctcatcattaagcagtcctgcttacattccaacattaaaggcattgtcaggtaaaaatggccaaacttatatttttcctaaaagttaattactattcaaaatgatatatgatcttaatcctgaaccctaggcaagtctcttttctgtttagagtagtggaaatatataatgtaggaaaaatataatgagactttaatttcgtggtttttattagtcacaacattagcagctgcattccttctttactaaaagatcctagaaataaatgcaggtgttcctgaagacaaatgcaaatggtatcaacttcctcattttttaatccactgagtgtttaattatggaatgctgtctttagattttatttatgttaatagtaatgccttacaaaatagattcagagcaagagttaaacttcagagcagttcatgaattattctyatcatcaatcttgtcactgttga

SEQ ID NO: 551947 - DNA, 284 bp, Homo sapiens
tggcttctctgaccttcaaaagtaactcttggcagcctggggcaagggtggggctagtgtttgggtgtgagtgggtggctgtgattgtgaggaaggccttaggagctggccaaactggggagggtggatgggaagagggcagggaaggactatgtaagagcatgagcatcctcgggttggaaggaagtgctaccactctccagattcttcctttgagtcctagagcgctttactaaatctgagatggaggtagagactaagggaaacaggatcaacattasaaa

SEQ ID NO: 551948 - DNA, 858 bp, Homo sapiens
  misc_feature 755, 756, 757, 758, 759, 760, 761, 762, 763, 764, 765, 766,767, 768, 769, 770, 771, 772, 773, 774, 775, 776, 777, 778,779, 780, 781, 782, 783, 784, 785, 786, 787, 788, 789, 790,791, 792, 793, 794, 795, 796, 797, 798, 799, 800, 801: n = A,T,C or G
  misc_feature 802, 803, 804, 805, 806, 807, 808, 809, 810, 811, 812, 813,814, 815, 816, 817, 818, 819, 820, 821, 822, 823, 824, 825,826, 827, 828, 829, 830, 831, 832, 833, 834, 835, 836, 837,838, 839, 840, 841, 842, 843, 844, 845, 846, 847, 848: n = A,T,C or G
  misc_feature 849, 850, 851, 852, 853, 854: n = A,T,C or G
gctyggatccagtccttactctgatactgaatagaattgtgatcttgagcaaatcccttgaatctatgtaaaagtattataattctaccttatttttgagattcctgagacaattaaggtttttttttttttaatgaagccctggagcactagatgtacccttatcattattattattattttcaggtgttggtcaggttcagcgacattaatatctctttgtctttatcttcatctctcaaaatcctctgcttgcctttatgcaatactgtttttcttaaatgtaattccttacacaggaagactgaggattaccaccaaattttgaaagtaaataaaagctcttaattatcaaaaattttaatggaactgtgaaaaccacctaatatcaactttctaaactgtataacaaaagtcagttctgtttattctacaaagtgaatatttttgaatctatgtataattaattatattaattacatttttcaaggaaacccaccattttggatcatggagtgcaggatttatgagtctcctggaggctggagaatcaaagtacaaagccgtgttccagctctggagtgcaacagcccactactaaatacacatgtatttgcagcctttttggctcaaggctagatgcttgtcagtccttaggttgagaaagcaggcatggtgacaattatgacctctcctatttcctcaaatctctgattcatttttgcttctaatgcaggatacctctgaggtcaaannnnnnnnnnnnnnnnnnnnnnnnnnnnnnnnnnnnnnnnnnnnnnnnnnnnnnnnnnnnnnnnnnnnnnnnnnnnnnnnnnnnnnnnnnnnnnnnnnnntttt

SEQ ID NO: 551949 - DNA, 858 bp, Homo sapiens
  misc_feature 755, 756, 757, 758, 759, 760, 761, 762, 763, 764, 765, 766,767, 768, 769, 770, 771, 772, 773, 774, 775, 776, 777, 778,779, 780, 781, 782, 783, 784, 785, 786, 787, 788, 789, 790,791, 792, 793, 794, 795, 796, 797, 798, 799, 800, 801: n = A,T,C or G
  misc_feature 802, 803, 804, 805, 806, 807, 808, 809, 810, 811, 812, 813,814, 815, 816, 817, 818, 819, 820, 821, 822, 823, 824, 825,826, 827, 828, 829, 830, 831, 832, 833, 834, 835, 836, 837,838, 839, 840, 841, 842, 843, 844, 845, 846, 847, 848: n = A,T,C or G
  misc_feature 849, 850, 851, 852, 853, 854: n = A,T,C or G
gcttggatccagtccttactctgatactgaatagaattgtgatcttgagcaaatcccttgaatctatgtaaaagtattataattctaccttatttttgagattcctgagacaattaaggtttttttttttttaatgaagccctggagcactagatgtacccttatcattattattattattttcaggtgttggtcaggttcagmgacattaatatctctttgtctttatcttcatctctcaaaatcctctgcttgcctttatgcaatactgtttttcttaaatgtaattccttacacaggaagactgaggattaccaccaaattttgaaagtaaataaaagctcttaattatcaaaaattttaatggaactgtgaaaaccacctaatatcaactttctaaactgtataacaaaagtcagttctgtttattctacaaagtgaatatttttgaatctatgtataattaattatattaattacatttttcaaggaaacccaccattttggatcatggagtgcaggatttatgagtctcctggaggctggagaatcaaagtacaaagccgtgttccagctctggagtgcaacagcccactactaaatacacatgtatttgcagcctttttggctcaaggctagatgcttgtcagtccttaggttgagaaagcaggcatggtgacaattatgacctctcctatttcctcaaatctctgattcatttttgcttctaatgcaggatacctctgaggtcaaannnnnnnnnnnnnnnnnnnnnnnnnnnnnnnnnnnnnnnnnnnnnnnnnnnnnnnnnnnnnnnnnnnnnnnnnnnnnnnnnnnnnnnnnnnnnnnnnnnntttt

SEQ ID NO: 551950 - DNA, 978 bp, Homo sapiens
ctgtgggggtgctggaaccagtccccctcaygtatacccagggatgactgtacttatgatggctattatttctctcatattacaggggcgtaaacataagtgatgttagtttgtttaagattatttagttggtgagtgatggagctagggttggaatcaaagtaagagttctcttggttacaccatgctgcttccttgtgcaataaatattcactgaatatctcaaagagccagtgttctgtgcagtgtactgcagaagttactgtgtaagagtttaatctttctctaagtataattttaagttatctctttatgtttaattacgaaattttataaacccatttaaaaagtaaactgaacaatttaaaaacagcagaagtgcttcctttttactcatctttatgattttaagagtaattagttgctaagttcatatattcctgaattgttctaaagtaaagcaaccatgtaaaatgcagttgttttttaaagaaggtacaggagacaagaaatctaggagaatgtttcttcagttgtgactcatttaactttcagggccagttgaaattcataaatgttcacatttgttaatcagaatccagggtacttcagtaagtgcttggtaaagtattagagatttggtgggtttattcagtaccagttgtatttcaagaattgaactcctctaactatgttgaatacctggttcactttactttctaatcagaaatttgttcactttgtgtctgtgactatatctgcacagtggttgctagataaatgtaggataactcttaacctttcaccctacagaggttagcaaaactatcacattaggcctgaggaagaagcagcataggagaaatgtaaatatgcgagcactttgaagataaatcagtggctgacacaagaccagtaatatactcaagacccttggatgtctgaaatggcaaagcgaattatgcagtgtgcttgcaa

SEQ ID NO: 551951 - DNA, 978 bp, Homo sapiens
ctgtgggggtgctggaaccagtccccctcacgtatacccagggatgactgtacttatgatggctattatttctctcatattacaggggcgtaaacataagtgatgttagtttgtttaagattatttagttggtgagtgatggagctagggttggaatcaaagtaagagttctcttggttacaccatgctgcttccttgtgcaataaatattcactgaatatctcaaagagccagtgttctgtgcagtgtactgcagaagytactgtgtaagagtttaatctttctctaagtataattttaagttatctctttatgtttaattacgaaattttataaacccatttaaaaagtaaactgaacaatttaaaaacagcagaagtgcttcctttttactcatctttatgattttaagagtaattagttgctaagttcatatattcctgaattgttctaaagtaaagcaaccatgtaaaatgcagttgttttttaaagaaggtacaggagacaagaaatctaggagaatgtttcttcagttgtgactcatttaactttcagggccagttgaaattcataaatgttcacatttgttaatcagaatccagggtacttcagtaagtgcttggtaaagtattagagatttggtgggtttattcagtaccagttgtatttcaagaattgaactcctctaactatgttgaatacctggttcactttactttctaatcagaaatttgttcactttgtgtctgtgactatatctgcacagtggttgctagataaatgtaggataactcttaacctttcaccctacagaggttagcaaaactatcacattaggcctgaggaagaagcagcataggagaaatgtaaatatgcgagcactttgaagataaatcagtggctgacacaagaccagtaatatactcaagacccttggatgtctgaaatggcaaagcgaattatgcagtgtgcttgcaa

SEQ ID NO: 551952 - DNA, 569 bp, Homo sapiens
tgatgagaacttcctattccctaatctttacttttgttaaggtctgaatatagaacttaagtatattacttagaaagggattctagattttgacttgatgtacacagtctatgactgcacataaatggcttcagatgggtgtatctagtcttcctagcccaagagtaaccattctgaataaaagacatcttcaattccatttataatgaagttacagaataatttatattcttccccatatctagactcattctttacaaagcttgggcattccactaatgttcctaagtgaaagtaagaagaaaagatatacctaaaaaaacaagtaaaatggctctggtactaagacgaactatatatttaatcatcattactatttgagttcaaacrccaacaagaaaacaaagaaaagtacaatacatctactaattgccagggacgttttaaaacttatcatcaaagtaacctctttttcatctgctacttgatttgagataatttttcttcagcaaaaattgctcaattacactaacccctttcaggagataatccatttattgtagctgagg

SEQ ID NO: 551953 - DNA, 1150 bp, Homo sapiens
cccagcagtgcgtgggcgggatgagcatcagcagcctctcccgcagcagttctgagtatcctcctcagagtagcagtatggaatgcaatgcttaggcccaccagaggcctcctgcatcagacactcaaggggtggaagcccagaatctgtgttttaacaatggatacatactgtggttgaagaactattactctagcggacttaaaaaaacaatgcacagattcttaagctccaccaggagccactaaaacagaacatttggggcacagagcccagaaacatgtatttttttttttttgagacggagtcttgctctgtcacccagactggagtgcagtggcgcgatctcggctcactgtaagctccacctcccgggttcacgccattctcctgcctcagcctcccgagtagctgggactgcaggtgcccgccactgcgccyggctaattttttgtatttttagtagagacggggtttcactgtgttagccaggatggtctcgatctcctgaccttgtgatctacctgcctcggcctcccaaagtgctgggattacaggcgtgagccaccgcacccagccagaaacgtattttttaagcacctggtgctgaaatggtgctaatgcacagtcaggcttgaataccactgacctagtattgctctctgttggtttcatttcctcaacagcattactagaaataatcaaactattcatagagacctgcttgatgtaattaccctggcaaggtgctcaacaatgcatatagctggtcacctccagcagttctcctaccctctcagaagcttattttcttcatctgcaaaatgaagatgctctgatctcacgagactgggttgctgtggcaaccacggagtaagagcagctggcttagggtgtgtccatatgttgagtactcaatgattctagttgaaagaaagaaaaaaggaaggaagaaaggaggaagaggcaggcacaagacaaaatgaatctctccgctgtgcacatggagccttagctctgattccagttgagcaaaattatgaagaagatgattccccatatggatgacagataaacaccctgtggcgagtcactcactcccgaaaggccctctgaaggatcgcgcatgtcctgactgcacagcctgctc

SEQ ID NO: 551954 - DNA, 1015 bp, Homo sapiens
tttttgagatggagtctcgctctgtcgcccaggctggagtgcagtggcgcaatctcggctcactgcaagctccgtctcctgggttcatgccattctcctgcctcagcctcccgagtagctgggactacaggtgtccaccaccacacccggctaatttttgtatttttagtagagacggggtttcaccgtgttcgccaggatggactcaatctcctgacctcgtgatctgcctgccttggcctcccaaagtgccgggattacaggcgtgaaccaccatgcccggccggaatgttgtatttcttaagcctggtggtagatgcacaaggctttattttattttatttatttgagacggagtctcactctgttgcccaggctagagtgcaatggtgtgaccttggctgactgtaccctccgcctcccgggtttaagtgattctcttgcctcagcctcctgaggagctgagattacagatgcccaccaccatgcccggctagtttttgtatttttagtagagatagagtttcaccatgttggccaggctggtcttgatctcctgacctcgtgatccatccgccttggcctcccaaagtgctgggattgcacctcacaggtccaagccatcctcccacctcagcctcctgagtagctgggactataggcatgcaccaccacactcagctaacttaaattttttgtagagatggggttttaccatgttgcccagcatggtcttggattcacggcctcacgtgatccttctgcctctgcctcccaaagtgctgggactatgggtgtgagccaccatgtctggcctaagggctttattgtattagtccttattcctatttgtcttaaatatttcacatggaaattaaaaccagaccaggcaaagcctgacagcccgccagccctgagggggacatccgcagcccttgccatctsccgcctctgtggcctcatcctggtccactcactcccaggctcacttcacagccacaacctggccttcctg

SEQ ID NO: 551955 - DNA, 728 bp, Homo sapiens
tccaggggaacaacttaacagaagttaactaattctcacacagaaaggaaaaggctttgtaatgtagcgctttacccacatgtgcatgtatcatgtattcagtcacacctccagtgggtggcatgccatactcatggcatgttaatattcctgcagcagaatgcactgatactaacaggaaggggataggtaaagattaaacctcacatcagctcaggtcaggtttggtacccaaagagtttaaaaaaaaacaaaccaccaaggctgggcatggtggttcacgcctgtaatcccagcactttggaaggccgaggcagggggatcacttgaggtcaggagctcgagaccaggctggccaacatggtgaaaccccatctctaccaaaaaatatgaaaagtagccaggcgtggtggcgtgcgcttgtagtcccagctactcgggaggctgaggtgggagaattgcttgaacctaggaggcagaggctgcagtgagccaagatcatgccactgctctccagcctgggcgrcagagtgagaccctgtctcaaaaacaaaacaaaaacccaccaaaaaaaaaacctttcagattttagagcttgtaaagtttagtattatttggaaaggggattgtagacctgtgaatttcctctcaggagatcccttgagacgtgcaacaagtgaacgttgcctgccttcccactagagggcccctgattatcactgtgtccg

SEQ ID NO: 551956 - DNA, 886 bp, Homo sapiens
cactggtgtgttttgtttagcttagaatttaaaaaaagagcttgttgccaacaagaaggaagtttttttttgtttgttttgttttaaacttcagattcctgggtttttcttgaaaagccactggtcctacaggcagcaatggggtccctgtgtttcttgcattctgtagaggggctggcattcctgggctcactgaggccccacccagctgcttcccttattcgctcacattatctgcctggcccctgaatctgttgagcttgcaatcccttttctaagaagatattaatagttttcctttctttcatgcataatttcagttgtctttaaaatcaattaaatttacagagattaatctatggcaatgaaaaaacagagtctagtgcctgtcaattttatattccaagtaaaggtgaccctaagaagaactggtagaatatctgctcacttgcttttcaatgtgaatttagaattttatttttcttatggacttaatctctttgctcytcattttcttcatctgtaatataaggttactgaagtaacagacaactgcctcaggaataatttttgtggattaaataaggtcatgctgggaagcacttatgtcagtgcctggcagatagaatgctctcagtaaacatttattaaaaagagggagtataatgaaggaatgatctaaaattcatattgtctaaaatatgctcagtagaatacatcaagctagaaatctcaaaatatttactgtggcaataaattgacaaacatttcaataatttagctgctattgtgtttggtggttttcataaagggtacgccattgtcctgttcactttccagctctcctgcactaacccggtggttaccatagccctagaaggagttc

SEQ ID NO: 551957 - DNA, 523 bp, Homo sapiens
tttgaaatggtggaaggacagaagcatcagccagcccgttcatgcttggggacagagagggagctcagagcttaggggagcacaggtcactctaaygaatgacagctgtaataataaagacatgccatccatgctactttttgcagaaaccagaaacatccttgtgaaagttaaagggaaaagaaaaacgtgtactttgaggggggtgttaacgggggacaggaggtggcgacataaaagactggtttaatgtgtctcgttgtagcccctaaggctttacctgaccccatcactgtcacaacaccttcttcgggactgacagtcttggtaattgatgggttggtgggggcttttttctgcaaacacattaaggcaggagggaatactctggcccccacctccccacgcctggcacgggggacctggaggcgagcagacaccaggcccggcggtgttgggggcagaagggatcaattctgtcaaccagactgcccagctactgtcaggcactgggacccttcac

SEQ ID NO: 551958 - DNA, 523 bp, Homo sapiens
tttgaaatggtggaaggacagaagcatcagccagcccgttcatgcttggggacagagagggagctcagagcttaggggagcacaggtcactctaatgaatgacagctgtaataataaagacatgccatccatgctactttttgcagaaaccagaaacatccttgtgaaagttaaagggaaaagaaaaacgtgtactttgaggggggtgttaacgggggacaggaggtggygacataaaagactggtttaatgtgtctcgttgtagcccctaaggctttacctgaccccatcactgtcacaacaccttcttcgggactgacagtcttggtaattgatgggttggtgggggcttttttctgcaaacacattaaggcaggagggaatactctggcccccacctccccacgcctggcacgggggacctggaggcgagcagacaccaggcccggcggtgttgggggcagaagggatcaattctgtcaaccagactgcccagctactgtcaggcactgggacccttcac

SEQ ID NO: 551959 - DNA, 625 bp, Homo sapiens
gagaatcagcccagagaaaccagaattatcttcactatatcacgtatctactaagagcasccttttcactaccaaaagttctctccaggaagaaagggacttaacacattatcacaaagacaaccttacctctacaaagaaggcacagtgtcacaaaggatggccaagggccttctaaatcacaacacaggtgagctttagactccccaagacactaaccataaatcctggctgttcattaagaggacctgggggacttttgaaaagtactagggccaaggaccccatctcaggccaagtgaagcagagtctcgggggctctggtgcaagcactggcattttttaagtcttccaggagattctaatgtacaaccaaggctgagaaccactggtccaaccaaatcttgatttaaagggaaaagaagcaaaagagattgcaagtcattttcattaagatcacaattagcacaccaaccttgctgccaccccagtgccagcctggcacatgcctaaaaccttttgactccactgtcatccagccctcctgtttttcatcagagaaacaaagtgcatttgtgaaatcaaatccattctgaacacccacaattaatgtgcacttcagcac

SEQ ID NO: 551960 - DNA, 625 bp, Homo sapiens
gagaatcagcccagagaaaccagaattatcttcactatatcacgtatctactaagagcagccttttcactaccaaaagttctctccaggaagaaagggacttaacacattatcacaaagacaaccttacctctacaaagaaggcacagtgtcacaaaggatggccaagggccttctaaaycacaacacaggtgagctttagactccccaagacactaaccataaatcctggctgttcattaagaggacctgggggacttttgaaaagtactagggccaaggaccccatctcaggccaagtgaagcagagtctcgggggctctggtgcaagcactggcattttttaagtcttccaggagattctaatgtacaaccaaggctgagaaccactggtccaaccaaatcttgatttaaagggaaaagaagcaaaagagattgcaagtcattttcattaagatcacaattagcacaccaaccttgctgccaccccagtgccagcctggcacatgcctaaaaccttttgactccactgtcatccagccctcctgtttttcatcagagaaacaaagtgcatttgtgaaatcaaatccattctgaacacccacaattaatgtgcacttcagcac

SEQ ID NO: 551961 - DNA, 625 bp, Homo sapiens
gagaatcagcccagagaaaccagaattatcttcactatatcacgtatctactaagagcagccttttcactaccaaaagttctctccaggaagaaagggacttaacacattatcacaaagacaaccttacctctacaaagaaggcacagtgtcacaaaggatggccaagggccttctaaatcacaacacaggtgagctttagactccccaaracactaaccataaatcctggctgttcattaagaggacctgggggacttttgaaaagtactagggccaaggaccccatctcaggccaagtgaagcagagtctcgggggctctggtgcaagcactggcattttttaagtcttccaggagattctaatgtacaaccaaggctgagaaccactggtccaaccaaatcttgatttaaagggaaaagaagcaaaagagattgcaagtcattttcattaagatcacaattagcacaccaaccttgctgccaccccagtgccagcctggcacatgcctaaaaccttttgactccactgtcatccagccctcctgtttttcatcagagaaacaaagtgcatttgtgaaatcaaatccattctgaacacccacaattaatgtgcacttcagcac

SEQ ID NO: 551962 - DNA, 625 bp, Homo sapiens
gagaatcagcccagagaaaccagaattatcttcactatatcacgtatctactaagagcagccttttcactaccaaaagttctctccaggaagaaagggacttaacacattatcacaaagacaaccttacctctacaaagaaggcacagtgtcacaaaggatggccaagggccttctaaatcacaacacaggtgagctttagactccccaagacastaaccataaatcctggctgttcattaagaggacctgggggacttttgaaaagtactagggccaaggaccccatctcaggccaagtgaagcagagtctcgggggctctggtgcaagcactggcattttttaagtcttccaggagattctaatgtacaaccaaggctgagaaccactggtccaaccaaatcttgatttaaagggaaaagaagcaaaagagattgcaagtcattttcattaagatcacaattagcacaccaaccttgctgccaccccagtgccagcctggcacatgcctaaaaccttttgactccactgtcatccagccctcctgtttttcatcagagaaacaaagtgcatttgtgaaatcaaatccattctgaacacccacaattaatgtgcacttcagcac

SEQ ID NO: 551963 - DNA, 1090 bp, Homo sapiens
ccaggtgaatgaatgaatggccaaaaattcactcctaagaaagagtgccttcactgttaaaacctaagcagtctatttatcacagaagcccagtactcacacttacatttttttcctttcccacccccatttcgataaaataaagaataatggttttttcacacaatccccgacacacacttgcactttttttccgcttcaaaatgacagtggatgtttgcaaaagcccctggagtctagaaggacatcaatcactttcacagctggagtcgtaacactttccttagaggaaattttatgcagcaagcagaataagcttcatcctcagcaggacaagacaaaaggtaggtaaaaggaaaggctggcagccaccaccaggcttttgtgccactaactgggggtggggtggggtacatcaattggaacttattcttcaccccaaggcttgcctgtttgccttccatttcccttctgaatttgaggaggagtaagtacagcaccatgaaaccagctcataacaaaacaagcacttacctccattgctactcaaaacaaggacaccacaggagagttctccagggatctttgtccttccttcttagggcccaaaatactcgagttcagctgtcaaaatagaaagaaaaggaaatcaggagtgtagacttctgtttccaaatgacttagcatttaacagtcatgcttcaaatgttcctttaaatgaggaaagattgaccaagcaggagagtccattgggaaaagtttggacaaactatcattttcaagcaatgaaatcatcattactatctgagagcyatttacttctagacaaaatcttgtcaactcccaaaattacagactagagacaatggattcaccagcctccttgagcagaggcagaatcaattaatatgagccaagcactttctcagcttagtaccctggttggctgttggtcacaggcgcattccacagatgataaaatcactcacaaacctgtcagaagtcacattcacatagtcaagaatggggcctttaggccggaggcggtggctcatgcctgtaatcccagcactttgagaggctgaggcag

SEQ ID NO: 551964 - DNA, 1090 bp, Homo sapiens
ccaggtgaatgaatgaatggccaaaaattcactcctaagaaagagtgccttcactgttaaaacctaagcagtctatttatcacagaagcccagtactcacacttacatttttttcctttcccacccccatttcgataaaataaagaataatggttttttcacacaatccccgacacacacttgcactttttttccgcttcaaaatgacagtggatgtttgcaaaagcccctggagtctagaaggacatcaatcactttcacagctggagtcgtaacactttccttagaggaaattttatgcagcaagcagaataagcttcatcctcagcaggacaagacaaaaggtaggtaaaaggaaaggctggcagccaccaccaggcttttgtgccactaactgggggtggggtggggtacatcaattggaacttattcttcaccccaaggcttgcctgtttgccttccatttcccttctgaatttgaggaggagtaagtacagcaccatgaaaccagctcataacaaaacaagcacttacctccattgctactcaaaacaaggacaccacaggagagttctccagggatctttgtccttccttcttagggcccaaaatactcgagttcagctgtcaaaatagaaagaaaaggaaatcaggagtgtagacttctgtttccaaatgacttagcatttaacagtcatgcttcaaatgttcctttaaatgaggaaagattgaccaagcaggagagtccattgggaaaagtttggacaaactatcattttcaagcaatgaaatcatcattactatctgagagccatttacttctagacaaaatcttgtcaactcccaaaattacagactagagacaatggattcaccagcctccttgagcagaggcagaatcaattaatatgagccaagcactttctcagcttagtaccctggttggctgttggtcacaggcgcattccacagatgataaaatmactcacaaacctgtcagaagtcacattcacatagtcaagaatggggcctttaggccggaggcggtggctcatgcctgtaatcccagcactttgagaggctgaggcag

SEQ ID NO: 551965 - DNA, 1697 bp, Homo sapiens
atgcgggatttttaatcatttacactttagcaagttaaactctattacggtttgtggaaaagacttaaagagacactgatgactgatttaaaatactctttcaggccacaggaagacttcattagacaaactcttcaagaactctcttcttagattacacctacttcatggagaactgcaatggttgtccctatttgctgtttttgttttgttttgttttttgcggtgaagtctcgctctgtcacccaggctggagtgcagtggcgtgatcttggctcactgcaacctccaccacccaggttcaagcgattctcctgcctcagcctcccgagtagctgggactacaggcactcgccaccacgcccagctaatttttgtatttttaatagagacggggtttcatcatgttggctaggctggtcatggactcctaacctcagatgatccacccgctttggcctcccaaagtgccgggattacaggcatgaaccaccatgcccagcccctatttgctttttaaagttctctttaacttaaaaaaccacaatacttttctgtagttaacaaaaaattgtttgtggattaaaaatactgtgagatatcctcttcctaattttctcaactagttaaattaccatgttgtacctttgagaagtagcatgatttcatctacatagtaatgcaattttatgtactttttgtattttaacttttgaaatgaaatgaaaaccaaaatattccaaattaatattctttaggattgtgcaagaagcccagttcttttttttttttttttttttgagacggagtctcgttctgtcacccaggctagagtgcagtggcgcgatctcagtttactgcaagctccgcctccctggttcacgccattctcccatctcagcctcccgaatatctgggactacaggcgccagccaccacgcccggctaattttttgtatttttagtagagatggggtttctccatgttggtcaggctggtcttaaactcctgacctcaagtgatgcgcctgcctcagcctcccaagtgctgggattacaggcgcccaccaccacgcccggctgatttttttttttttttttttgtatttttagtagagatggggtttcaccgtgttagccaggatggtctcgatctcctgacctcgtgatccgccgaggcccgccttggcctcgaaaagtgctgggattacaagcgcgagtcaccgcgcccggctaagaagcccagttctttaacaycataaaatgatatgcatctacgtatattccgtatatttaaacataattaaaggcaaacaagttatactatatcccaaacatgctgacatggtttggctttgtgtcctcactcaaatctcatctcaaattgtgatccccagggtgtcaagggagggacctggtgggaggtgattggatcatggaggtggtttcccccatgttgttctcataatagtgaaggagttctcatgagatctgatggttttaaaaatgacagttccccctgcatgctttctctctcctgccactttgtgaagaaggtgccttgcttcccctttgccttccgccatgattgtaagtttcctgaggcttccccagccatgcttcctgtacagcgtgtggaactgtgagccaattaaacatcttctcttcgtaaattacccacactcaggtagtatctt

SEQ ID NO: 551966 - DNA, 536 bp, Homo sapiens
attgctttaagtatctagaaataataactcatccaaaaccaaaattaagagcatggacattaacttatttaaaagatgcaagaacaagaggccagttcacagatcacaggtggctggggaggcctcagcaatcacataaagttgctatacagtgtggcgtattcctctaggtagtctttctttagaaaaaagagcacaggcsctcctggaacccagaatcagagaattctgggaatggaagaggccagccaagccctctagcccaatcccacccctccttgatgcatgaatcccttgcacaagctccatgccaagtttccctaaactgccaggggtaaagaccttctgacctcctataagagccatttgacactaatctcagaaaactcttcctcccactgaattgaattttggtcccagtttggtgaagacccccagtgattaatccttctagcccttcggagataaaaggtggcatagtgtctctttcacgagtcataatatcataaaagagtttcaaattcctataaatactc

SEQ ID NO: 551967 - DNA, 526 bp, Homo sapiens
ttcagtttaaaggatttccaattagtgtctttgcagtaacaactgtgttaaattgatctaatcgtgtctgtctaacccttatgcatgcattcactcactttatcaaacaacatttattctgtatcacatactggagataargagatgaatgaaacagagccccaggctttaaggacttgatattctggagcaagggatagcagactttcttttaaatggctggacaataaatattttggacttcgagggccatggggtctctggtgcagctattcaatatgtaaatgaatgagtacggctgtgttccaatcagattttatttacaaaaataggtggggagctggatttggccttcaggcccaggcttactggccttcatcctagaggagtgagttaagtctgtagcaggctactgataagtacagagggccaaaatctgtgaaggatagagaatggggagatgagaagacaatgggttaggaaatgggttatggaactgggggtactttgagaagtaaaggagaac

SEQ ID NO: 551968 - DNA, 1311 bp, Homo sapiens
gtctcagaaccctgggtgaagtcagctcagaccttgctggggtccttacccggactttttccagggtctcctttttggccctttggtcctggtgacccagaaggccctggatttcctggaggccccaactttccaggggggccctgtaagcctctgagcccttggcctgttggaagacaaaggaaatgtgacttaatatctatgttcttgctctctctcttcaagagtttgatgcccaatcccttctcaggagaarggagaccttgacccaggactgacctttctgagcactgctctcaataactgtatggtgggcacctgagagcaataacttaagaaataaagttgccacgtggaggttgctgcagggagggtgcaaagtgaaaattaactgcatttgtttttaccagtagttgttgttctcctgtccagcccactgctgctggatctccctgtaaacagattcccccagtaaaacctatgtttgtttgctgactccatctcttctttggcctcttgaacctggtgccatccctactgaagtgaataggggtctgacatgacaatgacccagagaagaaaaattcatcctgtgtcccacgggatggcctgacctgtgggccactttcctgggctggcaagacaactattagtcacaaactgctgtgtggaattctgagatgccagagaatgagagctgaatctctgttttgagttacagtatagttgagaaaaatatactcaaataggacatcagtctcctcatatccccaggcagtttcctctggaaggtaaagaattgcagagacagaacagcccaacacgtacctggttcccccttttctcccttggtgccatcacgcccatctttgcctgggaagccgttgatgcctggagagctacaggcaatcactgcagggcaggtcttttgggcatcctcacaggtcacagtttctgagtaagacgctgccaccatactcaggagaaggagagggagtgatggaaacagggacatggtcctcaccttggtgtgagaaaactcagggaaggttaatctcagttaatgaacacatatttaccgagcatgccctctgtcctacaatctgggtgcaggctatatagaaatagatgacccatccctggcctctagctggggatttggaaaagtaaacattccttgtgacactgcgtgactagtactttaacaaaggtaggcactatgatgagcagtggggatcctaaggaggggttcatctgtgcctagacacctggcgttgctgctggaagactataaacatgctttcggtggca

SEQ ID NO: 551969 - DNA, 1311 bp, Homo sapiens
gtctcagaaccctgggtgaagtcagctcagaccttgctggggtccttacccggactttttccagggtctcctttttggccctttggtcctggtgacccagaaggccctggatttcctggaggccccaactttccaggggggccctgtaagcctctgagcccttggcctgttggaagacaaaggaaatgtgacttaatatctatgttcttgctctctctcttcaagagtttgatgcccaatcccttctcaggagaaaggagaccttgacccaggactgacctttctgagcactgctctcaataactgtatggtgkgcacctgagagcaataacttaagaaataaagttgccacgtggaggttgctgcagggagggtgcaaagtgaaaattaactgcatttgtttttaccagtagttgttgttctcctgtccagcccactgctgctggatctccctgtaaacagattcccccagtaaaacctatgtttgtttgctgactccatctcttctttggcctcttgaacctggtgccatccctactgaagtgaataggggtctgacatgacaatgacccagagaagaaaaattcatcctgtgtcccacgggatggcctgacctgtgggccactttcctgggctggcaagacaactattagtcacaaactgctgtgtggaattctgagatgccagagaatgagagctgaatctctgttttgagttacagtatagttgagaaaaatatactcaaataggacatcagtctcctcatatccccaggcagtttcctctggaaggtaaagaattgcagagacagaacagcccaacacgtacctggttcccccttttctcccttggtgccatcacgcccatctttgcctgggaagccgttgatgcctggagagctacaggcaatcactgcagggcaggtcttttgggcatcctcacaggtcacagtttctgagtaagacgctgccaccatactcaggagaaggagagggagtgatggaaacagggacatggtcctcaccttggtgtgagaaaactcagggaaggttaatctcagttaatgaacacatatttaccgagcatgccctctgtcctacaatctgggtgcaggctatatagaaatagatgacccatccctggcctctagctggggatttggaaaagtaaacattccttgtgacactgcgtgactagtactttaacaaaggtaggcactatgatgagcagtggggatcctaaggaggggttcatctgtgcctagacacctggcgttgctgctggaagactataaacatgctttcggtggca

SEQ ID NO: 551970 - DNA, 647 bp, Homo sapiens
tgacacacataacatcctttgatcamaaatcttcaggggatccccactcctgacaggtgctctgtggctggtgctcccctgcccttttccctcaaggcgcccaaagaacttgcaatatccgaggagcacaaagagataaccagaggagacttcttgccgacaagaagtacaagcattcctaatggcttgaggggacagtattatcactgcacacctgtaattcatgcccagcccagtataagggctgggaaacctggttaggtaatcaggccctctgcaaccatatttctcatcttttctctacagcagtgcttctcaaactttaatgtgtataggggttacctgggatcttgtgaaaatgcaaattctgtttccctgggtctgggaatggggcctgacattttgcatttctaaaaagcttccaggtggggcggctctgctggtcagagaaccacattctacgtaaagagactctagcaatggtccctcacctcggctgtacactaaaatcatgtgtaaaactcaaaaatcctgatgctcaagctataccttagatcaattaaagcagaatgatggctcatgcctgtaatcctagcactctgggaggccgaggagggtggctcacttgaggtcaggagttcgagacc

SEQ ID NO: 551971 - DNA, 540 bp, Homo sapiens
taatcagggaggcagggtatctgcagagccatcaaaaattgccagcagggttttctagccctttgttatcagtttcccaactaacattgaagcttcatcttcctgttctgtctaccctctatgctccaaccacatgtctctgaccactgctcacatttccacaccccagatcttcattcaagctgttccctcacccaggaatatcctcccacctgtctttacctcctatcacgattctcagaccctcaagtcttggtccaaatgtctgtgctcaaatgtcaccatctccactaggccttccttaactactcyattgaaaacttcaattccgcccacacctcagcactccctagaccttctcccagcctctcatcttctagcacattctataatttgcttgttttatttctcacctgtccccctcctaccagaaagtaagctttctggtcaggaattttgtctgttttgtccacagatgtattcccagtacctgggccattcagtgacatgcaataaatatttactgaatgaatgaatgac

SEQ ID NO: 551972 - DNA, 633 bp, Homo sapiens
gatttgagcaatgaaaaccaagtccaagtggacaccagcttgcactgaaggagagggcaataaattggatccagaccgggatagggttcccagacctgctgtctgctggctacttggccctgagcaagactyttcatccctttgagccttcgtttcctcatctatgaaatgggacatttccaaagtattgtataccttttctccagggatcaaatcagattctatgtgaatgtgctttgccaacctgaaagggcactggaggtatcagtcttgacgacctgccaagcaactcacccaccacttgttcaaacatgtgattttcctatctcagacatcctgtaacagggcctgaggggaaactggagagaaggaactctaatcccacattggcgtcaatagccgatcacctaaagcgagaaatcttctctcaggaagataagggaacccacatatcacctaattaaagcaagcagctgcacacaagttcaaaggcgggacaggctgactcagcctgctgctcctgggcggtcagagtgagcatcggctaacgcggcctggggtgccttggctacaggaacagacatctacctgtaagggcaacgcgaatgaaaggagaaggatgggggcagggga

SEQ ID NO: 551973 - DNA, 633 bp, Homo sapiens
gatttgagcaatgaaaaccaagtccaagtggacaccagcttgcactgaaggagagggcaataaattggatccagaccgggatagggttcccagacctgctgtctgctggctacttggccctgagcaagactcttcatccctttgagccttcgtttcctcatctatgaaatgggacatttccaaagtattgtatacctkttctccagggatcaaatcagattctatgtgaatgtgctttgccaacctgaaagggcactggaggtatcagtcttgacgacctgccaagcaactcacccaccacttgttcaaacatgtgattttcctatctcagacatcctgtaacagggcctgaggggaaactggagagaaggaactctaatcccacattggcgtcaatagccgatcacctaaagcgagaaatcttctctcaggaagataagggaacccacatatcacctaattaaagcaagcagctgcacacaagttcaaaggcgggacaggctgactcagcctgctgctcctgggcggtcagagtgagcatcggctaacgcggcctggggtgccttggctacaggaacagacatctacctgtaagggcaacgcgaatgaaaggagaaggatgggggcagggga

SEQ ID NO: 551974 - DNA, 633 bp, Homo sapiens
gatttgagcaatgaaaaccaagtccaagtggacaccagcttgcactgaaggagagggcaataaattggatccagaccgggatagggttcccagacctgctgtctgctggctacttggccctgagcaagactcttcatccctttgagccttcgtttcctcatctatgaaatgggacatttccaaagtattgtataccttttctccagggatcaaatcagattctatgtgaatgtgctttgccaacctgaaagggcactggaggtatcagtcttgacgacctgccaagcaactcacccaccacttgttcaaacatgtgattttcctatctcagacatcctgtaacagggcctgaggggaaactggagagaaggaactctaatcccacattggcgtcaatagccgatcacctaaagsgagaaatcttctctcaggaagataagggaacccacatatcacctaattaaagcaagcagctgcacacaagttcaaaggcgggacaggctgactcagcctgctgctcctgggcggtcagagtgagcatcggctaacgcggcctggggtgccttggctacaggaacagacatctacctgtaagggcaacgcgaatgaaaggagaaggatgggggcagggga

SEQ ID NO: 551975 - DNA, 633 bp, Homo sapiens
gatttgagcaatgaaaaccaagtccaagtggacaccagcttgcactgaaggagagggcaataaattggatccagaccgggatagggttcccagacctgctgtctgctggctacttggccctgagcaagactcttcatccctttgagccttcgtttcctcatctatgaaatgggacatttccaaagtattgtataccttttctccagggatcaaatcagattctatgtgaatgtgctttgccaacctgaaagggcactggaggtatcagtcttgacgacctgccaagcaactcacccaccacttgttcaaacatgtgattttcctatctcagacatcctgtaacagggcctgaggggaaactggagagaaggaactctaatcccacattggcgtcaatagccgatcacctaaagcgagaaatcttctctcaggaagataagggaacccacatatcayctaattaaagcaagcagctgcacacaagttcaaaggcgggacaggctgactcagcctgctgctcctgggcggtcagagtgagcatcggctaacgcggcctggggtgccttggctacaggaacagacatctacctgtaagggcaacgcgaatgaaaggagaaggatgggggcagggga

SEQ ID NO: 551976 - DNA, 642 bp, Homo sapiens
tcctctcaattttctagtccagatttagaccttcctctgaacaagaggaaaagtcattcttcaacttcatgtcttcgctaaaacacactagaagtcaaatcatgagctacaaacttttctactaaactttgtcctccagtgctccctggctttcttcatccaggcacagaccaacatgaagatttggagaaagaccaaaatctcagggggtggcctctcagagcrttcaactaggaaggtaaacagcgttccaaccctgcctctcactacccatcctcctgctgatggagggaccggatgtccatgtatcaaagaggtgttttgccaacatccctcagatctgtatcaaatataattttcaaaccaattagctcaaaaagcatcacaaccaaagcagtatctcccacattctcattacggggccatcctattcaattcctaatgagaggagagacaaaggcagtagatgcaataggatctacttcaaaaattcttttttcttttagaaaacagatcctcttttgttctggttaaacaccaattactctgctctaacatgcaaatcagctgaaaatagggcaatatgtagctcactctggttccatggcaagttagaaggaagaaaagagaaagagaacaagg

SEQ ID NO: 551977 - DNA, 642 bp, Homo sapiens
tgagccctccccagcccctcgaggaggggctcacaccgagatcaatccatgatgacagcacttcatggcccgtctcaaacacacaggcccactccctggtctggcccaggctggggtgcycagggcctctgtgttgttcacctgcaaatccccagccccgttctgtgtgttctgaggcccacctgggtcttctttctgttgctccagctggaggcttcttggggtagctgcactgtcctttctgcaggaaagctggtttttttggtttttttttttttgagaaagagtcacttggtcgcccaggctggagtgcagtggtgccatctcagctcactgcaacttccacaccccaggttcaagcgattgtcctgcctcagcctcccgagtagctgggactacaggcatgtgccaccacgccgggctcacttttgtatttttagtagagatggggtttcaccatgttggtcaggctggtctcaaactcctgacctcaggtgatctgcccaccttggcctcccaaagtgctgggatttacaggcgtgagccaccttgcccggccaggaaagctgttctgatggagaatggcccagctgggcagctgcaggggctaagtggagtaagccacctgcactgtatgcccgc

SEQ ID NO: 551978 - DNA, 642 bp, Homo sapiens
tgagccctccccagcccctcgaggaggggctcacaccgagatcaatccatgatgacagcacttcatggcccgtctcaaacacacaggcccactccctggtctggcccaggctggggtgctcagggcctctgtgttgttcacctgcaaatccccagccccgttctgtgtgttctgaggcccacctgggtcttctttctgttgctccagctggaggcttcttggggtagctgcactgtcctttctgcaggaaagctggtttttttgktttttttttttttgagaaagagtcacttggtcgcccaggctggagtgcagtggtgccatctcagctcactgcaacttccacaccccaggttcaagcgattgtcctgcctcagcctcccgagtagctgggactacaggcatgtgccaccacgccgggctcacttttgtatttttagtagagatggggtttcaccatgttggtcaggctggtctcaaactcctgacctcaggtgatctgcccaccttggcctcccaaagtgctgggatttacaggcgtgagccaccttgcccggccaggaaagctgttctgatggagaatggcccagctgggcagctgcaggggctaagtggagtaagccacctgcactgtatgcccgc

SEQ ID NO: 551979 - DNA, 566 bp, Homo sapiens
ctatcacttttacttactagtatttctttttgcaaaaacttatctattattatttaaartccagacaagattcatctctacaacacagtaatcacagatcttttcattgataatgtggcacctccttcagggttggaactttgtataaatttgggacactttaattttggaaataacataaaattatttatctctaaaagcagtaaagcagaaaaaattggggtatcatctgttgagataaaaaaatgtggcgtgactgtacatgcgtaaagttggaaactccaacatggaaacaattcggtattgtacaattatgtctctatcttgttttatctatcaataaatggctttacctctgaaaaagatgttaagcagtattgcttaggaaaatccttgcattttctgaggtaactaaactacatattcaagatagactcttacaagtcaaaaatatatgaaagtgacataacaataagaaataaatatgcaaatgataatggagaaatggaagaaatattaaaataaaaaaacattaaaatttaatattaaaaatattaaaatgcttt

SEQ ID NO: 551980 - DNA, 566 bp, Homo sapiens
ctatcacttttacttactagtatttctttttgcaaaaacttatctattattatttaaaatccagacaagattcatctctacaacacagtaatcacagatcttttcattgataatgtggcacctccttcagggttggaactttktataaatttgggacactttaattttggaaataacataaaattatttatctctaaaagcagtaaagcagaaaaaattggggtatcatctgttgagataaaaaaatgtggcgtgactgtacatgcgtaaagttggaaactccaacatggaaacaattcggtattgtacaattatgtctctatcttgttttatctatcaataaatggctttacctctgaaaaagatgttaagcagtattgcttaggaaaatccttgcattttctgaggtaactaaactacatattcaagatagactcttacaagtcaaaaatatatgaaagtgacataacaataagaaataaatatgcaaatgataatggagaaatggaagaaatattaaaataaaaaaacattaaaatttaatattaaaaatattaaaatgcttt

SEQ ID NO: 551981 - DNA, 549 bp, Homo sapiens
agtgctcttctaccaaagagaattaaaaaacaaacaagcacccctctctattgccccagtgtctttctttgtcctcttgataagtgtttcttctgttttttcactctctcctaaagaactatcaaagttttcttgttaaaagcaccattttgttgtattatgttcttttttagggactttcactgaattgctgtttttacagayaaatcaaccctttacagtgagatgaaagatcattcacacaacacctcaatctttcttttctttgacatttcccaacattgttttttcaacacgagctatcctatgtgccagacattgtcattggtttacacatttgtttgcaccttttcctccccatttaatgttcttggaagttaggatattttgattcaatgaaaaagaagtagcttaaatttctgcttttgtcaggtcctttctcattcttttagaaataatgggtattttgctttaaattcacaacttattcttaatatctctgttatgacactaagcatattggattggattgccatcactaatttaccc

SEQ ID NO: 551982 - DNA, 552 bp, Homo sapiens
aaatattcattatgtattaaacagtataatcttatccaaataggttcttcatactcatattttaccttgttccctgacacaaatatctagggcttccattaataagggtctgataggatttgcctctgtgttcctgctcaaatatcatgtcaaattgtaatcccttatgttggaggtggggggcctagtgggaggtgattggatcatgggggaaaatttcccctttggtgctgttcttgtgatagtgagtgagtgattgcaagatctggttctttaaaagtgtgtrtcacctctcaccccttccacttccttctgctccaggcatgtaagatgtgactgcttcccttttgccttccatcatgattgttaagtttcctgaggcctttccagaagcagaagcctgcatagccttcaggactgtgatcaaattaaaactcttcccttcatcaattacccagtttcaggtatttctttatagcagtgtgagaatggactaatatagggtctctttccatcagccatcaacttttaactacattttatatttagaag

SEQ ID NO: 551983 - DNA, 567 bp, Homo sapiens
agggtggtgatgagatggagagaaggggtcctggactcgggtgcaacaagagggaaggaagaggtggctgcctgtctgcaggagaagccgtgtccatgtgtagagctgctgtggaccagggggaggcagggagggcacagggtggtgatgagatggagagaaggggtcctggactcgggtgcaacaagagggaaggaacaggtggctgcctgtctgcaggagaagctgtgcctgtgtgtagagctgctgtggaccagggggaggcagggagggcacagggtggtgagatggagagagggggtcctggactcacacgagtgccatcttttcccgtcgcttcttctgctttgccgcctgggcagtgggctggcacccraaccggcaagtaggggcattgggaaagatccctcaagatttcccaagcctaaattactccttgtggttcttgttcacgtctgcccctgctacctgggacctcctccagcatcctcctccccaaagacttctctgcctttctgaaggaagaccaggctgtttctgtatcgggaggtggtggggacaggggtg

SEQ ID NO: 551984 - DNA, 1056 bp, Homo sapiens
atgtgtatttaattgaagaactgatagaaaagtttctttaattaggctgacttcataaaggggagacaaatcccttgccatcctagaagccatcttttgtctgtaggaaaggccattttgtttttgaacaggagatttccctcttcttatttccccactgttgggtctcatttgtgaagttcaaagatagaagggggttaattytagagtagcctttctgattttttttaaaccaaatatgcatggtggtaggaacatttgaacacactgcagcaagacttgctgatttctcaatcttttttttttttttgagatggagtctctgttgctctgttgcccaggccggggtgcagtggcatgatctcagctcactgcaacctctgcctcctaggttcaagtgattctcctgcctcagcctcccaagtagctgggactacaggcatgcaccaccacgcccggctaatttttgtatttttagtagagatggggtttcaccatgttggccaggttggtcttgaactcctgacctcaggtgagccacccacctcggcctcccaaagtgctgggattataggcgtaagccactgcgcccggccttctctgacaatcttaacagcttccctgactacaaaggataagcctggagaggattattaatgccaaacatctgttttgctttttatggtcaggcttgtgctgagtctgtctgacacaatatttaatagtcacagaaaccctacaagggagatcagcttgtggttatcatttacagatggggagactaagatagtgatattgagaaatttgctgtgtgaccatgagcaagatactggacttctctgggccttaccttgtttatctgtaaaacaaagacattgagattaaatagcttccaccatccccattttctctaggcttgggacaaaataaaatcaaaaacactaaagccagacttaccatggcagtgggattgtctgggggtggaggtgttgatgttattgacaaggaagcaggcccatgcttttgtcattggtttaaaattccttgagccgagcc

SEQ ID NO: 551985 - DNA, 624 bp, Homo sapiens
cccaacaaccatttatactggttttgaccaaatgtatggattttgttgccactgtttgggtaagtgatgggagggacccagtttatatgatgggcacccaaaccaatgttttatagagtgatcataattataaygacccttggcttgtgggaagcagttcatgtcttactacaagcttcccggggcattccatcatcagattctcaccacaaccccgtaagaagcatgtttcgtggcatcgtcattctagcttagatgacttcctgacttcaacactgctagctggtggtctggccttgcctcctcctaactcatcctctatacagtctccagagaggtcgttccaaatggaaacccaaacatgccagtctcctacttaaaatcagcctgatgtttcatggttcacatttgcaacatggaagagaagggcctctgtgatctagcccctgtctaactcttcagccttatctcccgtcactcttccctcacattttttatcccggctgtgctgccttttatatagttccctgcacaccatgctgtcttcttgtccctgggtctttgttcatatggcttcctctgccagagataccccaccatgtaattattacactaatgcccaat

SEQ ID NO: 551986 - DNA, 968 bp, Homo sapiens
gcctggcacccagtctccctttttctggtaagagcagccaagtttcctttgaaaaatcacttcccccaaccttcagtctaggtgacggatgtggggctgaccctgcagagctgattctatacccctgcttctcaccccaggggtaggcatctgggccatagttgctgattagtgcagtccatgacctcagacaggcacagtgtggtggggtggggctgtgtgtcctcmggggctcaccttatttctgtgcctcagtctcttcacatgggcatgtggcgtgccagtccaatgggaatctttgctaggattttgttgggactactgagaaagtggttctctcttttcctctctctggtgggggtggtgtgctatgggatatggggttggacctcttagtagaaggaagatctgatgagtccagagacagatttttctcagcattgtgtgaaggcctgggcctggctgtggctgtggtcaccactcccctgggctttccagtagcatgcaccagtcattcccttttgtgggaagatcagggttttgtttttgtttttgtttttgagacggagtctcgcactgtcggctgggctggagtgcagtggcgtgaactcggctcactgcaacctctgcctcccaggaagcaattctccttgcctcagcctcccagtagctgggattgcaggtgcctgccaccactcctggctattttttttttttttttttagtagagatgggatttcactatgctggccaggcgggtctcgaattcctaacctcgtgatctgcctgccttggcctcccaaagtgcagggattataggcgtgagccaccgtgctccgtcgaagatcagttttaaatggggtcaggacaggggtggggcagcagagtaaaacgagtgagaattgtttgaatatcttcagactttagcatcttctggcttttctctcctcttttaactcatgagacac

SEQ ID NO: 551987 - DNA, 968 bp, Homo sapiens
gcctggcacccagtctccctttttctggtaagagcagccaagtttcctttgaaaaatcacttcccccaaccttcagtctaggtgacggatgtggggctgaccctgcagagctgattctatacccctgcttctcaccccaggggtaggcatctgggccatagttgctgattagtgcagtccatgacctcagacaggcacagtgtggtggggtggggctgtgtgtcctcaggggctcaccttatttctgtgcctcagtctcttcacatgggcatgtggcgtgccagtccaatgggaatctttgctaggattttgttgggactactgagaaagtggttctctcttttcctctctctggtgggggtggtgtgctatgggatatggggttggacctcttagtagaaggaagatctgatgagtccagagacagatttttctcagcattgtgtgaaggcctgggcctggctgtggctgtggtcaccactcccctgggctttccagtagcatgcaccagtcattcccttttgtgggaagatcagggttttgtttttgtttttgtttttgagacggagtctcgcactgtcggctgggctggagtgcagtggcgtgaactcggctcactgcaacctctgcctcccaggaagcaattctccttgcctcagcctcccagtagctgggattgcaggtgcctgccaccactcctggctattttttttttttttttttagtagagatgggatttcactatgctggccaggcgggtctcsaattcctaacctcgtgatctgcctgccttggcctcccaaagtgcagggattataggcgtgagccaccgtgctccgtcgaagatcagttttaaatggggtcaggacaggggtggggcagcagagtaaaacgagtgagaattgtttgaatatcttcagactttagcatcttctggcttttctctcctcttttaactcatgagacac

SEQ ID NO: 551988 - DNA, 543 bp, Homo sapiens
aagtgaaatccagagagactctgagggtaagaaatgaacatgccatcactggttctgagatggagggggctctctgcagggatgggagagacctcatgagcagttcccactgtcagtcagtaaggaaatgggatcttatcctgcaggtgaatccttccagcaacctgaatgaccttgaaaatgaattttcccctgagcttccagaatgacataagccctattgataccttgagctccatcctgagagaccctaactgagaaacctaattgagcaacactgtgcctaggctttctgactcacggaaactgtaaataataaaaggatgtggctctaagccaccaagtttttggttgttacagcagcaatagagaactaatgcgctttcctaaatctttgaagatatgggttgttactttaattttatgggttgaggaaagtaaatttcttgtaaactgggatttgaatatagacctgtytggcttcaaagaactttttaactccaaaaatattatgcttccttccatgagatattgacatatctt

SEQ ID NO: 551989 - DNA, 1341 bp, Homo sapiens
gtaagcattgtgataaattctatatgtacattaactaatgtaatccctatatttactcagtgagaaaaacattattattttcttcttatacaaatgagattataggtccaaaaaaagccaagtaattcctgtgatagaagcagaaaatttctcttaacatgtttcaggtcaaagtcagttttgttttccttgaaaggtaagaataggctttaatgaaataatttttcaagtggaaaaacagattcaacattcttatcagagaaaactaaggtagccactacatataaataacttttagaagtcgactctatcttaagaagaatgatattcctttagagaaaagtccaaattgtgttcccacatgtttaaaatgaaaggtcaattctgagtcccacacatctctcaaccaaagcacatgaatctgtctttattcagcagaacataattccgaaaacaattctaatttgtgctttgtcactgttattcttatttcartcacactatttaataaatcttcattaaaaaatctaaatttgggagtggtaagcaatgtgtgactacacaaattaataaggaaaatactattttaaaaaataagaataattttgaatttaggaggccatattataaactttaatatttaaagaaattgctgacttattttctattgcccaagtaataatacaggacagtcttggattttgtattcaatttatccaatatacagcacatgggtttagaagggctttatctcttttttactgtattattttgtttttaaattggcatcaaaataatggggcatgattctgtataattttaagatttcagaattgaaggcatcatatatcccagtaacttcgtataatgtttcattactacatgccaacatattaaaaaagattatacaccatgcctaagtgagatgtgttccaggactgctaggttgttttaacatcccaaaatcaatcaatataatatgccagaatataggatggaaaccacataataatctgatagagaaaaaggatttgctaaaacccaacagcatttcttgataaaaacatccaacaaactaggaagaaaaaggaactttcttcctaaaaacaagcatttacaaaacaccacagccaacatcatgctaaaagactgaaagctttcctcctaagatgaggaacaagacaagcagttctgttctttttgcttctattcaacattgtactggaggttttagccatggcaaactagcaagaaaaataataaaattcacctgggttggaaaaagaggaatctggaaaacctacttgaagatgacacaattttgcatacagaaaatcctat

SEQ ID NO: 551990 - DNA, 1341 bp, Homo sapiens
gtaagcattgtgataaattctatatgtacattaactaatgtaatccctatatttactcagtgagaaaaacattattattttcttcttatacaaatgagattataggtccaaaaaaagccaagtaattcctgtgatagaagcagaaaatttctcttaacatgtttcaggtcaaagtcagttttgttttccttgaaaggtaagaataggctttaatgaaataatttttcaagtggaaaaacagattcaacattcttatcagagaaaactaaggtagccactacatataaataacttttagaagtcgactctatcttaagaagaatgatattcctttagagaaaagtccaaattgtgttcccacatgtttaaaatgaaaggtcaattctgagtcccacacatctctcaaccaaagcacatgaatctgtctttattcagcagaacataattccgaaaacaattctaatttgtgctttgtcactgttattcttatttcaatcacactatttaataaatcttcattaaaaaatmtaaatttgggagtggtaagcaatgtgtgactacacaaattaataaggaaaatactattttaaaaaataagaataattttgaatttaggaggccatattataaactttaatatttaaagaaattgctgacttattttctattgcccaagtaataatacaggacagtcttggattttgtattcaatttatccaatatacagcacatgggtttagaagggctttatctcttttttactgtattattttgtttttaaattggcatcaaaataatggggcatgattctgtataattttaagatttcagaattgaaggcatcatatatcccagtaacttcgtataatgtttcattactacatgccaacatattaaaaaagattatacaccatgcctaagtgagatgtgttccaggactgctaggttgttttaacatcccaaaatcaatcaatataatatgccagaatataggatggaaaccacataataatctgatagagaaaaaggatttgctaaaacccaacagcatttcttgataaaaacatccaacaaactaggaagaaaaaggaactttcttcctaaaaacaagcatttacaaaacaccacagccaacatcatgctaaaagactgaaagctttcctcctaagatgaggaacaagacaagcagttctgttctttttgcttctattcaacattgtactggaggttttagccatggcaaactagcaagaaaaataataaaattcacctgggttggaaaaagaggaatctggaaaacctacttgaagatgacacaattttgcatacagaaaatcctat

SEQ ID NO: 551991 - DNA, 559 bp, Homo sapiens
cactctggcttccctgccttctgcaaatatgctcctctccctyttcctgacctccccaccccaacccctgtgggatgagccaggctggcaagtcaggtgggaactgggccgattcctgctgggactctcacctaggatgtcctgctcctccttcccatcactgtctaaatcaccccatctttccaggtggtgaagaagcctcacagccatccccaacatctccagaccctgtgactcttcctgcccgctgggtgttggtgcaggaatggggcattgtggagattaagccagagttggggacttgaaggaaattttgctgacttcatcagccatccttggcctgacagccaatgacagtgtttgaagacgggtcactgcttctatgtcttcgggtagtgtgactcatttctcagaagacgggcatatatattctatctattttcagtggaactcatatttaaagcttgtggagttccagctttgtgtgaaaaaaaatactaacccttctcaaagtgatagaaataagccgttttctcttttcttttctctgtaggacagt

SEQ ID NO: 551992 - DNA, 558 bp, Homo sapiens
gcttttgttggctgggtggctgtggagagagttcctaccccatgggtctgaggacaaaatggcaccaatcgcctccataaacagggttcgccacttcgcaattcatcacttacagtttacaggtcacagagcacttgctcatgggttcatttcacatgagtgatctcgcttagtcttgaggtgggaggctggggttctagactcagcaccttcacctgtagcgggtgacctggggtaagcacctgaaccactgtgtcccatgggctctctgttggccaaatgggacgacattacagctctttcaggttgtcctgggaatcagaggcgaggcctagtacggggctgggctcactgtatgctctcagatcaagggaaaggacactacggttgtggttgccgctattccmccctcagtgtcctcatccgtcatgtgtgttgaacacactctgtgtagccccatgttctgtgggaagcctggagctcctgaggcctctatggggcaggccctgctcgagcagggtagtttgcacagccaggctttcccaccttccctcaccc

SEQ ID NO: 551993 - DNA, 499 bp, Homo sapiens
gagagctagattagaggtatactaattagagaraaaaaaaaactgtagtcctggctaatttaagtgggctaacagcttaaagagggtagtgcttagagcagactgcaaggaaatgcctttggaaagccggactgcacccacacccgggatggtgcaaatatgccaagcccagctatggctggagactaaacctgttccagcagaggcgcccagagcttcctgggctctcagcagcgctcttctcatttatgtaacatttgggacttccttaaagagcagatgcaactgatttccagcttgttgtttttacatacataactgtaattcataaggagaaataccaaagagtggaggactgcaaccctgtcttttgcttctgctttgtttttccacacccagagagaaatgagctgctggggcaactccatgccattgaaagaccacaagtttcctgtggcagctccagaggggaagggacaatggtgcaaagatcttgact

SEQ ID NO: 551994 - DNA, 648 bp, Homo sapiens
ttcttcccctgtattttttccctgtatttttcatattgaatgatttctgtttatctgttttcaagctcaatgaccctttcttctatcatctttaatctgctgttttgttcatctagtgaatttttatttaaaatactgtaagttctggaatttattttgggttctttattggttctgttactttcttgagatttctcatctatttattaattatagccatattttcctttaagtcagctggatgatgtctagtaccttttactctgtcagggccagtcttttaggcaaaatttcttcttgcttttttaatataagtatgctttgttttgtgattggattgcaagagtagttggcaggatctcttaatgttcatccagcaattttttattgtctaccatgtacctagcattttgctaggatgcagtgatgaacaggacagatatgatctctgtccttgaggagataatagtcctctacctaaaatatcttatcctaattgtagatttacagagcttgactaatttcttttctggctttcatgtgactaaaagtstttttctttttttagaggacagaagttgacttctaagactattaatttttagagttacatttttaaattagctttaaagatatgaagcccagtgt

SEQ ID NO: 551995 - DNA, 918 bp, Homo sapiens
cccagggccacacagctggtcagtggcagagccaggaattgaggtgtctacctgactccacagtttttaatttagataaactctaagcttatctaactacaaaaacagagcaaagagtattaggaagccagtattagctaacataaatgagaaatggatactaagcaagagaaagtaaatgtgagaaggggaacccttgttactctgtgagacacagctgaccttggtgcagcaagttttctgaatgcaaagcccagagacagcttcaccttggaggagtgaggccgtctaccaagccctgtgaaaaggagcacctgaacagaaccgagacaacctcagacttgcttcaagcccgtgttcacaaaataatccaatgggtgcactgagcccagtgacagcggctgccctcaccttgccctacatgtcctctttggaagagctggcatcttatatcacaactcgacagtcagctgccccttaaacagtgagactctcagttatggctctgggggaaggacttactasagaccatctccatagtttcataggtcagaagaaagcacctttgaagtgttagcccaattttacagttaaacagaagagaatgctgcttgaaggatcagatgatcaaagcagagattgaccatgctggtctgcaaaagtatgccctttaggtgtaagcccattttacaggtagcaaaactgagtccgagaatttaactggataggccatccaggttcactatgacttgcttaaaagcagtgttggactcaggtgactctaagcctcacagtctatcactaggttgcactatcttacccctttatagtcacacgatacagaataaataaaagtgaatcaactgagcggatcaaaataaaaacagaagtaaatcacttgagcaagcaggaggctgg

SEQ ID NO: 551996 - DNA, 918 bp, Homo sapiens
cccagggccacacagctggtcagtggcagagccaggaattgaggtgtctacctgactccacagtttttaatttagataaactctaagcttatctaactacaaaaacagagcaaagagtattaggaagccagtattagctaacataaatgagaaatggatactaagcaagagaaagtaaatgtgagaaggggaacccttgttactctgtgagacacagctgaccttggtgcagcaagttttctgaatgcaaagcccagagacagcttcaccttggaggagtgaggccgtctaccaagccctgtgaaaaggagcacctgaacagaaccgagacaacctcagacttgcttcaagcccgtgttcacaaaataatccaatgggtgcactgagcccagtgacagcggctgccctcaccttgccctacatgtcctctttggaagagctggcatcttatatcacaactcgacagtcagctgccccttaaacagtgagactctcagttatggctctgggggaaggacttactacagaccatctccatagtttcataggtcagaagaaagcacctttgaagtgttagcccaattttacagttaaacagaagagaatgctgcttgaaggatcagatgatcaaagcagagattgaccatgctggtctgyaaaagtatgccctttaggtgtaagcccattttacaggtagcaaaactgagtccgagaatttaactggataggccatccaggttcactatgacttgcttaaaagcagtgttggactcaggtgactctaagcctcacagtctatcactaggttgcactatcttacccctttatagtcacacgatacagaataaataaaagtgaatcaactgagcggatcaaaataaaaacagaagtaaatcacttgagcaagcaggaggctgg

SEQ ID NO: 551997 - DNA, 638 bp, Homo sapiens
tgtccagtcttgtctcttttttactgtcacaaatccaggtctgtaagaattgtgtcacattctaaggataaaagaatgatatatccattcatataatttatgttatttcctaaatatgtatattttaagttatcatcttagtttgagtttggcatatgagggaattgtgacccatctagttgtgagattgctattcatttggtcagactctagtctcatctcaccactgctggtgatcttttcatgtcttggataatatgatttctttgacacatataaaataataagcaaccttttgccttggccagttcagactgtcatgaaggggtatagtcagctgtttctgcataatggaaatgtccatagcattgcccttattattgtacttggtatcaggtcacctgccttctcttatttacttttatattatgctcatctcagttttgtgtgatgcagtttgtgcacaggaagctcatccttttccaattcgctgtgtgtttacktctttagttttcaaccaaagttttgtaatttgtgttggttttgtcagttttaaagaaataaaccatattcaacttaaagtcgaatttgttattaattttttatatcctttattctttaggcagatgatgttgagg

SEQ ID NO: 551998 - DNA, 688 bp, Homo sapiens
tggccatgggacctgtagtgatgttcctgctttcatttctaatgttatcaatatgtgtcctttctctcttttgcatagtttgcctggctagaaatttgttgattttaacaatcttctcaaataactagcttttgcgtttttaaaaaaatatctctattgattttatgttcataattttattgatttcttctgtaattcttattatttattttttctgcttactttgaatttaatttgctttttcttttctaagttttaatgtgaaaacttaggtgattgattttagatttttcttcctttctaatatatgaattcaatgctataaatttccctctaagcactactttcactgcatctacaaatttggatatattttcatttcatttggttaaaaacagatttcttctttgacccatgtattatatagaggtatrtaatttaatattcatgcatgtgggattttcaagtatctgtctgttatggtttctagtttgtttccattgtgctctgaaagcagacattgcatgatttctattcttttcaatttattaacttatgttttatgtcccagaatgtggactactttcatgagtgtttcatgagcttgaaaagaatgtgtattataatgtttttcaaatttatgctctagaaagctttaaaaaaatatttcattcttgtcatgcagtga

SEQ ID NO: 551999 - DNA, 1867 bp, Homo sapiens
atatcaatacggttgaatcttcatatataacatttaaaaagaatagataaatgaatttcaagcttgtttggctgtctgtaggcctctatttatagaattaaaggggtcatttcttatcttgccctgcacattgctcagttaatgcatgtatgcacttcctttgaagtcagtgggatctcagctcttggatattctttcgtggcaaggagaaaaagagaaatcaatttactgtcatgaatatcatagtagaatatctttttaagtcaaaattttatagtgcttcttaaaatccataatcaattttgtcttattggggaagatgcaatctcaggataaacaaataaagtattttaattttattagagagaattagaatgccatttttgatgtgtgaagaatgagtctatctctcatcctggcctgaagttacttggaattatttcaggaaattgtctcagtggtctatatgttattttattagtttaaaactaccttgtaattaagatattgttatccattatacaaatcaaaaaatggggatctgagaggttaagtaccttccttgttctaagtcaatagatattaaatggaatatgtaaagctaagtttgtctaggtgtctaatgaacctggagaaaaagaaagtacttattcttctcagaaattgtacagtaattatacttttcatatattaatgtgcttatttttatctatatccacatatacaaaaaatacacataaacacaataaatatcagatatatgggaagtcactttaaagaaggcagtatgtgttrgtgaacgcaaatataagattcagatttttataaatattttttatttagaagcaacctaagtgttcaacagcagataaatggacaaataaaatgtgttacttatatataatggagtactattcagccatgaaaagaatgagattctgtcctttgcaacagcatgaatagaactagatggaattaatcatgctacgtaaaataagccaggcacagaaagacaaacatcacatgttctcacttatttgtggtatctaaaaatcaaaacaattaaactcatcgagatacagagtaaaaggatggttaccagaggtggggaatggtagttgggggttggtgatggttaatgggtacaaagataaagttagaaagaatgaataagacctagtatttgatagcacaatagggcgactatagtcaataataatttaatcatatattttaaaataactaaaataatatagttggattgtttgtaacacagaggataaatgcttgagaggatgggtaccccatattacacaatgtgattattatgcattgtatgcctgtaacaaaatatatactccataaatatagatacctactatgtacccacaaaaaataaaagacccctaaaaatccttattattccaatttcaattagtttaaattgaagtcctaatttcacatatttaaaaggaggataatcatgacaagattgttacaagcaatataaataacacttgttaaccatctttggttcaaaaatcaataaacacttgctgttattaaaattatatattgaaagttatgaattaaagtttaaatagtgtccctctatatctctatttaatgtaaatgaaatttaaattataaaagaaaaactaagtgcccgggacttggaagaaatgcagttctctcattttgcatgtctttatgtagaaacataatttttacagctttgatgaagctacatattttggaaacagagctttgatgacctactttatcaaattgccaaatcacttttataaaattgcaaaaagactctcaacttgattagaaaagcactagagattattttaaatataac

SEQ ID NO: 552000 - DNA, 1163 bp, Homo sapiens
gtccaaaacgtatcaaaatcttaattgctataaattggtaatgactaccattatccaaaagcataatctcaaataacaccgcagctagctcctgtggtgttaaacttaacactcaccacagtatgaaatcaagcctgttcactgagttcactcgagtttacctggtaggttacatcaactgggacgtcagatagcagactttcaggtaatgcagagctaatcatccttacccaacactcaaacacagtctttagataaaatgcctttttttaaactatcatataaattaagaaagttttcccaataagacaggaattttcagcttttggtgaaggctgggccatgagatgcagcagccattttgtagtacacagcctcttctctccactgttcaaacatacactaacatcctgctgctaagaagggactgtgtagatataattcaagtccttagccagctcatttttgtttaatcaaaagggagattttcttgagtgggcctgacttaatcacataaaagccctttaaaagaaggcctgaaacttgtggtggtgacacgcaccaggagggtcagctactctggaagctgaggcgggaggatcacttgagtccagaggttccgggccagtctgggcaacatagcgagaccccatctctaaaaaaaaaaaaaagaaaaaaaaaaaaagaaacaataactcaaggcctttaccctccctgagagcatctgcctgtccatggttggagtctgtccaccttctgtccgtctggtatcacaagtagcccacacctgaagtggagataccagtttctgctsgtcaactctctatgtaacagccacactggtctaaaaggtccaagacaaggcactgggcttaaagccctgcacaagctgtagtgggagtggctgcacagggcagccccacttgaggcccaagtgcacctgggggccatgtccgaggcatcaggaagatgatttcctgtgctcctgaaagtcaccagatctaaagctgctgctgcaatggccgtggtcctctctggagccttagccgacaacaggctcctggccctacccttgcccccataccagctgagcccctagaggcaagtcctccatgcgacagccctgcaaatggccgtatctcaggggttcacttccttgctcc

SEQ ID NO: 552001 - DNA, 602 bp, Homo sapiens
ggagaatcgcttgagcccaggaagcagatgttgtagtgaaccaagattgtcccactgcactccagcctgggcaacagagtgagactctatctcaaaagagagagaaagagagagaaactgaaaacttctgaccttacagatttatttaggcaaaaaaaaaaaaaaacaaaaaacaaaaaaaaaacaaagttgagagcatctcccagaataacagtgaagtgttaatgagctaattagcacttgtgcatggtttgctaataggtcctatgggaacagagaacctttggtatggaaaagtttattcttgacataattagagtattaactattcaaaggaaaaacttagatgttggattatatgagtgactttactaaaaattacaatgtattctataagaaaaraatttgagttaattgagtacatttgagttaatcgagtctgaaatccctgatgtgcttagttcccatcctagaagtgaatgtaaccactgatcgtatgttacttttttttttttttttttttttttttttgagacggagtctcgctctttcgcccaggctggagtgcagtggcgctatctcggctcactgcacgctccgcc

SEQ ID NO: 552002 - DNA, 534 bp, Homo sapiens
acacagagaggttaactaatttacccaaagtcacaaagcttataaatgatttattccacctctgcatgtggtaagcgcttaaacctcagaaaagcacttacttatctctcctcaatttaccagcctccacctgaaacctaattttaaggacaacttttggacaaatgtagcattaactccagaggttttactctttttagtttgaaaataaatattctctgcttactgatatatttctccagattcagtggaaaagttatttttttctgttactgctttattttttaaaagatttaaaattttaacaaacaaaaagcaaataaaataaacacaaagcctgaaacatattcagtgctggcgtagtttaattgtttgctctgcttcctttggtaagtgatttaaaaagtcatttgtttgttctaaaaacaagcraagcaaacaaaaaatacatattccatgctatttgggaaatgtaatatggaacaaaagttcacattaatgagaacctggactagcttcattaatttgtgagcc

SEQ ID NO: 552003 - DNA, 896 bp, Homo sapiens
gttgaaacaaaaggagcactgatttttatacaatattgatatggaggaagctcatcacacttttctatctgtgatattgatttagactggtcctggatggagtgagaaagtatatcggccccataatcctgcttttcatttgcaaaaaagttgtgtggagtacctgggtaaacaggtcctcatggaaattctcaaagctatttgtgatctagataattacttggtggaactcagaatgattcacatacactactaatattttgtggcttctactgagtcagaagttttttttcttctaacaattttttctttttcctttttgacatcagacattgggaatcacagacaagcaagaaagggaaaactcaaatacgtcttgtactgctttggataggaataacaaaagacaaaaacaaaacaataccactatttttggtatattgttccatttatatgcctgaaaatatatgttcagacttggtttctaatcacatccatggaagtagggcccwtcatgtcatatccacacctattgatgtggataatttgggtaagcttgttttcagcattgtctttgatttttaaaatataatttcttgctggaactacaagtatcaaatcaaatctattctttctttttccctaatatatgttctgattatgttaggcaagaagtaagactagtctatcttctttacgatatcagcacctctatcatttgaagatgatttttgaaatgatacaaaatctgcatgctatgctgtttgtaatgtgctagaggtgaacaagcctctgggttataaaatatttgcttaaaatggaagacttacaaaccggatgcttgcgattcaaaatacacaaacctaagatgtaggatattattaaacctaagtctt

SEQ ID NO: 552004 - DNA, 685 bp, Homo sapiens
ccactcagactttgctgagctgttgaaccttgaggggagttatctgataatagtggggacggggaaaaggaacagatgaaattcttttattttggtggcaactggccatcaggattttttttttttttttttttggaagtgagacccctggagttttcaggttcctgtccattctgagactgtttctttagcctgctccttgattcyatgacctcactatagcctttccataaactctcttctgcaaatgtgagtcagtttatttctgttgcttacaacccagaaacctgactctctgccccaccagtagagcaaaggcctttctaatgcgaacagtcagggtcaacgaaaaaagttgttttgcttttaatgtgacacatatattagcatctcccatgaatgtttagtttgggaaatgccctagatgttctggattttatttctgaatctattcaaaggctgtggattccagccatatggtttgcattagttttctattgctgtgtaacaaattgccacaaactcagcagcttgaaacaataccttttgatgatctcaaagtttctgtaggtcggaagtccaggcaatggtataactgggttctctgtgcaaggtctcacaaggctgaaatcaagatgtttgctggctgtgctctcatccaagctcattcaggctgatggcagga

SEQ ID NO: 552005 - DNA, 685 bp, Homo sapiens
ccactcagactttgctgagctgttgaaccttgaggggagttatctgataatagtggggacggggaaaaggaacagatgaaattcttttattttggtggcaactggccatcaggattttttttttttttttttttggaagtgagacccctggagttttcaggttcctgtccattctgagactgtttctttagcctgctccttgattccatgacctcactatagcctttccataaactctcttctgcaaatgtgagtcagtttatttctgttgcttacaacccagaaacctgactctctgccccaccagtagagcaaaggcctttctaatgcgaacagtcagggtcaacgaaaaaagttgttttgcttttaatgtgacacatatattagcatctcccatgaatgtttagtttgggaaatgccctagatgttctggattttatttctgaatstattcaaaggctgtggattccagccatatggtttgcattagttttctattgctgtgtaacaaattgccacaaactcagcagcttgaaacaataccttttgatgatctcaaagtttctgtaggtcggaagtccaggcaatggtataactgggttctctgtgcaaggtctcacaaggctgaaatcaagatgtttgctggctgtgctctcatccaagctcattcaggctgatggcagga

SEQ ID NO: 552006 - DNA, 535 bp, Homo sapiens
ataagcagcagggtcttaccttccttaaccatgtgcttccattgaatttgatctctgtttgtgggcctgtccccacattagactactgcctccttaggttggcactcagtagatatttgttggttgtatgaatgagtgaatgaatgaataagtagcattgcctagcatggtgggacatgccccgcttctgcactctgaagggacccattgccaactccctaagtatcacagaatcccaataagagtttgagacccatggcaagcaaagagagacccgaattctctgcagccttcctacttcttccatagactcaccctagggaggagttgactccagacccgggsaccccactggggagggctggactggttaaaattgggatcaaagtgagcatgagaaatgcaaagtctcattaacaaccagcccagacagccagcccaagagggtgagggcagcaggagtaaaggggtggagggtgggtgaagggaggctccagggtgcaaggagttgctgctgatccattatagggttaaa

SEQ ID NO: 552007 - DNA, 1746 bp, Homo sapiens
aaagaagtaataagacagttatcacagtaggaaaaatattggagcattgttctgcttctttacacttaattatgacttaatactgtttttatttttaattatatatggaggtggcagcactgtaatttttttagtgcttaggtcttctaaaatcttaagccaatcctgatgtgactcttacatgttcatgaagtggcccacatatgccagatgcttctacattctgagcttcatgagtacaggaaccctatgccctactgcctttctagcttcagtacccagaacaatatggggcacacagcaagtacacaatagagactgttattaagtctctatgacagcaagttgctatttctgttattaacaattccagtgaatgttgctattaagtcagctcagtttaactaatgaagccactaaatgccttaggtgctatagctcttgccctttatccagtaggggagagaaataaatgtgtttgaaacaattagcgcaggccaggaacggtgttgggtgctttacatacatcaattctctctttaatcttcttatcaaaccctgaagtctgcatcagctccattttacatagaaagaacctgaagcttagacaggttaagcaatctgacaaaagtcattcaacagtaaatgaaatagtggagcatcagaccaaggtcagcctgacccctaaactactgctcttcattacacatgttgccagaccacttaaagttcaataggctgatcactggtgttcaaaaactaagatagatgtgtgttgaaaatagcccagcaagttactatcaagtcatgctcagcattaaaaaaaaaaaaawttaaggaacctgtagtcaagattgcagatgggagtgaagtagggggaatttcctgacagttttaggtcactaggtagcaattcctgggtctacaagtcttagaaatctcctggcccttaggactctaagcccttcattatagttttgagaagatctggatttgggatagagctaagggcatatgcctaagggcagtttcataggacttggattttgccccacattttctgagctgtgaaggtggggtggggtgaggaagtagtgagcccctaagaaatggtacaacaatgctgacaaaggaaagcgaaaagggaggaaatattcctcattctcttttcttgtacttcaaacactggctcagttctagaccattttcaggaaatcctggagttttcacaataaatcaaactgtagcaatacccagagaagctggagagcaaagcctacgggttgtaggtgaggaaggaagctgagaagtgaagtagtctctcctttctacctgttggacatctatatttctaggtggcattaaactaacaaactcttcttcctaacaatagaaagacaagagtttgaactagaagaggagaaggtatttgctgcatacatgaagaactgtcttaaatggaaggcagaggcatggatcctgtgaagtcttttgaaatagaagccataattaccagtcccattggtatggggtagagctaaagtgcagggaggtgaacagagagcctttcaaatttcttctagccagaaatttctataattatatggttcctttggtgaattctccactccatcttactctttttcagtctaccttttcattggctccgtttgtaatagaaaagcaaaagttattccccagttgtataaggccgagtccaggtcgtacagaataatgaaatgggaa

SEQ ID NO: 552008 - DNA, 533 bp, Homo sapiens
ggttggttcctttggcaaccagccctcatcytgaagctatctaggagacccaaccatcagttatctcattagcatgtaaaacacattctaatcacttacgagataccaagggttttagaagctgtgtgtcaacaacagggcaaagaccaaatatacatatttcttgttgtgttacaagccctgtatcatcttacatagcaggttaaggggtgggactctataatttttcagcatgtacagtcttcaggtgaccgagcatgcacacttggggatcaccacacaacacacacacctctgtcataaatagctcacagtcccagatctcagagctattatctagtgaaggaaagtcatgtggactacaatctttaatggtagctggagagctgtagttttatctccatgcttcctttcttttctcaagccattaagagtctcctatggtaccacctacttacaaagatctaaaataaagccaattacaaagattgaaattaagtagaaaatagccgaataggaacagctccagtctg

SEQ ID NO: 552009 - DNA, 1367 bp, Homo sapiens
ctgtggacagttggggtggcccagtggtgttcaatggcccagtcaaaagtggacaaagcaggtgtctggatggacctgggagatcttgctcagagattctgatgggacaaaggtaaaggaagggccagagtggtcagagagagggtcacagtctatggtctgcacaggatggaggaggccagggaacaggcagggtgggcagctgggtttcagggagaggcaggtgcatgctgggaggtcagaccctgtgagggctgtgggggcatcaggtggggtgggctccaggtgcacgctcagtgcactgggcaggtcttggcccaggctctctggaccccggctgggtgatgtggtcacttactgggggactgttgtcaggcgctggccacccaccctgggtagcactgtcccacctcacgactggacttcctcagatcctgcagagggcacagcctccagcccaggataggcagccccttggtggagcctgagctctccatgggcctggagcatcacctgccagccctgcactctctcttctcccaggtcctgcttttccagggtcagccagtggggaggacccatcctcccttccctatgtgtctcctgagctgaaacttgcagtgcactgggacagggatgaggcttccctaaggcccatttagggagaagactggctcccagcctggcacaggtcctcagctctgccttggttgccttagaatgagatggatcagtcagtgccctgaaggtaaaggtaggagactgtccctgcttttgggaggctggtctagggatggaggacttaacaggtcctcccagtctgtcaggtctgggaagcactgtcctgtctcaggactcagaaagtccagtcctaggatgggacggtgctgccaagggggcgtggccaaggtctgacagcagtcccccagggagtgaccacatcacccagccggggtccaggaagcctggcctgagacctgcccagtgcactgatggtgcacctggagcctactccacctgatgagcccacagccctcacagatcctgacctcccagaatgcacctgcctctccytgcaccccagctgtccaccctgcctgttctctcacttcctccatcctgtccagcaggatgggatgggcagggggacagcctgtgtgcacatttcatggcaagcaggagtgacacatcatccctgggaggcgccttgcttcctccaaaacccggccccagaactctgtccctggggtggttttaccaaatcccaaacccagaactgtggttgtggttcaggggtcagcgcccgctggttctacaatgtcgccaaggactttgattgtacattgttcttcttttcaatagtcatt

SEQ ID NO: 552010 - DNA, 1367 bp, Homo sapiens
ctgtggacagttggggtggcccagtggtgttcaatggcccagtcaaaagtggacaaagcaggtgtctggatggacctgggagatcttgctcagagattctgatgggacaaaggtaaaggaagggccagagtggtcagagagagggtcacagtctatggtctgcacaggatggaggaggccagggaacaggcagggtgggcagctgggtttcagggagaggcaggtgcatgctgggaggtcagaccctgtgagggctgtgggggcatcaggtggggtgggctccaggtgcacgctcagtgcactgggcaggtcttggcccaggctctctggaccccggctgggtgatgtggtcacttactgggggactgttgtcaggcgctggccacccaccctgggtagcactgtcccacctcacgactggacttcctcagatcctgcagagggcacagcctccagcccaggataggcagccccttggtggagcctgagctctccatgggcctggagcatcacctgccagccctgcactctctcttctcccaggtcctgcttttccagggtcagccagtggggaggacccatcctcccttccctatgtgtctcctgagctgaaacttgcagtgcactgggacagggatgaggcttccctaaggcccatttagggagaagactggctcccagcctggcacaggtcctcagctctgccttggttgccttagaatgagatggatcagtcagtgccctgaaggtaaaggtaggagactgtccctgcttttgggaggctggtctagggatggaggacttaacaggtcctcccagtctgtcaggtctgggaagcactgtcctgtctcaggactcagaaagtccagtcctaggatgggacggtgctgccaagggggcgtggccaaggtctgacagcagtcccccagggagtgaccacatcacccagccggggtccaggaagcctggcctgagacctgcccagtgcactgatggtgcacctggagcctactccacctgatgagcccacagccctcacagatcctgacctcccagaatgcacctgcctctccctgcaccccagctgtccaccctgcctgttctctcacttcctccatcctgtccagcaggatgggatgggcagggggacagcctgtgtgcacatttcatggcaagcaggagtgacacatcatccctgggaggcgycttgcttcctccaaaacccggccccagaactctgtccctggggtggttttaccaaatcccaaacccagaactgtggttgtggttcaggggtcagcgcccgctggttctacaatgtcgccaaggactttgattgtacattgttcttcttttcaatagtcatt

SEQ ID NO: 552011 - DNA, 1367 bp, Homo sapiens
ctgtggacagttggggtggcccagtggtgttcaatggcccagtcaaaagtggacaaagcaggtgtctggatggacctgggagatcttgctcagagattctgatgggacaaaggtaaaggaagggccagagtggtcagagagagggtcacagtctatggtctgcacaggatggaggaggccagggaacaggcagggtgggcagctgggtttcagggagaggcaggtgcatgctgggaggtcagaccctgtgagggctgtgggggcatcaggtggggtgggctccaggtgcacgctcagtgcactgggcaggtcttggcccaggctctctggaccccggctgggtgatgtggtcacttactgggggactgttgtcaggcgctggccacccaccctgggtagcactgtcccacctcacgactggacttcctcagatcctgcagagggcacagcctccagcccaggataggcagccccttggtggagcctgagctctccatgggcctggagcatcacctgccagccctgcactctctcttctcccaggtcctgcttttccagggtcagccagtggggaggacccatcctcccttccctatgtgtctcctgagctgaaacttgcagtgcactgggacagggatgaggcttccctaaggcccatttagggagaagactggctcccagcctggcacaggtcctcagctctgccttggttgccttagaatgagatggatcagtcagtgccctgaaggtaaaggtaggagactgtccctgcttttgggaggctggtctagggatggaggacttaacaggtcctcccagtctgtcaggtctgggaagcactgtcctgtctcaggactcagaaagtccagtcctaggatgggacggtgctgccaagggggcgtggccaaggtctgacagcagtcccccagggagtgaccacatcacccagccggggtccaggaagcctggcctgagacctgcccagtgcactgatggtgcacctggagcctactccacctgatgagcccacagccctcacagatcctgacctcccagaatgcacctgcctctccctgcaccccagctgtccaccctgcctgttctctcacttcctccatcctgtccagcaggatgggatgggcagggggacagcctgtgtgcacatttcatggcaagcaggagtgacacatcatccctgggaggcgccttgsttcctccaaaacccggccccagaactctgtccctggggtggttttaccaaatcccaaacccagaactgtggttgtggttcaggggtcagcgcccgctggttctacaatgtcgccaaggactttgattgtacattgttcttcttttcaatagtcatt

SEQ ID NO: 552012 - DNA, 626 bp, Homo sapiens
acattttcattatcattctaattccattatgatttcatctttgaaacatagattatttcaaaaaattttttaagtttctgaacatttgaaaagaatgcgtattctcaagtagttaagttcaagtttccgtgtttgtttattgcttcaaattgtgttgytgagattcgtattcatcctgggttgcgttttgtttttctttttcaatctccctaagctactagttaccgtcatgtgtgttaaaatcttccatgtgactgtaggactcaacttctcctgataaagaacttcagctttctgattgtttttgcctccatatattgaacctatgttactagctgcaatcaagttaagacttgtgacatatccctgatgagctgacccttttatcattatgcaatttctcctacagctttttgcctcagggtcttttttgttgccttaaagtctattttgttcaatgttaatatagttacgtaatatttatcagatatatttttctcttttttttacttatatccttgtgtttggagtgtatctcttgaaagtggcaagcagctgcatttgttaattacagtgttgtaatcactagtccataagaatttgttcttgctatcttctgttgtacc

SEQ ID NO: 552013 - DNA, 511 bp, Homo sapiens
cgggaccccgtgcgccttcccggtgcgtttcggtgggcgccggtgccctccagcggccacgcggggaagcgcgggttgctgcccgctgcccgggatgggtaagggaactcctgggtcccggtgctcaggacacagcccacgcacccggatttcgatcccgcccttctgggagcccaaccagcagggtgccggtgcctcccacgggctaaatccaagccagaattgcaaacattgtgccttctgccctcacacctaataaaagtacaaactatgagattgcattttcacttctcagataagcaaaaatcacctagtaggttagrcacattgtggaagacacactccacgtggctgctggggtgaagctggcgcagccactttggaggggagactggcactagcatcgacgctctaaatggactttcttgaccccaattttccatacctacgaatttatcccacagatacacacccatgtacacgaacatgcacggacgaagatatttgggat

SEQ ID NO: 552014 - DNA, 665 bp, Homo sapiens
tgccggccaggctagggctgcaaaacaggagaagctgcgatttccttaaagacacagggctcctggctctgaagaacaggcatgaatgggagcaggggggatgtggcgggcagaagaaaaggaggagagagaggcagagatgcccaggaaggctcacggagggggtcgggtattggagaaaatgggcatatttcctccccaccccaagagctgaagcagcaaaggacctccccacaagtccctctacggaaaacagagtggattttcaaaaactcagctgggaccgggaaatttcatactagcgttaratgacactaactcaggtctctccagcctctcaggccctccccacgcactcacacactcaatcggttaatctgggcagccctggtgagccatcgctcataacttgggctggagtagtccttctccaaaggagtgggagaaaacaggatatagatagctccctctctctttcagcttcccagaggcgggggcaacggtttactttttcagatcactctcgtttcagagatgtctgcccaagcccatcatccaaattcaataccgagcttgcaaccagtgcttgtagcacagagtagatgaagagatttccatcatttcagctaaaaaaactggaggacatcagatgacctgcctggcca

SEQ ID NO: 552015 - DNA, 675 bp, Homo sapiens
ttgcaaaatcacctctttctggtcttttcctgggtcctttggaaatgctttcaaatgtattcagaccatcagctgattttgtctggggaaatcatgtcgttggtgtagagatctaatttctttcttagcttgagcaagagctgcttaataggaaacattttggcttcccatactttaaagccatcgcttctacagggaatgttatgtgaccatcttctattacccaatttcccacaaaagctagtttttgaaaaagaaggccaagcatgctaatagaactcctgctaatggagccacatggcaaagttaggggaccgagaggcagaggctggaagacagttgaaatcttaaaaactataacgtctaggttgtggctgggataggtaggtggcaagagcaaagagaaaagtggatgtttgggggaatgaaggaatcccaggaagtaatgatctgaatgactggagaaaggccaaaggaaaaaactaagaataatagagtaaatcaagataactaaatttaaaaagaaaaaaggtcaacaarggtagaaaaactacaagaaaaggcaaagcggaagaggaagacagaggtgaaagattaaaaatggcatgaatagcagaaataaaagtgcatgagtggtggaaagaaatatcattccaggaagtttctgcctcaaca

SEQ ID NO: 552016 - DNA, 595 bp, Homo sapiens
tataagatatgaatcaaaagaaattttttttgttgtgaagctaatatgattttgtgccctgagtcacaaatattccaccaataagcatgaaaagtaagttaaaaagaaaaattagttgtatggtatgacctgacaagaaaacttttttttttagtagtaaagacatacttattgtaagagttagtattagattttccagagaaacagaaaaagagagatttaaaaattgggctcacattgttgtggaggctggcaagtccaaactttgtatggaaggagggcaggctggagagaagagttgatgttgcattctggaggcaaaatttccctttctgttgggggtctccatcattcattctcttaaaaaacttcaacctgatggtttgaagaccaacacacacattatggaggtgttttctttatttaaaagtctactgatttatcagccataaaaaagaatgaaatmctgtcatttgcagcaacatcaatgtgcccttattttaagtgacatgagcagacagaaagccaaatatcacatgttctcactcatatgcgggagattaaaaggttggtatcataaaggcagagtgcagaa

SEQ ID NO: 552017 - DNA, 595 bp, Homo sapiens
tataagatatgaatcaaaagaaattttttttgttgtgaagctaatatgattttgtgccctgagtcacaaatattccaccaataagcatgaaaagtaagttaaaaagaaaaattagttgtatggtatgacctgacaagaaaacttttttttttagtagtaaagacatacttattgtaagagttagtattagattttccagagaaacagaaaaagagagatttaaaaattgggctcacattgttgtggaggctggcaagtccaaactttgtatggaaggagggcaggctggagagaagagttgatgttgcattctggaggcaaaatttccctttctgttgggggtctccatcattcattctcttaaaaaacttcaacctgatggtttgaagaccaacacacacattatggaggtgttttctttatttaaaagtctactgatttatcagccataaaaaagaatgaaatactgtcatttgcagcaacatcaatgtgcccttattttaagtgacatgagcagacagaaagccaaatatcacatgttctcactcatatgygggagattaaaaggttggtatcataaaggcagagtgcagaa

SEQ ID NO: 552018 - DNA, 528 bp, Homo sapiens
ttgcagtagaacctctcctcactatcacaatcttaaaaacatatcagatggtacattttaacatctctttacttcaraaaacaaaaagctgccgctggaaatgccagaaaacagctgcagagattacacagggattttagcttattttattttttgagaaataatgaaatgtgaaacaggatttctctctagttcaaaaaacagggaaaagaactcttactgccaagttcttgtcttctcaattattgttagtggtatcctgatcatttcatataattaaagaataaaaattgaccctctgtgacttaaaactacaacagtctagcacatggtgattgcccatgttctaaacatgtatgttatacatgtacacagattgtaagtatctatgttataaacgtaaaacaacgactataataattattattataataatccagccagagaaactgcagaccataaaacagtatgggctccccctgctgtttctactggtaaacttaactaacatttccggttgccagggct

SEQ ID NO: 552019 - DNA, 528 bp, Homo sapiens
ttgcagtagaacctctcctcactatcacaatcttaaaaacatatcagatggtacattttaacatctctttacttcagaaaacaaaaagctgccgctggaaatgccagaaaacagctgcagagattacacagggattttagcttattttattttttgagaaataatgaaatgtgaaacaggatttctctctagttcaaaaaacagggaaaagaactcttactgccaagttcttgtcttctcaattattgttagtggtatcctgatcatttcatataattaaagaataaaaattgaccctctgtgacttaaaactacaacagyctagcacatggtgattgcccatgttctaaacatgtatgttatacatgtacacagattgtaagtatctatgttataaacgtaaaacaacgactataataattattattataataatccagccagagaaactgcagaccataaaacagtatgggctccccctgctgtttctactggtaaacttaactaacatttccggttgccagggct

SEQ ID NO: 552020 - DNA, 1158 bp, Homo sapiens
gttcagataaggcgtggacattaacatgggatayataaaaggcgatttttttttccttattttttaaaaacatttttgctttcgttcccttactttgttgacactgatagaaaatgtggggagaactcctgactaggaggaccctccatgcacgtcctgtttgcttggactgcagcagcatggtccagtggaaaggacagggatgctgacatcagacaggcttgaatcctggctctaccactcacaatgtggtgtgaacacaggcaggtatttaacctttcccagccatcgttactgcttctgttaaacaggctgaaaaacatgccttggtttgtgtggattaagcaacaactcatttcgtattcctaatcaataatttggctccacaaaagctagtttttctttgtcctttagttacctggggcatgagctttcttgtttttttccaaaacttgtaatgggagtcactgcttgcagagcggtctgattcaacttgatcgcgactgcctaaaaatccacaggaagacacactcagtcccaggaggtggacgcttaccttccaggttgagaaaagggctgagatgccggtggctgataattacctcagggttgtcggtcaggtagatctgtctggagatgttgtttattgcacatatccactgtagaggacattaaaaaagaacactgaatcccaaagtcacccaccacgttaggaaagaaatatgacaaacaaaatttttacctcttcattttcctttctgctctcagcctggaggattattcccctgaaacaaaagtgtctaagtaattaagtgcttccctgatctcagtgactgggaatttctctacataaactgaacttagctggggtgtgggaggaaaagtgccatgaaggcagcatgatgagagggaaagaaaatggggttccagggccaggtgcagtggctcatgcctgcagtcccagcattttgggaaggtgaggcaggaggatggcttgagcccaggagttcgagaccagcctgggcaacatggtgaaaccccctctctacaaaaaatacaaaaattagctgggcgtggtggcgtgtgcctgtagtcctagctactagagaggctgaagtgggaggatcgatcgagcccaggaggctgaggctgcagtga

SEQ ID NO: 552021 - DNA, 469 bp, Homo sapiens
cctcctaggatcttgctaattcacacaattatataaagttaaattatagttgatggttgactgggagggtgtcataactcgcagtacaaggaaagaaaaaaaaacaacagcaataaaagtaactcagggccaggcacggtggctcacgcctgtaatcccagcactctaggaggccgaggcgggcagatcacgaggtcaggagatcgagaccatcctggctaacacagtgaaatcccgtctctactaaatatacaaaaaattagccgggcgtggtggcgggcgcctgtagtcccagctactcgggaggctgaggcaggagaatggtgtgaascccggaggcggagcttgcagtgagccaagatcgcgccactgcattccagccctggcgacagagcgagactccgtctcaaaaataaataaataaataaataaaatttaaaaagagtaactcagaagggagattgttttt

SEQ ID NO: 552022 - DNA, 294 bp, Homo sapiens
ctcgaactcgggaggcagaggttgcagtgagccgagatcccaccagtgcactccagcctgggccacagagcaagactccgtctccaaaaaaaaaaaaaaaaattttsttcttccatgtcttgtgtgtgtaatttggctactgctaggcaaagcagagcgaatgactgaaattcagtaagttaaaaggtagcatgaattgctataacatttttaacatatgttgaattgtatataaacatatagagaaggtgagacaaaggctattaggaagctaaagtggggaaataattgatt

SEQ ID NO: 552023 - DNA, 884 bp, Homo sapiens
tgctacttcaaatgaccttattactttaatataattattaaataatatatctctgagtttctaaaatattcatttccatttatcacttcatgccagtcattgctaattaaagcaatttctgaaaacaatttttctttccatattatccaccagaagttagctgtgcgaaacatgatagtggactgggggaaggtggagagtaagggtkgggggaaggattatcacctacctaagtttgcctcaactataaagtttcctttcttaaaattagtctctataattggtttgatagcagggagaagcaattagttactaacagacagcttttctaattatagtttatttttgagacaaggataaaattctaaaaggaaacagtccatacattttctgtaaagattatatattttcatagcttaaatgggaaaggtataaagcttcaagatcaaaagatctgtttagtccaaggaaaatcttccactgtttatgtggctgaatgattataatattttcttttgattttgaaaagcatagtaaatacattctaacaactgactgacatcagaagaaatcagtaggtgtactccagttcaaagtatcttatctattaatttctgtgaaatgaaactgtgttcaaactgagaagaaaatattggtatgactccccttcctgcaaaaaaccataatcagtacaaaaattctctgatttcccacatccattcagctctactccagcagaatagcaatcaacattttattttcctttttgcttcacatttctgggaaagatatgtacaaagacagcaatctaaattaataaaacccactaaccgatacatggatttttttctatatgtcattttaattcctggttattccactcc

SEQ ID NO: 552024 - DNA, 536 bp, Homo sapiens
cactatttattcatttgctggacccatatcatgtctgttcatttttcattacacttacatttacacaatatacaatacagagaaaactctagaatcagagttagcaaactaaagcccacatgtacaatccagccatggcctgttttgtacagcacatgaactaagaatgattttaacatttttaaagagttgtaaaaagcaagcaaagacaaaacaaaacacagtgaataatacacacagagactttaggtggcttgcaaagccaaaattatgtactttatggccctttacggaaaaaaaattgctgacttctgctttaaatagtagygaatttttcactcataaactcatttgtaaagatattatctgtttagaacaatcttagattcagagaaaaaacattgagacaaggtacagaaatttcccatatcacccaatgcccactgtagtttacattagggttcactcttggtgttgtacattctatgggtttgggcgaagttataatgacatgcatccattgttatagcatcata

SEQ ID NO: 552025 - DNA, 673 bp, Homo sapiens
aagggatgtaaattggccatttaacgtcataatataatgtttttatctcatcaccagtttcttcatgaaacaaatatcttctgtctattcaataaccagctaaacttggggattcatgaagaagagccccagacacatttcaggcctctgggggaaagcaattgagtgttttcaacatgatatttatttgttttaaaccaaaccagtaaatcttactgattttattcatgtacctgtcatgatacttagtgttctgtaatgtgggaacaattttacaggaattcttgagtgaccaactgcccttgcagacaggactgaagggtcttctagcaygttgcgctttcagttttaaaactgggacagtctttggcaaactgaaatggttggtcactgtccttgttcaccttgtattactagcacccaggccagtacctgctattcccactagatttctcagtgccttgatttccttttctatggaatgggaacaaaagggacttgtacttgtcctgtctcattcacagggctactatgctgtatagtaaagctgaggaaggattgttgttgttgttgttgttattttttaatgtcttccagtaaagtcaaagagaatttaaataatctccaaaaactacagttcagattgttcagtttttgattactagaaccacac

SEQ ID NO: 552026 - DNA, 646 bp, Homo sapiens
gttttcttgttgttgacctgaatttaaattttttttaacgtagatattttcatttccaggtgtgtttttctcatttcagtgatattctagcagagtgcaaatcttgttgcccaatatacttgaaaatagacgttttcacaacgactatgatactcaccttaatttatctattggtaattgcaaaatggtaatatcataattcttacatttatcagttgcattcttcagaaaataagagtttttcctcaccaagtgtaaataaactgtgttacaaaactcaggatgaaaatgtaatcattcgtacttaactgtcagtttttggaatgggagtagacataataattgcctgcagtggtagtctgtgaagggcttttattcttttttctttcagttcttaattttttaaaaataattgtattagctgggcgtggtgggcatgcacctgcagacctagctactgaagaggctgaggcaggaggatcacttgagcctaggagttcgaagctacactgagctatgatcacaccactgcactccagcctgggcaacagaacgagaacctgtctataaataaataaacartaattctagactcatgaattttatttactcgaagttttataatcactatttttaaaataatcaa

SEQ ID NO: 552027 - DNA, 847 bp, Homo sapiens
gctgattaacagactcttccccagagccagctgacaggaagcacatcggggtaaaagggaagatgaaaacttgggtgcctggaggaagggaacaaatgcgagcaggagcatggtaataacataggtaaaatagcagacgtttatacattacacctgtgtgccaggcactgttgtaagtactggatagatagacagataagtggatagatagagagctagagctagagagagagagtgagagagagagagagatttattctggcaatagtacaatgccatgggtgttgttatcatcaccattttacaaatcaggaaacggaggcccagaaagttcacatgtgctggtctttgccctccagacccaccctccacctttctcctccctgctctgtgtcctgagggctgatctctgccctcaactttacccrctgccttgtcctctggcttctagttggactcagcccacaggggcattggcaggagtacagggggtcagagtatttgcccagcttccttcctaccagccttggttttagcagagctgctttcctcttcccctggccacaggtcccaccctcggcccctctcccagggctctagctgccaccactttcttcacatgccccttgcccttgctcctgacccctccagtcccagaggttgcacagccttctggggctgccccgtgctttgtgggttctgcacacacctctgtaaacagcccctcctgcaaactctgctcaaacatccatctcctgtgggaccctgctcaacatcactcatctggtaagagctagaggcggaattcaaaccctggccgtccagctgcaggctgccaagagcctct

SEQ ID NO: 552028 - DNA, 634 bp, Homo sapiens
ttgagacagcgtctggctctttcacccaggctggagcgcagtrgcacagtctccactcactgtgacctctgcctcccaggctcaagccactttcctacctcagcctcctgagtagctgggactacagatgtgcaccagcacgcctggctaatttttgttgtattttttgtagagatgggtttcacatgttgcccaggctggtctcgaactactgtgctcaagccatctgcctgcctcacctccgacagtgctgggattacaggcatgaggcgtggcaccctacccctatggcattaactcctaaagccacttgaactttgcaaagataaaggactgttgagttttgctcatcttttgtccagaattgccagatgtttgatacggtactcaacagctcagtattttgacattttatatgctaaaataaaaatgaaaacaaaagcgaatacagaacgtgagatttttctcattaaaatttcttcctcgtgtgaagctttctgaggctgtatcttgatatttttgaacctttgccagctggaagaaaggacaaaacagctgttctaaactgccaagaaattggctggtgcatagaagagggaatttgtctttgttgtatattttgcctttgtcctgg

SEQ ID NO: 552029 - DNA, 622 bp, Homo sapiens
aaccctttcctatacatatgcagacggtattcagcacagggcctgacagaaggcagtgtttgttattattattcatagcattagcccatttcttgttgtgagcaacatgaacaaggagactaaggggaaaaaaatgcccttttttagggtgaccaccctaactgatttgaaagtctacaattttttcagtttaaaatggtatttatttgtaacatgtactattattgaataacaatttctaataaaaaaactacgctagttttctgcctatggagaagycacctttttattcttttactttcttaataagcttgctttcacttaaaaaaaaatctaccctacatatacacaaaagttaaaaagcagcaatagtgtacattggtcagtataaatgcatgcagttttcttttcttcagtgtacaaagtccaagtctaaacctttataatttttagagtctagcgattctccagactccatacttttcgttgttatcagatgccagcgttaattgcttttcctttcttctgttttgggttcctgatcttcatctgtgtctttaaaacagattattttctttagatttgaaaggttgggtttttgtcttcatttcttatttgttta

SEQ ID NO: 552030 - DNA, 638 bp, Homo sapiens
cagagaatctgaaaattgaaataacaaaaaactcatggtaaaatactttacatacaaattcagatatatctgtacagttcaaatattagctgaagaaaactattatttagcctcacatttaaatattgtccttgtatgtttttaataatttgttttattgactatatttaagtaatatattcaagtgagatcaaagtgtatcacatttccctagttctgcataggcactctgagagagattttgcttctatttcattttagaaagatgtggagataggtaaatcatttaccagtttttggaattttgataatttctctacagtgaaggaattgtttctcccagtctttattttccttcttcttatatagtcaaatcaaagttactctgaattaacctgtagaatttaacatatttcaatgtgtagagctccacaagaccacctttactttccatgaatacagattgagaggtaagtgcctgaatccaacacattagcaaaatgtaggattggatagattaaataaagcatatgagcyccatgaggcatggtgatatttttaccattttttagcttactgtgtaactaaataacgtaaaatattttgatatcacttcactattaagtgttccaagatag

SEQ ID NO: 552031 - DNA, 656 bp, Homo sapiens
gcttgtggcttttctccccagtgacaggctggatgtctcaggctctgtgcccctttggtcagcgctcttccctctcctctccatgctgctcttcattcctgccaagtcttcctgcgtcctgtttccctcgactgtcctttttctcacactctcctcatcatagcctgatgctgggagcagaagctggtgcgtccctcacagaagcagcagagctttctccatgcagcctcctgcaccaccactctctcaagccctgcgtccggcctcagctctcccaggggyacatggtcttacccttacagagttacagtggctgaacctgacctgatatgttcacacctaatggctactctgacttcaaacccttttacagaaccatcttgtgtgtccttagttgtgattttctgctctttcttctagattgccaacccactgaccatccctttgctccaggtccactttagctttgttgaatgacatttctatgccctcattggccaagtagaaatgcagtgcaccctctacagcctttttaaaatatgttgggaatactatttgcactgagagaaattcacagattttaatatctacgtaatgagtccctgttctttgaagttaatttgtaggaaacatttgactgtcagcatgaaatggca

SEQ ID NO: 552032 - DNA, 656 bp, Homo sapiens
gcttgtggcttttctccccagtgacaggctggatgtctcaggctctgtgcccctttggtcagcgctcttccctctcctctccatgctgctcttcattcctgccaagtcttcctgcgtcctgtttccctcgactgtcctttttctcacactctcctcatcatagcctgatgctgggagcagaagctggtgcgtccctcacagaagcagcagagctttctccatgcagcctcctgcaccaccactctctcaagccctgcgtccggcctcagctctcccaggggcacatggtcttacccttacaragttacagtggctgaacctgacctgatatgttcacacctaatggctactctgacttcaaacccttttacagaaccatcttgtgtgtccttagttgtgattttctgctctttcttctagattgccaacccactgaccatccctttgctccaggtccactttagctttgttgaatgacatttctatgccctcattggccaagtagaaatgcagtgcaccctctacagcctttttaaaatatgttgggaatactatttgcactgagagaaattcacagattttaatatctacgtaatgagtccctgttctttgaagttaatttgtaggaaacatttgactgtcagcatgaaatggca

SEQ ID NO: 552033 - DNA, 656 bp, Homo sapiens
gcttgtggcttttctccccagtgacaggctggatgtctcaggctctgtgcccctttggtcagcgctcttccctctcctctccatgctgctcttcattcctgccaagtcttcctgcgtcctgtttccctcgactgtcctttttctcacactctcctcatcatagcctgatgctgggagcagaagctggtgcgtccctcacagaagcagcagagctttctccatgcagcctcctgcaccaccactctctcaagccctgcgtccggcctcagctctcccaggggcacatggtcttacccttacagagttacagtggcygaacctgacctgatatgttcacacctaatggctactctgacttcaaacccttttacagaaccatcttgtgtgtccttagttgtgattttctgctctttcttctagattgccaacccactgaccatccctttgctccaggtccactttagctttgttgaatgacatttctatgccctcattggccaagtagaaatgcagtgcaccctctacagcctttttaaaatatgttgggaatactatttgcactgagagaaattcacagattttaatatctacgtaatgagtccctgttctttgaagttaatttgtaggaaacatttgactgtcagcatgaaatggca

SEQ ID NO: 552034 - DNA, 656 bp, Homo sapiens
gcttgtggcttttctccccagtgacaggctggatgtctcaggctctgtgcccctttggtcagcgctcttccctctcctctccatgctgctcttcattcctgccaagtcttcctgcgtcctgtttccctcgactgtcctttttctcacactctcctcatcatagcctgatgctgggagcagaagctggtgcgtccctcacagaagcagcagagctttctccatgcagcctcctgcaccaccactctctcaagccctgcgtccggcctcagctctcccaggggcacatggtcttacccttacagagttacagtggctgaacctgacctgatatgttcacacctaatggctactctgacttcaracccttttacagaaccatcttgtgtgtccttagttgtgattttctgctctttcttctagattgccaacccactgaccatccctttgctccaggtccactttagctttgttgaatgacatttctatgccctcattggccaagtagaaatgcagtgcaccctctacagcctttttaaaatatgttgggaatactatttgcactgagagaaattcacagattttaatatctacgtaatgagtccctgttctttgaagttaatttgtaggaaacatttgactgtcagcatgaaatggca

SEQ ID NO: 552035 - DNA, 635 bp, Homo sapiens
tgcagccaatacaactattatatttttttctaaacaataagatagggctatgttatttaaaacaatagctaaatattaattcaccacattcattaatatttcaaccagggactttttttttgaaatttatcattttttwaaaaaattgatgtataaatgtatatgtatttattatgtacaatatgatgttttgaagtatatatacattatggaatggtgaaatctaattaacaaattaattacctcaaatagttatcagttctgtggtgagaacatttagcattcactttcttagcattttaaaaaatacaatatatcatcattaacactggttaccatgctatacagtagaccttgaacttattcctcatatctaactatatatatgtatctttgactaacattccccaactccttatcccccactaaccactccaacctctggtaaaccattctaccacctttttactctctatttctatgagattgatgtttttagattccaaagccaggaactattcttcaatcagttcaccattccacataattattcttatatttttatttatttatctaatataatgcattgttgtaacccaactataattgattagtaaataaataaatacaacaag

SEQ ID NO: 552036 - DNA, 635 bp, Homo sapiens
tgcagccaatacaactattatatttttttctaaacaataagatagggctatgttatttaaaacaatagctaaatattaattcaccacattcattaatatttcaaccagggactttttttttgaaatttatcatttttttaaaaaattgatgtataaatgtatatgtatttattatgtacaatatgatgttttgaagtatatatacattatggaatggtgaaatctaattaacaaattaattacctcaaatagttatcagttctgtggtgagaacatttagcattcactttcttagcattttaaaaaatacaatatatcatcattaacactggttaccatgctatacagtagaccttgaacttattcytcatatctaactatatatatgtatctttgactaacattccccaactccttatcccccactaaccactccaacctctggtaaaccattctaccacctttttactctctatttctatgagattgatgtttttagattccaaagccaggaactattcttcaatcagttcaccattccacataattattcttatatttttatttatttatctaatataatgcattgttgtaacccaactataattgattagtaaataaataaatacaacaag

SEQ ID NO: 552037 - DNA, 546 bp, Homo sapiens
tttagtcaactgtctaawcacataatgtaaatcatctaattatttttcaaaagatgtaacactattaagaggagataataagaaatatagttgtcattgtatattgcttaacattttgtcatatttagtaaggcaagctttaaccagacataagaatcaacataatatttcagccagttccaatcagttaaattagtgctaatttggttgaagtttatttagtaaaaagtaatacattctaaattctaacatatttaatacaatctttttttatttttcaacataaagttataataaagatttttagaaaaatttttatgacttataacatatttatagtacattcttgcattgtcaatctttacaaaattgatctttcttattagaatagtctatgttttaaatctggtcatagaagttttcaagctaattctctctcaaacaagttaaaaggtgccaaattacacattctttgaaaatgagccaatttaaagtccttgtttcagccccaaattgtcatgatattaatgttgaaatggcttgctg

SEQ ID NO: 552038 - DNA, 610 bp, Homo sapiens
tagggcatactacaggtgaggtagtgagctcattagatctcattagctcatgtaagtcagttctaacaagaggctatgaggaaaatttagggaaattcaagagtaatgtggaagatattctaggtgacccttttatttctgaggcaaataaaaaaaatccctgcaagatggaaaatgaactaawcaaaaactatggaatttgataaaactgcattatttaatgtaccatttaattcagttcagtccaattgaatttagcaaatatttattgaatatccacgcaaaacttcaatgacagtattagcatatgcaaattatgcataaacattacagtgagatttagaacactcgtgtcacatagtaggatttttaaaagatttaaactaacaatattatacatgttctttgcctctctcttggacttataacttctatatcatgtattgataagaaatgtatatagtcagtattataaaattgttgcctaaattaactttgcttatattattaagctttttttatgcctaacttatatttagaattcaaggacacagaatctcaagcagcaaactatctttaaattattttataattttatatttccttatat

SEQ ID NO: 552039 - DNA, 1269 bp, Homo sapiens
gaatatctatgatatgaaaaggattatgtcttactttgtattttgaatagctgtttaaataattattgcttaatagcaagttaggaatacataagagaaaacataatgctgagatgtcaagataatcacacttgtcctgtcaggctaccatttcccacaacaattattcatttagttaaatgtattaaatgcaggtaaatgaaactaccaattactcaagttctactatcagaaaaaaactgtagactctgtttaataatatttccagaagccatagagcataatataaaatcacacgagtatatagataacatatttatagttttttaaaaatttccttacattaaaggagtaaatatataagttagcagagacaatattttacaaaaatgcatagcatgcatacaggctcacgcctgtaatcccaacactttgggaggctgaggtgggcaaatcacctgagatcaggagttcgagaccagcccggccaatacggcgaaaccccgtctctactaaaaatacaaaaattaggcgggtgtggtggcgcctgcctagagaggagaatcgcttgaacccaggaggtggaggttgcagtgagccgagaccgcacaaccgcactccagcccaggcaacagagcaagactctgtttcaaaaaagaaagtttattattctgaaacagtcaaattctttgcatataaaaatgtacaataattttatatttgcacatattgcagttgcttctatgcttccttttaaatgggaacgcctggccgggcgcggtggctcacgcctgtaatcccagcactttgggaggccgaggcgggcggatcacgaggtcaggagatcgagaccatcctggctaaaacggtgaaaccccgtctctactaaaaatacaaaaaattagccgggcgtagtggcgggcgcctgtagtcccagctacttgggagrctgaggcaggagaatggcgtgaacccgggaggcggagcttgcagtgagccgagatcccgccactgcactccagcctgggcgacagagcgagactccgtctcaaaaaaaaaataaaaaataaaaaaaaaaaaataaatgggaacgcctaatgtatttatttcactctaaccttttatattctaagtatgttttaatttttcatctatttgtgcaatattctttatgtattaacaaaaatgtgacacacacagaaaagttctcttttaatggttttataaatacttgatatttctgacacaaatattaaaaatttcatatga

SEQ ID NO: 552040 - DNA, 1269 bp, Homo sapiens
gaatatctatgatatgaaaaggattatgtcttactttgtattttgaatagctgtttaaataattattgcttaatagcaagttaggaatacataagagaaaacataatgctgagatgtcaagataatcacacttgtcctgtcaggctaccatttcccacaacaattattcatttagttaaatgtattaaatgcaggtaaatgaaactaccaattactcaagttctactatcagaaaaaaactgtagactctgtttaataatatttccagaagccatagagcataatataaaatcacacgagtatatagataacatatttatagttttttaaaaatttccttacattaaaggagtaaatatataagttagcagagacaatattttacaaaaatgcatagcatgcatacaggctcacgcctgtaatcccaacactttgggaggctgaggtgggcaaatcacctgagatcaggagttcgagaccagcccggccaatacggcgaaaccccgtctctactaaaaatacaaaaattaggcgggtgtggtggcgcctgcctagagaggagaatcgcttgaacccaggaggtggaggttgcagtgagccgagaccgcacaaccgcactccagcccaggcaacagagcaagactctgtttcaaaaaagaaagtttattattctgaaacagtcaaattctttgcatataaaaatgtacaataattttatatttgcacatattgcagttgcttctatgcttccttttaaatgggaacgcctggccgggcgcggtggctcacgcctgtaatcccagcactttgggaggccgaggcgggcggatcacgaggtcaggagatcgagaccatcctggctaaaacggtgaaaccccgtctctactaaaaatacaaaaaattagccgggcgtagtggcgggcgcctgtagtcccagctacttgggagactgaggcaggagaatggcgtgaacccgggaggcggagcttgcagtgagccgagatcccgccactgcactccagcctgggcgacagagcgagactccgtctcaaaaaaaaaataaaaaawaaaaaaaaaaaaataaatgggaacgcctaatgtatttatttcactctaaccttttatattctaagtatgttttaatttttcatctatttgtgcaatattctttatgtattaacaaaaatgtgacacacacagaaaagttctcttttaatggttttataaatacttgatatttctgacacaaatattaaaaatttcatatga

SEQ ID NO: 552041 - DNA, 1269 bp, Homo sapiens
gaatatctatgatatgaaaaggattatgtcttactttgtattttgaatagctgtttaaataattattgcttaatagcaagttaggaatacataagagaaaacataatgctgagatgtcaagataatcacacttgtcctgtcaggctaccatttcccacaacaattattcatttagttaaatgtattaaatgcaggtaaatgaaactaccaattactcaagttctactatcagaaaaaaactgtagactctgtttaataatatttccagaagccatagagcataatataaaatcacacgagtatatagataacatatttatagttttttaaaaatttccttacattaaaggagtaaatatataagttagcagagacaatattttacaaaaatgcatagcatgcatacaggctcacgcctgtaatcccaacactttgggaggctgaggtgggcaaatcacctgagatcaggagttcgagaccagcccggccaatacggcgaaaccccgtctctactaaaaatacaaaaattaggcgggtgtggtggcgcctgcctagagaggagaatcgcttgaacccaggaggtggaggttgcagtgagccgagaccgcacaaccgcactccagcccaggcaacagagcaagactctgtttcaaaaaagaaagtttattattctgaaacagtcaaattctttgcatataaaaatgtacaataattttatatttgcacatattgcagttgcttctatgcttccttttaaatgggaacgcctggccgggcgcggtggctcacgcctgtaatcccagcactttgggaggccgaggcgggcggatcacgaggtcaggagatcgagaccatcctggctaaaacggtgaaaccccgtctctactaaaaatacaaaaaattagccgggcgtagtggcgggcgcctgtagtcccagctacttgggagactgaggcaggagaatggcgtgaacccgggaggcggagcttgcagtgagccgagatcccgccactgcactccagcctgggcgacagagcgagactccgtctcaaaaaaaaaataaaaaataaaaaawaaaaaataaatgggaacgcctaatgtatttatttcactctaaccttttatattctaagtatgttttaatttttcatctatttgtgcaatattctttatgtattaacaaaaatgtgacacacacagaaaagttctcttttaatggttttataaatacttgatatttctgacacaaatattaaaaatttcatatga

SEQ ID NO: 552042 - DNA, 1034 bp, Homo sapiens
tgtagaaaatggctattttagagatgtgttatagaaaagctaatttgagtgtagagtatgagaagaattggagaaagaaaatcaagccatagactggctttttctgctcactgtactcttaaaatttacagtttaggtaaagataggcacaatatatctctgatttggggatcagattaaattgggaacactgagaattttgccctgagtgatccactgcctttctgggtcaacttagactaatactggctgcattactgctaaaattaatgctgtgcgccagggaacagatgtgaattcatcatgtgaattcaagaatagggacttctgatttctaatccagcctgatactctctttagctttggggaattgagttggtaaatctgctttgcagaaatgtagttagtaaatatgcacaggccttgtttcattagcgaatatgtctgatgcttccagtgactacatttctcactgcaaacaggtctctttatataaagttactaatttttttccttggagttttcttacttatcatcacaaaatcaagttcataaattaatggatgatgttaatctactattaaggagaccaagtcagctagtttaatccactcatgtttggataaagcctagctcagacactttacagagtttcctagcctctaagcattaccgggttctcaacttttaaaggaacactcaygagtcctttgcttccaactatagagtactctatataactctggcttaattttggaaggctcacagatgaaatgtttacattgcatttatgtaagatatttaaaacaaatattaaaccagtcaattcaatgatggttttaaattgatggtcctgttaaatgcaactgaaaagaacataaatagtgaatagattttgctctgtacagccttgtaaaaatagcttttgacacagatttacttgaaattgtgctaatattatattgtatattaaaaatgaccaaaagaaacctatcagaaccatttataaatgtctcaaattattatcattatta

SEQ ID NO: 552043 - DNA, 530 bp, Homo sapiens
acaccgtctccaaccaacagaagccagcaggaacctgccttagatgtggtaagtgatctagctaagcaccgtggacagagagagttgcaagaaaaatggtggcataaagtaactgatcctaacatttcacctacgaattgaccccttgcagggaatgagacaacacaacttctcccataggcctggtggtcagagaggctggatcaagaatctccayagcccagcgagaagccacgcgaacacacccctgtgtgggtatccgtgacctggcggcctgcagaactcctgggccagagacgtcctcatcctgttggaatatccaggtatctccactccgaatatcctcatcttcctggaacccctctttttctcctaacattctcttaaatgaaattccatatctgctacaacacagaaagagaggcggaacaagaaaaactggtgatccactaataagaaggccctggagcctctcgatgtttaatcttctcaagggatgagaatgtgtctcgtacttctcagcatctgaa

SEQ ID NO: 552044 - DNA, 579 bp, Homo sapiens
cacctgtcttgcctccacatgaaggggaatcagccccgacctgctgctctgtggccctttgggcacctcgcagccctcctcagagtcccggatggctctgatgtcagcccagctggggagcatcaggcattcatttattggctctagagccaataatwcatttattggctctagagctggttcaaaagtgaaacagcaaggacaagaatgacttcatgtccacacagagctgtcgtgagaaccaagtgagggagtgcagggaagctttcactgcagtgttagcagagagacctccttgtgactgtcaccagagggcaataattcgacctgggacagggcccacaggtaacctgcactcccttggcctccagggctggacgaggtctgaagggaattccccgtggagcacagcctcctggcctctgtccccatgatgtaggtgggggaggggaggggacactgtgcactgaagttgtatcttttattagcattaagagaactaggcacttctgagtgcctctctgttccaggcaagctgcaaacttcttcataaaagtgatgtcacttcaccttgagccc

SEQ ID NO: 552045 - DNA, 1178 bp, Homo sapiens
ctcccgtaatcccagcagtttgggaggccgaggcaggcggatcacaagatcaggagttcaacaccagcctggccaagatggtgaaatcccatctctgcaaaaaacacaaaaatattagccaggcctggtggcgggtacctgtaatcccagctactcaggaggctgagagagaaaattgcttgaacctgggagggggaggctgcagtgagccaaratggcgccactgccctccagcctgggcaacaaagcgagactctacctcaaaaaaaaaaaaaaaaaaagggattcacttttttttctataggttagataagtgtgtgtgtatgtgtatgtatatatatacataaataaaaacactgaggtcaaaatggatacatgctaataatctatggatactatacttggcttactttccctttaggctaacttgtgccagaaatgggtacatgcatttagctacctcatggcagtagcagtatagtgggttaaatattaaactcattttggtggacttgggttttaaacactcatcttttttttgccccttatgaataatgatttaaccacttcgtttcattcttcttatctgttaaacggaaataacatcatttacttatagagttatgtatcgtgaaaaagcaaatgaaataatccatatgaaagcacctggaacacaaaggtattcagtaagttcctagattaattcctatacatgtttaaaaatataacattccctcatttgtgtcttctgatcctacatgtgcaacaatttgcacaatgatatgggggtggggtgacgaagaaaaaatacaaaacagttttcaactagtatttcactgttccccctggaaaaattataaactgctagactgtgatggccttattcacatttgtttctcaggacacctagttataaaacttatggtctttccagtataccacattccttcccaaatatgaactggaaagtgttgaatgaggtatgaatattgaaccagggcattaacttttgtcttgtccttagggtttcttcctccaatccatcctacaacttaatgtcatattaatatttcttttcttttcttttcttttttgagacggagttttcgctcttattgcccaggctgcagtgcaatggcatgctctcggctcaccgcaacctctgcctcccaggttca

SEQ ID NO: 552046 - DNA, 836 bp, Homo sapiens
acacctggccatgaggcacttctagaacctgattatactggaaaacaggcagattatgaagccagaaagtcccagatacaagttctggcttttccacttacctcttaccctgtgatcttggatactcaatgtgtgaaaaaggggatgcctaatgccttcctcagggttactggaaggcttagctgagactgtgtgtaagccatgccatgcagagcagacgctagggaagcttttaaacttttcaaacttgtcttgtcttttcttttttttttgagacagagtcttgctctgtttaccaggctggagtgcagtgttgagatcttggctcaccgaaatctccgcctcctgggttcaagcgattmtcctgcctcagtgtccccagtagctgggattacaagcatgtgccaccacgcctggctaatttttgtatttttagtagagatggggtttcaccatgttggccaggctggtctcgaacttctgacttcaagtgatccacccgccttggcctcccaaagtgctgggattacgggcgtgagccacctgttcgaacttttctaagtgagagctttgaaagcttttttcttttcttttttctttttttgagaaggagtctcgctctgtcgaccaggctggagtgcagtggcgtgatctcgactcactgcaacctccgccttccgggctcacaccattctcctgcctcagcctcctgagtagctgggactacaggtgcccgccaccatgcccggctaattttttgtatttttagtagagacggggtttcaccatgttagccaggatggtctcgatctcctgacctcgtgatccgcctgcct

SEQ ID NO: 552047 - DNA, 556 bp, Homo sapiens
gcagcgtgttactttaaaaatgaaataaagcttgtgttcttagtgacagtcaataacactacagcataataatcaattgctatttgtagcagcaggactagcagtgggggcagatcagtgcaaattactgtcactgtgtgctgtcagtatgcagccagcctgtagaacccaagacaaatgatgccctacgcaataraaagagacagtacttagtcatacctgcacaacagcaaagccacgcatgccggcatcaaatgtaacaggaaagtggatataaatttgaaacattgatgggtaggaaaaataaattaatccagctaagagttctggtcccgagatttaaagttaaatgcttatccttttttttctatgagctggaaataggtggattacaggtgtctggggatccacaaaaaggttagatggctttttagtgaacatcagagaagtctgcgctgtactttactccagtgttgcagagatgactctaaaaccagatattgagtgtaaatcacttgctatggccaattctagtgacaaatcggaatcatcattt

SEQ ID NO: 552048 - DNA, 558 bp, Homo sapiens
ctgttgcattcattcttctgtcttcctgtcccttgctagagatgtgcctgtgtggtcagtggagagctggcttgtcatcttagctgctgtatttcctcacctaccgtcctttccatcttatccatcaaatatgcaaaaaattttcggagtttcttctaggcaaggagaggcaaaaggataattgaagaaaactgaggctgatttgaagtctgcaaaaagggaaggaaggataaagagctctgatagagaggcagcatcagtaatmcaggaatgtagaatgaaatttcaaagacgtccttggctttttgaaagctgagtttcgttcagttgtctcagacttttaaaagaaggagctaaaataagaatgatcatttgaatttaggaaagactttcttactttccaaagagaatttatttcataatcacagattattctgttgatgtccaatcaatcatctaatctatgttgctaattgtcacaaggctgatcaaaagcgtggctgtctcagtgcaacgccatcctggctactggcaagcatggaaaagtcatgtcctttc

SEQ ID NO: 552049 - DNA, 1311 bp, Homo sapiens
tgggagtagatcaaaactccctctgttttggctttttattcaacctaagtaacaaccctctgccattccggccaaattcagttcacatgtcagatagcctgcttcctttacgtttccttactctcttgtccatgctttttaggtgctgattgggataggccttctcctttatcttcttgtttgcaggaacttcccttacaccattaagctccactgctcaactttgatgacagaaaggttgaatccctacrtgataagaaactgcatgactcttgatatgagaactacgggtcacttaagaactagagttaattataaatacaaatatatttaatactctctaatattgccccattataatattatcattatcatcagcatgtaggacatgcttatttctttctcagtgcccttcgacttttcctgtgatcttgcattgcccaccacattctagattttctagctgatttgcctgttaaaaggcagtaggaaggcagtccacctgctgtttgcttggaatacaggaaatgaacatcataccatatgggctgtttaacatccacccacatggccccagacacaagcatcagatcctctggcaactgtgggccaggcacaactggggtggctgctttacttaggaatgacatattttaaaaaatcttcttaattaaatttgtatcgcactgaaacaaaattaatttttggtctttctattgactacaaactgaccgagggtctctctgattgtccattgtacatataagcctaaaaatgaatagtaaatgtttatatcattggcaactgcataattatcactctcacctagcagtgctgaccgtacatagattaaataaaaaactctgaatgtgaggcaaggggctgccactgagacctttcctaaatgtgtactcctgcctcaactaccacactttgtcatttatttctttaaatcaagacacagttttttataccttaatgtaaatgggtttgccaaacaatttaaaagttaatttttgtcaagggaaggaaacttaggctcctatatctctgggagaatgaagatttatataccaaaggagagacaggtatagaaaaggaagtgtggggaagcaacacaaactttacagtttatcagaagcaggtgcttaggaggagtgctatctggaagagaggcctactgcattgccatagctctgtaacaggcagcaaagtgatcccagttgtacaggtcagttagggtgcttcaccaggtgctttttcagctgatgtggaccggtattgccccacaacaattgagaggtggtggaa

SEQ ID NO: 552050 - DNA, 1311 bp, Homo sapiens
tgggagtagatcaaaactccctctgttttggctttttattcaacctaagtaacaaccctctgccattccggccaaattcagttcacatgtcagatagcctgcttcctttacgtttccttactctcttgtccatgctttttaggtgctgattgggataggccttctcctttatcttcttgtttgcaggaacttcccttacaccattaagctccactgctcaactttgatgacagaaaggttgaatccctacgtgataagaaactgcatgactcttgatatgagaactacgggtcacttaagaactagagttaattataaatacaaatatatttaatactctctaatattgccccattataatattatcattatcatcagcatgtaggacatgcttatttctttctcagtgcccttcgacttttcctgtgatcttgcattgcccaccacattctagattttctagctgatttgcctgttaaaaggcagtaggaaggcagtccacctgctgtttgcttggaatacaggaaatgaacatcataccatatgggctgtttaacatccacccacatggccccagacacaagcatcagatcctctggcaactgtgggccaggcacaactggggtggctgctttacttaggaatgacatattttaaaaaatcttcttaattaaatttgtatcgcactgaaacaaaattaatttttggtctttctattgactacaaactgaccgagggtctctctgattgtccattgtacatataagcctaaaaatgaatagtaaatgtttatatcattggcaactgcataattatcactctcacctagcagtgctgaccgtacatagattaaataaaaaactctgaatgtgaggcaaggggctgccactgagacctttcctaaatgtgtactcctgcctcaactaccacactttgtcatttatttctttaaatcaagacacagttttttataccttaatgtaaatgggtttgccaaacaatttaaaagttaatttttgtcaagggaaggaaacttaggctcctatatctctgggagaatgaagatttatataccaaaggagagacaggtatagaaaaggaagtgtggggaagcaacacaaactttacagtttatcagaagcaggtgcttaggaggagtgctatctggaagagaggcctactgcattgccatagctctgtaacaggcmgcaaagtgatcccagttgtacaggtcagttagggtgcttcaccaggtgctttttcagctgatgtggaccggtattgccccacaacaattgagaggtggtggaa

SEQ ID NO: 552051 - DNA, 571 bp, Homo sapiens
ggtgattggaagtagtgttttgtgaaattgtagagcagtcggatgattgccagagtctaggtggccaataataacctgaatgaaggtggtggcgatgggagaagtgggaagagaagggaggtacatctcagaggaggcttgaggactggtgggatacggcagggaattgtaaggaggagttgagagggggccttcctgaagcagtgcacagcctgcttggtgacagaattcyttaatctagtagcaccttgggtagctgagtttctgtacctagtaatgcgagggtggcatcccagttttgtgggacctgaagcaatcaatctgagagccctcttagaaaaaaaatacaaaataggtacaaaagtgaatatacattagagtaagagaagaaatcacaacaaattacaaacaatgaaaagctgaaaaataatacaaatattggaaatgttgtaattttatgataactttattaactaactgcctgacatatctgtaaaatatactttccctacatcttttctctgtatactttttgtaaattgagataaaagtcatataatacaaagtccac

SEQ ID NO: 552052 - DNA, 571 bp, Homo sapiens
ggtgattggaagtagtgttttgtgaaattgtagagcagtcggatgattgccagagtctaggtggccaataataacctgaatgaaggtggtggcgatgggagaagtgggaagagaagggaggtacatctcagaggaggcttgaggactggtgggatacggcagggaattgtaaggaggagttgagagggggccttcctgaagcagtgcacagcctgcttggtgacagaattccttaatctagtagcaccttgggtagctgagtttctgtacctagtaatgcgagggtggcatcccagttttgtgggacctgaagcaatcaatctgagagccctcttagaaaaaaaatacaaaataggtacaaaagtgaatatacattagagtaagagaagaaatcacaacaaattacaaacaatgaaaagctgaaaaataatacaaatattggaaatgttgtaattttatgataactttattaactaactgcctgacatatctgtaaaatatactttccctacatcttttctctgtatactttttgtaaattgagataaaagtcatatamtacaaagtccac

SEQ ID NO: 552053 - DNA, 562 bp, Homo sapiens
gggtcttgtacatctaatttgccccacaaatgttaaaacagcaaacccgcatccccttcctcttctcatgtgctktgagggatgacctccaggctctcagataccaagattatacaagacctaacccagagaattactcaagacactttctacacaagaagaattgtggtgctagctctcctcatagaaaaatgttttctgtctcttgttgaaattgacagcaaacagaaaaacacagaactatttgggagaacagaggacagtgatacactagggaagtaaaacacaccccttccccttgcattggtttcctgttgctgctataacaaattaccacaaccttactgctccacataacacaagtgtattatcttacatttccggaggtcagaagtctcaatgaagtaaaatcaaggagtaatagagctctattcattctaggcttcaagagagagaatccaatatcgagcattccatctttctgatgttcccacattcccagcagcatggcccctacctccatcactccagtttccccgtccgttgtcccaggtcctctctg

SEQ ID NO: 552054 - DNA, 619 bp, Homo sapiens
ttttcaatgctctaaattaaaaaatgaaaactttatactgtaaagacagagtggtagggactcatttgtcaagtactaatagtttttctatctttgatattagaacaactgagccccaaaattcttctgtgttgtctctagaaaaagtgtactgaagcacaaaattaatactcagcactgcagttttatttgtatgtcatatatcacattaaatttattttatagttttctactcttttaaaatcatattcatactatccatcctgttaaatcttttttaccaatcacataaatattgttttatgggaagaagaatttctgagattccagtaatgcttgagggtgactaaataatgaggatatctaagtcataattttcagtactctgaaataaaaatatatatatttaatattggctttattattgttttgaatcttctcaaaatattttaatattttccactcatttaaacaaaataatatgtatctgaaaataagttatgtttagacaagtttcttcaaatgttgccgctgaactcaataaacttagagatgccaatgattgttagtgaaaattatcagtgatggtttagtggatggtgaaggctttatttwaaaa

SEQ ID NO: 552055 - DNA, 517 bp, Homo sapiens
taaaaataaaaatttgtttccttaaatttttatataaatatttaactgaaatgtatctcctaaataagattttccacacagagagcattgaatagagatgtactaaaagatatgtctagagtcctgaaaaaaaatcatagaaaatataccaaatcagccagtaaacaaaagcaatatatagatatacagaaagctctgggaaaataacagaagaaaaaaaataagtaatacaaaatggcagaatgtcttcatatgtgtgtatgagagtcttgatttctcaggacattcactgcaaatatgtgcatggaaaaagcatttcagaattcatatatttctgtcttctgggatggagtggcagagtcaagggtttgtaaagagtgaaactaggtttcgtctggagtgtttggatgtgtgtttgtatctgtgtgtctgtgggtgcatgcacaggcatacacacacccattctttgcatggctattaacagaagaaaatctggggttcaacaayatggctaaaa

SEQ ID NO: 552056 - DNA, 660 bp, Homo sapiens
cagaacaagtagaagcacagcttagagttttaaagtatggatttgtgttcatcccatttcctatctcaaatgatatttgggagagaggagtggatcctttgaatgcatcccactgtccccctctgatacataaaggtatctataaattctgagcactttattttttgwaagtcacaatgcctccaaaggagacaatttttgtgagtgtcagagtcatgagggcttaaaggattctacgctgacaagagaagacgcaaactgtttctcattcctggccaattgttttagaagcaatggttggaaaaggagctggttcttaacttggctccttttagaaagtacttggaggaagatgagaagtgatgtaaaactcagggttaactttattagaaaaagaaccactcacggaattgcatttagaaacttggcaacctcaaaaacttgaactgtggattttagagagtcctttctcaacagttcatgctgaatacaactgataaaatgagcccaaaaaaagaaaagatatcacctacttataaagagaaatgaaaactgttttcgactgtcataaaattcttatcagatacacagactataattaacctgatatatgtatataagaattgttataaaaggtgtgattacactgtgaatgaatta

SEQ ID NO: 552057 - DNA, 660 bp, Homo sapiens
cagaacaagtagaagcacagcttagagttttaaagtatggatttgtgttcatcccatttcctatctcaaatgatatttgggagagaggagtggatcctttgaatgcatcccactgtccccctctgatacataaaggtatctataaattctgagcactttattttttgtaagtcacaatgcctccaaaggagacaatttttgtgagtgtcagagtcatgagggcttaaaggattctacgctgacaagagaagacgcaaactgtttctcattcctggccaattgttttagaagcaatggttggaaaaggagctggttcttaacttggctccttttagaaagtacttggaggaagatgagaagtgatgtaaaactcagggttaactttattrgaaaaagaaccactcacggaattgcatttagaaacttggcaacctcaaaaacttgaactgtggattttagagagtcctttctcaacagttcatgctgaatacaactgataaaatgagcccaaaaaaagaaaagatatcacctacttataaagagaaatgaaaactgttttcgactgtcataaaattcttatcagatacacagactataattaacctgatatatgtatataagaattgttataaaaggtgtgattacactgtgaatgaatta

SEQ ID NO: 552058 - DNA, 418 bp, Homo sapiens
  misc_feature 317, 318, 319, 320, 321, 322, 323, 324, 325, 326, 327, 328,329, 330, 331, 332, 333, 334, 335, 336, 337, 338, 339, 340,341, 342, 343, 344, 345, 346, 347, 348, 349, 350, 351, 352,353, 354, 355, 356, 357, 358, 359, 360, 361, 362, 363: n = A,T,C or G
  misc_feature 364, 365, 366, 367, 368, 369, 370, 371, 372, 373, 374, 375,376, 377, 378, 379, 380, 381, 382, 383, 384, 385, 386, 387,388, 389, 390, 391, 392, 393, 394, 395, 396, 397, 398, 399,400, 401, 402, 403, 404, 405, 406, 407, 408, 409, 410: n = A,T,C or G
  misc_feature 411, 412, 413, 414, 415, 416: n = A,T,C or G
aagatattaagatagatacaaagttttagttataaaaataacatggtacataaaagcaaatatagaaaaatgttgatagaagaatgtagatgatgagtggtcattataaaacttaaaactttgctgaaaaagaaaacacgacacagaggcatggacagaaaaacagaccaaaggacataatagggrgctcagaaacagtcctgcgtatacacaggtatgcaactgtattgatatacaataaagtttgcatcggattaataggaaaaagtagccatcagaagagaaaacttggagctagatctctaccttacatcatnnnnnnnnnnnnnnnnnnnnnnnnnnnnnnnnnnnnnnnnnnnnnnnnnnnnnnnnnnnnnnnnnnnnnnnnnnnnnnnnnnnnnnnnnnnnnnnnnnnnag

SEQ ID NO: 552059 - DNA, 614 bp, Homo sapiens
taaaggacttatattagataattctattgcatactacctttaaaaagaggcgttcttttgtgtttaaattcgccctctggtgtttagtacatagcagaacattctaggtgctttgtttactcactgacgggtgctgaggacactgactgctccaaattttctmtgtaaaaggaacttacgaacggcaatttaatttaaagacatagctacttttggtatgataggcgtgctggtttgttttggggaagcagcattaagacactgaggagacattaaagcactgtgaagccgcttcttgccgtggcttcttgcaggatatgcaagtatgtacaatattcgaaacaaatcattactatgttctttaaaaacgaataaaggtctttcacacaacattgcatttattctttagaaattgaacacaaatgtggtggagacgggacagggcaggtggaaattcacttataagtcctgattggctaagccctggtcacgagaccgtaaaagagcaacgtctgtctcagagcgactcccacagcgtccttagcaaccagccttggttcccagcggctcagagcgcagcggtgagtgattaagaggtcctgcttcagatgatt

SEQ ID NO: 552060 - DNA, 552 bp, Homo sapiens
ttgttctagcagcacaactgtactaagacctctggaatgcaatatttattttagaagggcattttccaaggggaaacttattgaggaactatgggtttttgccatctaccgtgtagtaatagctagtttattgaatrgactaaagccagtgcagatggtttaattttttccattaattgccttcagacatggtctgttgtatatctcttctcatacctggatgacatttcaagtattgaaaggtccaccaagtcttaatcaaaatttcaatcttatacccagtttccaagtacagagataaagagcaaaagccacatcaagttccccatccctatgggggactggtctcagtgctcaggatcaagcccgagctagaagaaatagggaatgttttgtcttggatgagaatttaaaagaaggcaaatgttttccaccttctcggaactagcttgatgccctacaagcctcatcaacagctgcctactgtatacctttctcctttcttctctccccatagtaaaatgttttcaaagcacatggaatcattatagc

SEQ ID NO: 552061 - DNA, 1917 bp, Homo sapiens
tattaagaaattcattgcaagaaattggctcatgcagtagtgggggctggctaggcaagtcccaaattcatgggcaggccatccaaaagggcaggttagaactcttgggcacaggctgaaacagctgtgctcaaaaaagacaacatttcttcttctggaaagcctcagctctgctctagacccagttctgcttttcgactgattaaatcaggcctgctacattatgaagagtaattttccttactaacagccaactgattataggctttaatcacatctacaaaatgccttcctagcaacacccagattagtgtttgattgaataacggggactgcagcctaaccatgttgacacataaagaacatcatcatgctgcatcttttacttttctccctgaattgttttgcttaatttttttctacttttggcctctgaggatttcttctttctttcatgttttactattgttaggggcttaatactggaggatgtttaagaatatcttgtctattgcacgaaatcaaagcctcaagtaaacttcttatttaagacattcggaaattgtgagatgctttttaaaaattacatgctctaatataaataaatgtaaatggtataataccattaacactagctccttggaatttattagcttgtcagatcaccaatctgataaatcagaacaaagttataaacttgggggatatttataattttgttctgatttcatggaaatccagtgagttgaagattctaagtgaccaccatactccacattgagtttaacatgtactcagtagatggtactattggaattggctaacacaaacacttcttgacacaacctgcctgagtcttgtcttgaatttcttgattacttgattgccttgtgaatagaggtggcttcacagtagtttgtgctttgctttgctatgagatagcgaacattttaattattgctctatatttgttttttattttttcttctgttttttggaggggtggcatgtgcatatatgttattattattatctgccgtaagaactggtgggaggattgataaagtgcttcaagattttactaacgagagggatgaaaagactgttggtsaaaatttggggaaatgcttaatgcatgaatgtatagggagataaaataataaccctattagttttgtttgcttaataaaattcgagaccaacactttaggtactcagagtgccagaggcctcagcacaatttctctgtagctctgagatactcagtttttttttaaagccttttttcattaaccagccttcatgcaaataatcttcttctttgcatttcctcagcactggatagtcttttggtatgttccttcatcacttcaggtgtctgggtttccatgccccaataaggagacggctctccaggaaacacaacatctgcttgtcttatctcctccaggatgctctgtgctgagcccatcctgtcacagtggcagaggctgcagaactgaactagaacagccaagagcactgtgggaggcattctaaggtgggagggtgcctttggaacaatatgagcaaaggatcagtttcacctgatagatggttcttttgtaggacagaaagtcttaatactaaataaatgttacttgatgtgttcactatctaagctctctggcatttcccacaactctgcagggcaatgaataagtagctttgagttttcccttcatcattcctgtgctgccatctgccttgggtggaggcaggaggaggcttgttctgttctgacccaccttctggcttcatcctgcaaaggcctgagagagcctctgagctttccacccctcacccatagagtcatcagaagttctgatgagaaagtgagattcactctaaagaaaacccccaaagatctgggtacag

SEQ ID NO: 552062 - DNA, 531 bp, Homo sapiens
ggtcaaagcaaatttctcccctttctccaaytgttgcaccaagcttgtagctaaacttctgttgtcattattctctggccattttatattctaattattcgtcaaccagtcatattctagcacttcgaagggaataggtgtggattccagactttccaaaattttcagaaaaaagaaccttggttaccatccaatccaactgacaaatgagtaaactgagacttcaaagatgctaagtgatttgtctatggcagtgcttacccagtagagctttcagcaatgttggaaatgttctatgtctgtgctgtccagtgtggaagccagtagccttatgtggccattgagcactgaaaatgtggctagtgctactaaggaactggtttctaattgtatctaattttatttgatttcgatttaaatagccacgtgtggctagtggctaccatattggatggcataggtctaaggtcacagaactgagatgcaacacaaggccttctctgattttaaagcatttttttctttcccccc

SEQ ID NO: 552063 - DNA, 531 bp, Homo sapiens
ggtcaaagcaaatttctcccctttctccaactgttgcaccaagcttgtagctaaacttctgttgtcattattctctggccattttatattctaattattcgtcaaccagtcatattctagcacttcgaagggaataggtgtggattccagamtttccaaaattttcagaaaaaagaaccttggttaccatccaatccaactgacaaatgagtaaactgagacttcaaagatgctaagtgatttgtctatggcagtgcttacccagtagagctttcagcaatgttggaaatgttctatgtctgtgctgtccagtgtggaagccagtagccttatgtggccattgagcactgaaaatgtggctagtgctactaaggaactggtttctaattgtatctaattttatttgatttcgatttaaatagccacgtgtggctagtggctaccatattggatggcataggtctaaggtcacagaactgagatgcaacacaaggccttctctgattttaaagcatttttttctttcccccc

SEQ ID NO: 552064 - DNA, 585 bp, Homo sapiens
ccagtttatcctttatctagatctgactaacaccttgcccaattagcttcataatttcctttctctttgtctatgtgtgtatgtatgtgtgtatgtgtacatacacacatgattttttgaggtatttgagagtgcatcatctatatattatagacctttgttatcacagttatcaactggagtaaatttatgactgatacagtccagttatctactctgccatctgtatttcagttttatcgattgactcattaatgtcctttawagaattttccctctccagtgtaggatccagtctagggtcatgtgttgcattaaattgtccctctctttagtcccctttaatctgggatgtttccacagtctttgtcttttatgacatttgacatttttgaataattttttaatggcttatttttaagggaatatttctcatatttgtttgctctctcctcatggcgagattcaggtttttgcattccaggcaagaatacgacactggtgatgtcaagtcctcttaaggaatgaggtctggaggcccatcacatccatctgcccctctctgtgatgttaattgtgatcatc

SEQ ID NO: 552065 - DNA, 585 bp, Homo sapiens
ccagtttatcctttatctagatctgactaacaccttgcccaattagcttcataatttcctttctctttgtctatgtgtgtatgtatgtgtgtatgtgtacatacacacatgattttttgaggtatttgagagtgcatcatctatatattatagacctttgttatcacagttatcaactggagtaaatttatgactgatacagtccagttatctactctgccatctgtatttcagttttatcgattgactcattaatgtcctttatagaattttccctctccagtgtaggatccagtctagggtcatgtgttgcattaaattgtccctctctttagtcccctttaatctgggatgtttccacagtctttgtcttttatgacatttgacatttttgaakaattttttaatggcttatttttaagggaatatttctcatatttgtttgctctctcctcatggcgagattcaggtttttgcattccaggcaagaatacgacactggtgatgtcaagtcctcttaaggaatgaggtctggaggcccatcacatccatctgcccctctctgtgatgttaattgtgatcatc

SEQ ID NO: 552066 - DNA, 585 bp, Homo sapiens
ccagtttatcctttatctagatctgactaacaccttgcccaattagcttcataatttcctttctctttgtctatgtgtgtatgtatgtgtgtatgtgtacatacacacatgattttttgaggtatttgagagtgcatcatctatatattatagacctttgttatcacagttatcaactggagtaaatttatgactgatacagtccagttatctactctgccatctgtatttcagttttatcgattgactcattaatgtcctttatagaattttccctctccagtgtaggatccagtctagggtcatgtgttgcattaaattgtccctctctttagtcccctttaatctgggatgtttccacagtctttgtcttttatgacatttgacatttttgaataattttttaatggcttatttttaagggaatatttctcatatttgtttgctctctcctcatggcgagattcaggtttttgcattccaggcaagaatacgacactggtgatgtcaagtcctcttaaggaatgaggtctggaggcccatcacrtccatctgcccctctctgtgatgttaattgtgatcatc

SEQ ID NO: 552067 - DNA, 547 bp, Homo sapiens
tcaaactgtattactttaatggaagcaagtggtcccacaaatgaagatttatatatcagctgcaccatgccatctatagagataggaacggtgggtggtgggaccaacctactacctcagcaagcctgtttgcaggtatgatgtatcaggcatagagtccacaagcctagttctgactctctgggtttctctttctatctgagactatgtatcactcacctctattttaattggtcttttccaaactcttttgtcatatcagcctaatccattgtgtccaaataagcatgtttaagcttatgcttagataagaaagtagatgaagagagcaaatgaatgttcatctactgagttaagggtactgccagtcaggctgtgaatattatgttagctatggtattatgcactgtcaggtgtggctgtcaagtcttggaaagttagtgcttccagtggagtctagttctattctgatgccattayagttgccctgtttttagttgatttagtaagaaattggtcatgattttaagggtgaatcttgttgtgt

SEQ ID NO: 552068 - DNA, 1138 bp, Homo sapiens
attgtatagattaaaatctttgttttttacgttagattcactcagaatacaaaaattaattcatatgtgcagacaaaaaatgtcatttctaccaagtgctaaatgaatgccatatatatatatatatatatatatatatatatatatatatatatgcggacagtgtggtgaaaaggttaaaagctcaggtctgtgtgttagatttgcttagaattcaggttctgccactcactcagtgacctaagggaaggtaaacagcctyggtagtccttctctgtaaagtagcaataattctaatgcctcccttgcagggttgttctgggatgttttgagagattttgtgtaaaacattcagcacagatcttggcacttagtatgcatcgaataagcaatagatgctaatataatataaaagcatggaaggttggagacagggagagagatgaagccgggctgtgtgggcagggcaaagcaaagaccttgaggagagaggataagtgtggtggtgagagaagttaagtggcagaattaaaggttacaagcatttataaatacaagttaagatttccccatactaagaaacaagaagtgtactgcagggtgttttgccccatatcttgggcatcactgtgtgatttgggaatgttgttaacttaagcttttctctccatgagaaggaaaagcagccttctctgacctggcaaagttgtggacttcaggtaaagcagagaccaggtgagaatggctttgcacggagtagaattggttaaattttcctgacacactctggcatcttggcagctaaatgtcaggttccaggtcagagcagaagtgtgtttacttaaaaacaagaccagcagggtgaggcctggctgctccagctgcttatgatgttgagcatctgtgatgtgaaggtcacaatagcttaaaaattagtgagaaaagacgttcctgttgttgtgtatcatcaagaatataaaaggaaaacaactcttctactaagttccttcattccactaaaccaattttaagattgtgaaaaatgatggcttctccttaacaaacagagggtgaaagcattcaatattcacaaaagggaacccacacatctagagaaatgaatctttttgtcatttta

SEQ ID NO: 552069 - DNA, 1123 bp, Homo sapiens
ttgtacgtcttaaatttatttttcatttaaaatatttcctcattcttgcagctccacataatcagggagaaacatcaataaaagcaggcaagattttacaataaatggttgaaaaaggcactggctgaaattaacctgacaggaacgcgtcctgtgtgattgtgtttctctcattccagacgtgcgtgtgtgtgcgtgtgtgtgtgtctctactttgggttaatgtgggaatgctttcctatatcaataagtcacaagtcgatctgtgaaaagattgtgcatacaaaatggagatgaagatcacaggggctttaataataaaataaacataaacaacactcgaatctctttataaatcccagagcacaatgtgcgttttcttacttccttttcatggaccccarataaagactttgacagccagatatccaagatccggatcagccagcttcctaaaattctcctctttttttttaaggggtagaaaactgggggtatcccttggtggttaggggttgcttagagactgtggtagagatttggtgttaacaaaaatgtattttgaaagcaggatttcaattttcttatattgaatggcaaaggttccatgcacctggctatcttcatttctgaaatgaatgctttcattttattctctccagctaccttctccctttctttcctttccacccccattgcctcctttcagtgtctttctttttctccttattctttcactcctttctctctcacagcaaaatgttctggaggatgtgaatgattaaactgtttactccaaggtttaggtatgaaaaggcaagtcactgtaagtaaagtttcacctttatacccaactccatcaataattacagaacaaggatgactattagtaaatctttcttacaattggctcttacaaaaatgatttcattttttctgggcataccaagtttgacagattttacttttcacaaaaattatttacacagcagaggaacctgctccaaaatgaaggaagcatataaagggccgttgagtgtatccataggaaaatgaatacctataaaatgcatctcaataaattagagatttgaggccataaatagaacgttttgacatatta

SEQ ID NO: 552070 - DNA, 548 bp, Homo sapiens
atacggaataagcaggactgtggtagggggaggtgggacaactggaagaactctgttttggtttttggttttctttttcagagcggctctgtggggctggttcttttcatgctccaggatgaagtcttgggcaggcccagtgtattttctgttcactgtaatacaataaaaagttctctggtcacattttccttccagacagtctcagtttggtgattaatatgtccagcctcaggcagacgaatttaaagygaaagcttctcccatcccatccctggctggaacttgctgcagggaaggccgatgccggctgctgggtctcctcaccagcttcctgggctgctctgacttctccaagttgggacccatccagcaggggtttcctctgtgtgtggtctgagtttaaagctcagtctttggggatgctcccctttcaagaagcaggacatgcatctcctctgcccagtctcctatgatcccccatcccatctccttggcactgggtgggattcctgcagcctctctgtgctgcagcttcttgccctgca

SEQ ID NO: 552071 - DNA, 1944 bp, Homo sapiens
  misc_feature 1320, 1321, 1322, 1323, 1324, 1325, 1326, 1327, 1328, 1329,1330, 1331, 1332, 1333, 1334, 1335, 1336, 1337, 1338, 1339,1340, 1341, 1342, 1343, 1344, 1345, 1346, 1347, 1348, 1349,1350, 1351, 1352, 1353, 1354, 1355, 1356, 1357, 1358: n = A,T,C or G
  misc_feature 1359, 1360, 1361, 1362, 1363, 1364, 1365, 1366, 1367, 1368,1369, 1370, 1371, 1372, 1373, 1374, 1375, 1376, 1377, 1378,1379, 1380, 1381, 1382, 1383, 1384, 1385, 1386, 1387, 1388,1389, 1390, 1391, 1392, 1393, 1394, 1395, 1396, 1397: n = A,T,C or G
  misc_feature 1398, 1399, 1400, 1401, 1402, 1403, 1404, 1405, 1406, 1407,1408, 1409, 1410, 1411, 1412, 1413, 1414, 1415, 1416, 1417,1418, 1419: n = A,T,C or G
gcattttgaataccattctttgtataaaggttaaactcatattttcaatgcagtgtttcctctcttaaaaggaaatactcattagaacccaaacaattacctaattgttaatttgttttgatcttatttatagttcttcaaccagagtattatctgttttgattgcaagataatttttaagctttcaagaagaaaaatgtttaaaaagagaaatatggttatcagagaattactccttccaaaaggtcaaaaagaagagggctaaagattttagaaaaatattttgggcaaagttgtaatctgtggtgggctcacatactttccaaggatgtacatgagaccaataaataatttcttggactcgataaaaaaatcattatcaaatgatcatactaagaaaatgtgaaaaaatattacacaaggggacagcatgtgatcaattcagcattactttcaatgccattttagctaacatgattgtaataatttacataatatagtgcattaattagaaaaaatgctaaagtacatcattcatctattattccccaagatttctaaatgactagaccatctcatctcacttactgcttagaaattgaactaagaattsaggcattgaaaattcatgctgaattttaaagatgtatacggggaaaatacatttggtggttctatatattgcttttcaggtaagatatcatacttgacaaaatattttaaattcaattacaaatactattacaagtgacacaattgtgtcagggtacatatatgctatatatatttatttcaaggttatgctgtaaattacagaaagtgatggagggcaatatcaggaaaaccattgtgagaatttctctcctttttaaggagagaactcagtcaggcagaggaatgccatctgatctgtcaaaaggtgaagatcaatgaggagtgaaagccaaatttcagttatatttaaggtaaacaaatgggataaggcaaatggaagcatacaggcaagagtggagggtgttctaagcttaagaatatttcaaagataatttgaggttaagtctaggacttcctaagaatggataaaatcaagtgatacagcgctccgatacatccaaacaccacttggtattttacccattttgtttatattctgaaaaaaagttttgttttatttctctatgctaattttttctctcttattttagtatattaacatttatttttattttctgacttcagtttggtgtttcttcagaaatgtcattatagttttaattatataaactttttgtcacctgccaattacacctgtattgatgnnnnnnnnnnnnnnnnnnnnnnnnnnnnnnnnnnnnnnnnnnnnnnnnnnnnnnnnnnnnnnnnnnnnnnnnnnnnnnnnnnnnnnnnnnnnnnnnnnnnaggcactgtctaagtgggaaacccacaataaccaaaccaaaatttcaacaaagccccaaagcaggtggtgctagacatgttgaaaccatctgaattgctgggatatagaagtgagggaaagaattcatagaagctgaggtcacagagataaagggtcagggtacagattgtgaaagatcatactgttacttaaaatttcttaatattaccccattacctagtaaatgcactaatccagttcctaagtttagcttgcaagaccatgctggactggcccaatataatttttaattgatgtcccactgtatcacacaggacactgtatattccagtgatagcaatgtttatatttttgcctctgttcttgcttttgcttattttttcagattgtttttccttttgaaataatctccctttctgtcctcaaatcattttccttaggaaactatcttagaattcaaacagggtaataagatttaaaataccatccagacattcttctttcctactaaacaataagttctt

SEQ ID NO: 552072 - DNA, 1270 bp, Homo sapiens
gctgatgattaactcagcaaacactagttactgtgtgctagccaatatggtgatacaaagataaaaatagctgggcatgatggctcatgcctttaattccagcactttgggtggctgaggtgggaggatcacttgagtccaggagttcgagaccagcctgggcaacacagtgagaccccatctctaaaacagataataaataaaactctggcttctatagactagagaatgcaactaactttttctttgcaattaacttgcttagttaaattcattacctttttttaattctccagacttgttaagtaccttctttttaatagctggcatttgtatatataaacacttacttaattggtgagcttatcacatttcattgattatcaacatctgtaccaaaaaataccacgtaaggaccagtaattaagaaattaaaacacaatatataagccattatttttggaattttttwaaattaaaatttgtatgaaagcatatttcctcatggtttctctcttcccacttatggttaattggtaattcactgtacatgttcttataagtcattatatgaattattttttatggtaaaatctgaatagaagattaaaaccattacattgattgatgaggtaatattggtatttaaaataatgtacgtgggccaggcacagtggctcacacctataatcccagcactttgggggggccgaggtgggtagatcacttgagcttaggattttgagaccagcctggacagcattttgaaatctcatctctacaaaaaatacaaaaattagccgagtgtggtggcacatgcctatggtcccagctacttgggagactgaggtgggatgatcgctggagcctgggaagtcgaggctgccatgagccatgatggtgccactgcactctggcctgggtgacagagaaagatcctgtcacaaaaaataaaataatatacttgatacttttcaggataaagaattgttctcaggactttaagaagactgctgatcagctaactactggtttagaacgttcagcctccacagacaagactcttttgaactcatcagctgtaatgttggtatgaaacatattggtcatgaagtacgatgaaggcaaacgtttgactttgtctctagtagctcaactttcttctcctataattatagattcttttggaagtttatacgtaacaagttaacccaccctcttacttgaatctcttttgttctatgcttagacagttctcttttcttccaag

SEQ ID NO: 552073 - DNA, 625 bp, Homo sapiens
attgacaggacggtaaacgtaacttgcaatgcccatcaaaagacagcaaacagaaaaacacagtacatatttcaaaagcaaatctcagacacaattcaggttgcacatatcagacattaaaaatgttaaggaaaatgaaatctatgtatttgataggtctcaattatggtgtaagagattctttaggtctagggaaaattgttccagtgttaaagcagagcagcagcataggaactagacataggaacgaccataaagcttaaaaaaaacagccataaagaaaaacactgacgatggttttcaactctttttgtttgtttgagataggttctccctccattacacagggtggactgcagtagtgtgttcayagctcactgcagccgtgaacttccaggctccagtaatcctcctgcctcagccttactcccacaccacaccaggctaatttttgtattctttgtagagacggcatctcgctacgttgcccaggctggtctcaaattcctgggctcaagtgatccgcataccctggtctcccaaagtgttggaattcagacgtgagccactgcaaccagcctcaactctgttttcaacaggaattttgggtagaggaaatacttct

SEQ ID NO: 552074 - DNA, 604 bp, Homo sapiens
tattgtgcagccagtgttgaaaaccacagatctggttgaaccatatgaaattaccaacataaaaatggcaatatcatatggtataactgaataaaaggataaaggaaaaaaaacagcatgtttgaaaaaaaatgtgttgagatggacgcctatttgtaagtttatttgtwtttgcctttagctaaatgtgtgtaaatatacagttatacatatatgcatttctcaatttcataccttgcttaatgggtgtagataccaaaagataagaataaaacacatacaagttggaaatttctgggccatgaaaaaaaaaacatgcaaaatcacattattgccaacatgacttacttgatccccataagcatgacgacctatgatgataggttttacccatccactcacaagccgggggatatttttgcagataatggcttctctgaagaccgtgccacccagaatatttcgtatggtgccatttggtgatttccacatttgtttcaacttgaactcctcaaccctcttctcatcaggagtgatagtggcacatttgacgccaacattatgcttctttatagcttctgcagcatccttggtgacttggtcg

SEQ ID NO: 552075 - DNA, 604 bp, Homo sapiens
caggatacagtacatttcagctaggttctgggtcagaggcaatctgctgtgctcattcacaggagatttcaaaggtgagaagagttccaactttcccgatctaacggcaccataacaccctcattccccaacatcctcaatgtaaagtgtgagctcataaataaacaaatacatttaagaaggctatttacaaacattttataaggtggtagggtcaaaggacattttcttttgtttcgttgtatttcacaagtaggtattatataataataagtaggtattatatctggaattagtaagagagcaaaccaaaaagccaaagggtttccgtyagcccaaataactagaattttaggtaggataacaaactgaagtgaaaaatccactgtttatgggccagatgatgaatgctacattataaaatcttttgtatctcttctacttctgactgacagggttatttaaaaaacccatcttctaaaaaaaccccaaaggctcccatagtagacaccagccctctggtggtggaggtggtgtgggtgtgatctatttttaagtgtgcgtgggtagctatttatacaaaactaaattctgtgccactgta

SEQ ID NO: 552076 - DNA, 523 bp, Homo sapiens
ttcaaagctccccaggtgactaactgcaaccaggagcgagactcatggctccagcctagaccagatcctaaaattcgtctagggctccatttccctctctctaagtcggcagaagcagactaaggacttcaatatagaattatcttaaggaaatttacaaaacatgaaattgaccattttcacacagacacttcaacggcatttacagtcaacaatgtggtgcaaccaccacctctatctacttaaaaacatttatatcacccccagaggaaaccccagacccactaataacagtcactccccatgtcccctcctctcagcccctggcaacacccatmtgctctggctctatgggtttacccattctggacatttcatagaaatggaatcctgcagtacaagcccttttgtgtctggcttttttcactttgtctaatctttttgaggttcatccacattgcagcatgcacgcatatctcatttcttttaagttacattgagacactagtgctcggtgaaccga

SEQ ID NO: 552077 - DNA, 1518 bp, Homo sapiens
catgagtggccagaaaaggcaggcgacaaaggccagcttgcatctgaggacggaacytggcccatccccaagcctggggggcaccacctgcggctgctggtgcccctttcagtccctgctgccacatcctgtgaaccaggacagggtaaggcctcctttccccagcgggctcttctcaaaagagttccccgggaacagcagccctcggtgtgagtgtaaggtacttttccagcggacgcttctcccgttctttaacaaaaagcactgtgtacccaccaggggcaggtgcctcgggggtggggcaagcgagccaagtgtgcgaccctcctcggcttagcgtccagtggtggggcagatagtcaaaagggcatgcgatataacaaagccaggggtagggtggggctggggctggctctttcctggtagggccgcccagaggcctctctgccaccttctccgaggcctgcagggtctggtccacctctgggggcactgattccggtgggcggtgggcagcctggcttccggtctggtctgcccccacacccccgctagggcacgataggggtcagttctcccagcccaggccccgctcagccccaccagggcagggcggctgtcctgagttgtttcttggctccctgcgtcttctgggtcccggcaggtgcgacaggtggggaagaacagtgaatccctgcgctcagagcacgccagccatggacggagggcggcctggaaaggggagttcccgcctgggaaaggggcgctgagaaggggccctgagggtctcccggctcagatttgctccacctgtgtcatagaggcctgggccttgcggggcgcagccaggagaatggggagggggtacctcgggggtccctgcagaggacgtgggggacagagcggggagaaaggatgcctcgagccgtctgggaggaggcagcgcctggctccccgcaaagaaaatggggtcgcgagggccgagggtccagggctgggagaaggggcgcctcgctccccaggaagcagaagcgctggacagcgcgaaggagggatcccagaaccaggagttgcaggggggacgcgcccagcaggggaacacccctcgctctccctgccctgccccgctccccgtgccccctcccctactccccctcccccgcccggacactccccccatccccatgcagcgcgcacgggagccgggagggggcgcgggcgggcgcgcggtctcgggcgaggcgggggattcaagcgcgttataaggcgaggagcccggcgtccgagacgccgcgctcggagccgcgagggaaccgccgcccgcatgccccggcccgccgccccgccggagcccgcctgctgctcgtctaacgcggcctgctggccgcgccccgcgggcctggggtccccggagcctgggcgccctcgaggagccgcgcccgcagggagccgccgcccgggaacgagctagcccggggccccggggagagccgcgcggggccggccgctcgtccgccg

SEQ ID NO: 552078 - DNA, 1518 bp, Homo sapiens
catgagtggccagaaaaggcaggcgacaaaggccagcttgcatctgaggacggaacttggcccatccccaagcctggggggcaccacctgcggctgctggtgcccctttcagtccctgctgccacatcctgtgaaccaggacagggtaaggcctcctttccccagcgggctcttctcaaaagagttccccgggaacagcagccctcggtgtgagtgtaaggtacttttccagcggacgcttctcccgttctttaacaaaaagcactgtgtacccaccaggggcaggtgcctcgggggtggggcaagcgagccaagtgtgcgaccctcctcggcttagcgtccagtggtggggcagatagycaaaagggcatgcgatataacaaagccaggggtagggtggggctggggctggctctttcctggtagggccgcccagaggcctctctgccaccttctccgaggcctgcagggtctggtccacctctgggggcactgattccggtgggcggtgggcagcctggcttccggtctggtctgcccccacacccccgctagggcacgataggggtcagttctcccagcccaggccccgctcagccccaccagggcagggcggctgtcctgagttgtttcttggctccctgcgtcttctgggtcccggcaggtgcgacaggtggggaagaacagtgaatccctgcgctcagagcacgccagccatggacggagggcggcctggaaaggggagttcccgcctgggaaaggggcgctgagaaggggccctgagggtctcccggctcagatttgctccacctgtgtcatagaggcctgggccttgcggggcgcagccaggagaatggggagggggtacctcgggggtccctgcagaggacgtgggggacagagcggggagaaaggatgcctcgagccgtctgggaggaggcagcgcctggctccccgcaaagaaaatggggtcgcgagggccgagggtccagggctgggagaaggggcgcctcgctccccaggaagcagaagcgctggacagcgcgaaggagggatcccagaaccaggagttgcaggggggacgcgcccagcaggggaacacccctcgctctccctgccctgccccgctccccgtgccccctcccctactccccctcccccgcccggacactccccccatccccatgcagcgcgcacgggagccgggagggggcgcgggcgggcgcgcggtctcgggcgaggcgggggattcaagcgcgttataaggcgaggagcccggcgtccgagacgccgcgctcggagccgcgagggaaccgccgcccgcatgccccggcccgccgccccgccggagcccgcctgctgctcgtctaacgcggcctgctggccgcgccccgcgggcctggggtccccggagcctgggcgccctcgaggagccgcgcccgcagggagccgccgcccgggaacgagctagcccggggccccggggagagccgcgcggggccggccgctcgtccgccg

SEQ ID NO: 552079 - DNA, 2078 bp, Homo sapiens
gtagtgtgttttaactatttaaaatttattgtaataatatatgttctggttttaatcaagcaaatgaataatattctaattacccttgaaatatattgggaatacaatgatgattatgagatttttactttgtattaaggggacagaggaataaatagaagaagagatgaaaataggaaaaagaaaatactgagtgtggaagaaagaaagaaggaaagagatgaaaaaaagaaaaagaggctagaaggacgttaggctacagttggattccaaggatttattttatattgactatgtaacagctgccctctcttcacatttgcctaagtactccccaattcgccagtagacttggctttcatggtcggtagctctagctgttacacactgacctcaggctggttctggttccttttagtttgtccctacaaacagaagcactttttatatgaccaaaagcaacttaaaaaaatacccactaactaaggacctctgatttgtgacctatgaaatgacatcaaatatgagcaacctcaaacagactgactttccttggaactttttgttggttgtttgaattagaaaactgaaggaatcagggctagaaaaaatagacattaccatgaaatgttcccataaggtgggattgacaacagaggcccatgaaaaatctaaaatattgacaaaatattgacaaaaatttattggaggaacagaaaccrgcagaatccagttggtagtaacaagtggaaaagctgatacagaaaatggaaatgaaatacacttacgtgcatccaaactcttaggataagttttctcacctctaagtttcatgaatctctgggttatgatgaatcttattcttcatgaaagttatctccccacttcatatctatccttaatagaggtgtcatttatgtttgtaggtatgtatgtattttaataactcagttcttcttgactctaggtgcatatctaaagcatatgaaagcttttaaaaaagtacttaagaggtcctgatttaatggagtaggggaagggcacttgcgttttgcttgaaaccacctgaggtgttctaatgtgcagctgggattttaaatcactggactagctgggttggttcttaatttcttgaaatcaaaagagccatactaaaattcatgttactaatagtaaggaaaagtaaaattcaccactgctgcactatgatttagcaactaaattgcatgttactatttgtgagctagttattcctctaattagtggtcttcttgtggccaatgataatccaattaattagtttagcttgttccaggtttcaaagcattttcgcacacatatcacaattgctttcaatgataagtacctattatactgttagcctagtcttttccagtttttttaacatatgcatatgttttatggtaacttatcacaattatctaaactttatcctatgttttatgggattctccctcaaatttaatttacattatatctttattgaaagcataaatgtctggtaatctttctgaaccatggtatatgttttgaatcagggatcagcaaattttgtatcaggtcagcaaaggttttctgttaaaagccagatgctaaatatttaaggctttgtagaccatacagtactctgtcattgtaatgtgaaagcagcaataacaatatgcaaaagaatagtcatggctatgttaccataaaactttatttaccacaagtggtaggcctgattttgcacacaggttgagtttgccaaatcctatattatatgaactatagtttgtctgtatgaaaaaatcttgggctataagcattatcttccaaaattttgcagaagttttaccttgcctatagatatttagggtgtgaagggaaattagagaataagcagaattttcccaccaaactggaaaccattttttgaggaaggaaaaaagatgctttgaatttcttttttctccacatcattaggattcaataatttagccaagaatatacccaggtacatacaatttcttactgatacacaataatctgaaaccttcaatatttattcagggaat

SEQ ID NO: 552080 - DNA, 2078 bp, Homo sapiens
gtagtgtgttttaactatttaaaatttattgtaataatatatgttctggttttaatcaagcaaatgaataatattctaattacccttgaaatatattgggaatacaatgatgattatgagatttttactttgtattaaggggacagaggaataaatagaagaagagatgaaaataggaaaaagaaaatactgagtgtggaagaaagaaagaaggaaagagatgaaaaaaagaaaaagaggctagaaggacgttaggctacagttggattccaaggatttattttatattgactatgtaacagctgccctctcttcacatttgcctaagtactccccaattcgccagtagacttggctttcatggtcggtagctctagctgttacacactgacctcaggctggttctggttccttttagtttgtccctacaaacagaagcactttttatatgaccaaaagcaacttaaaaaaatacccactaactaaggacctctgatttgtgacctatgaaatgacatcaaatatgagcaacctcaaacagactgactttccttggaactttttgttggttgtttgaattagaaaactgaaggaatcagggctagaaaaaatagacattaccatgaaatgttcccataaggtgggattgacaacagaggcccatgaaaaatctaaaatattgacaaaatattgacaaaaatttattggaggaacagaaaccggcagaatccagttggtagtaacaagtggaaaagctgatacagaaaatggaaatgaaatacacttacgtgcatccaaactcttaggataasttttctcacctctaagtttcatgaatctctgggttatgatgaatcttattcttcatgaaagttatctccccacttcatatctatccttaatagaggtgtcatttatgtttgtaggtatgtatgtattttaataactcagttcttcttgactctaggtgcatatctaaagcatatgaaagcttttaaaaaagtacttaagaggtcctgatttaatggagtaggggaagggcacttgcgttttgcttgaaaccacctgaggtgttctaatgtgcagctgggattttaaatcactggactagctgggttggttcttaatttcttgaaatcaaaagagccatactaaaattcatgttactaatagtaaggaaaagtaaaattcaccactgctgcactatgatttagcaactaaattgcatgttactatttgtgagctagttattcctctaattagtggtcttcttgtggccaatgataatccaattaattagtttagcttgttccaggtttcaaagcattttcgcacacatatcacaattgctttcaatgataagtacctattatactgttagcctagtcttttccagtttttttaacatatgcatatgttttatggtaacttatcacaattatctaaactttatcctatgttttatgggattctccctcaaatttaatttacattatatctttattgaaagcataaatgtctggtaatctttctgaaccatggtatatgttttgaatcagggatcagcaaattttgtatcaggtcagcaaaggttttctgttaaaagccagatgctaaatatttaaggctttgtagaccatacagtactctgtcattgtaatgtgaaagcagcaataacaatatgcaaaagaatagtcatggctatgttaccataaaactttatttaccacaagtggtaggcctgattttgcacacaggttgagtttgccaaatcctatattatatgaactatagtttgtctgtatgaaaaaatcttgggctataagcattatcttccaaaattttgcagaagttttaccttgcctatagatatttagggtgtgaagggaaattagagaataagcagaattttcccaccaaactggaaaccattttttgaggaaggaaaaaagatgctttgaatttcttttttctccacatcattaggattcaataatttagccaagaatatacccaggtacatacaatttcttactgatacacaataatctgaaaccttcaatatttattcagggaat

SEQ ID NO: 552081 - DNA, 2078 bp, Homo sapiens
gtagtgtgttttaactatttaaaatttattgtaataatatatgttctggttttaatcaagcaaatgaataatattctaattacccttgaaatatattgggaatacaatgatgattatgagatttttactttgtattaaggggacagaggaataaatagaagaagagatgaaaataggaaaaagaaaatactgagtgtggaagaaagaaagaaggaaagagatgaaaaaaagaaaaagaggctagaaggacgttaggctacagttggattccaaggatttattttatattgactatgtaacagctgccctctcttcacatttgcctaagtactccccaattcgccagtagacttggctttcatggtcggtagctctagctgttacacactgacctcaggctggttctggttccttttagtttgtccctacaaacagaagcactttttatatgaccaaaagcaacttaaaaaaatacccactaactaaggacctctgatttgtgacctatgaaatgacatcaaatatgagcaacctcaaacagactgactttccttggaactttttgttggttgtttgaattagaaaactgaaggaatcagggctagaaaaaatagacattaccatgaaatgttcccataaggtgggattgacaacagaggcccatgaaaaatctaaaatattgacaaaatattgacaaaaatttattggaggaacagaaaccggcagaatccagttggtagtaacaagtggaaaagctgatacagaaaatggaaatgaaatacacttacgtgcatccaaactcttaggataagttttctcacctctaagtttcatgaatctctgggttatgatgaatcttattcttcatgaaagttatctccccacttcatatctatccttaatagaggtgtcatttatgtttgtaggtatgtatgtattttaataactcagttcttcttgactctaggtgcatatctaaagcatatgaaagcttttaaaaaagtacttaagaggtcctgatttaatggagtaggggaagggcacttgcrttttgcttgaaaccacctgaggtgttctaatgtgcagctgggattttaaatcactggactagctgggttggttcttaatttcttgaaatcaaaagagccatactaaaattcatgttactaatagtaaggaaaagtaaaattcaccactgctgcactatgatttagcaactaaattgcatgttactatttgtgagctagttattcctctaattagtggtcttcttgtggccaatgataatccaattaattagtttagcttgttccaggtttcaaagcattttcgcacacatatcacaattgctttcaatgataagtacctattatactgttagcctagtcttttccagtttttttaacatatgcatatgttttatggtaacttatcacaattatctaaactttatcctatgttttatgggattctccctcaaatttaatttacattatatctttattgaaagcataaatgtctggtaatctttctgaaccatggtatatgttttgaatcagggatcagcaaattttgtatcaggtcagcaaaggttttctgttaaaagccagatgctaaatatttaaggctttgtagaccatacagtactctgtcattgtaatgtgaaagcagcaataacaatatgcaaaagaatagtcatggctatgttaccataaaactttatttaccacaagtggtaggcctgattttgcacacaggttgagtttgccaaatcctatattatatgaactatagtttgtctgtatgaaaaaatcttgggctataagcattatcttccaaaattttgcagaagttttaccttgcctatagatatttagggtgtgaagggaaattagagaataagcagaattttcccaccaaactggaaaccattttttgaggaaggaaaaaagatgctttgaatttcttttttctccacatcattaggattcaataatttagccaagaatatacccaggtacatacaatttcttactgatacacaataatctgaaaccttcaatatttattcagggaat

SEQ ID NO: 552082 - DNA, 2078 bp, Homo sapiens
gtagtgtgttttaactatttaaaatttattgtaataatatatgttctggttttaatcaagcaaatgaataatattctaattacccttgaaatatattgggaatacaatgatgattatgagatttttactttgtattaaggggacagaggaataaatagaagaagagatgaaaataggaaaaagaaaatactgagtgtggaagaaagaaagaaggaaagagatgaaaaaaagaaaaagaggctagaaggacgttaggctacagttggattccaaggatttattttatattgactatgtaacagctgccctctcttcacatttgcctaagtactccccaattcgccagtagacttggctttcatggtcggtagctctagctgttacacactgacctcaggctggttctggttccttttagtttgtccctacaaacagaagcactttttatatgaccaaaagcaacttaaaaaaatacccactaactaaggacctctgatttgtgacctatgaaatgacatcaaatatgagcaacctcaaacagactgactttccttggaactttttgttggttgtttgaattagaaaactgaaggaatcagggctagaaaaaatagacattaccatgaaatgttcccataaggtgggattgacaacagaggcccatgaaaaatctaaaatattgacaaaatattgacaaaaatttattggaggaacagaaaccggcagaatccagttggtagtaacaagtggaaaagctgatacagaaaatggaaatgaaatacacttacgtgcatccaaactcttaggataagttttctcacctctaagtttcatgaatctctgggttatgatgaatcttattcttcatgaaagttatctccccacttcatatctatccttaatagaggtgtcatttatgtttgtaggtatgtatgtattttaataactcagttcttcttgactctaggtgcatatctaaagcatatgaaagcttttaaaaaagtacttaagaggtcctgatttaatggagtaggggaagggcacttgcgttttgcttgaaaccacctgaggtgttctaatgtgcagctgggattttaaatcactggactagctgggttggttcttaatttcttgaaatcaaaagagccatactaaaattcatgttactaatagtaaggaaaagtaaaattcaccactgctgcactatgatttagcaactaaattgcatgttactatttgtgagctagttattcctctaattagtggtcttcttgtggccartgataatccaattaattagtttagcttgttccaggtttcaaagcattttcgcacacatatcacaattgctttcaatgataagtacctattatactgttagcctagtcttttccagtttttttaacatatgcatatgttttatggtaacttatcacaattatctaaactttatcctatgttttatgggattctccctcaaatttaatttacattatatctttattgaaagcataaatgtctggtaatctttctgaaccatggtatatgttttgaatcagggatcagcaaattttgtatcaggtcagcaaaggttttctgttaaaagccagatgctaaatatttaaggctttgtagaccatacagtactctgtcattgtaatgtgaaagcagcaataacaatatgcaaaagaatagtcatggctatgttaccataaaactttatttaccacaagtggtaggcctgattttgcacacaggttgagtttgccaaatcctatattatatgaactatagtttgtctgtatgaaaaaatcttgggctataagcattatcttccaaaattttgcagaagttttaccttgcctatagatatttagggtgtgaagggaaattagagaataagcagaattttcccaccaaactggaaaccattttttgaggaaggaaaaaagatgctttgaatttcttttttctccacatcattaggattcaataatttagccaagaatatacccaggtacatacaatttcttactgatacacaataatctgaaaccttcaatatttattcagggaat

SEQ ID NO: 552083 - DNA, 624 bp, Homo sapiens
ggtgattttaggtaaccagaaaaagagagggagtccagggaaggctttgtgacgagacgcttgggtggggctggaaagacttgaaagacaggagccagtggtctcatggcaacactgcttctcatgacctgggagaggactgaggctttgctaggtgtcctcagccaagctcagaactacggtggtcctctgacatctcctccacagaatagcccaaacctgctctgtccaataaggtaaacactagcctcgtgtgcaattgaaattgaaattcattaaaatgtaattaaatttaaaacccagtttcacaggtggctagatgcaacattttagacagcccagacggtgaayatttccatcagcataaaagctcaattgcatagaactggtccaaacaaaatatttcgttgttgatggcaatccagtaactatcagtttgggctcagagtctattgaaacattgggttgggaaaataaaaaaaaaaatcttaatttctaaaaatcttaaatattttaaattactaaataatatcctaaaagaatattccaagatatttcaagtccaaaacttgtgtgctcacaaattcaggtactacctaatattctaaagatttccaatgattt

SEQ ID NO: 552084 - DNA, 752 bp, Homo sapiens
tgactgtagtcccagttactcaggagactgaggtgggaaagttgtttgaacccgggaggcctcagaggttgcagggagccgagatcgtgccattatactccagggtgacagggcaagactacatctcaaaaagaaaaaaagaaagaaagaaaaacaataattgtgcagttttctgaaaaataaaatgtgtattttaaatgggcccttragcatagaaggagaaaattgctgacatggtcttaaggagtaaatagcagggctgtatggcctgagtagcaccaggaaatcccctaccccacacgagctaattgccaccaagacgcctcctggcttgtaagtcaagttctgtggataatggataagacttaaaaaaaaaaagacaaatttacccagaaatcatgaaattcttaatatttaactaatcgtgaaaccaaatatagcaaaaataatttgagaggtctgttgggaggcccagccaacagggagggggatcagagacaatgtcacctgcagagtctcaggtcaaagaaccagtgcccaccacgagcagaccagtgggaatcatcctgccttcaccagtcagcctgggttcttaggtggcatcggcacctgtgaggggccacagccccaccccaaccccttgggagctctgggctcttggcagctgacagtgctcacctggggtgcctgggggggttaaactccaagaatgccaagatcccagggagcttccggagaaagagttcatttca

SEQ ID NO: 552085 - DNA, 578 bp, Homo sapiens
agagagatagtgttacataaggcatcgaagaaggctgatatatcatattagttaccagatagagaattctttagagcagtgaatttagaaactttaaagatttttaagacaatgtagagaactagcgtattcaggagaagactgaatgtgtacattctagaaactacaaaagcgagagyaaataagaacatatttatagtttatcaaaatggattagtaatgtatgcaattgaaggacagctgtgagaggcccactcttggtgcagtagctatgtacctctgttcttgcattgatgatacaatgagaaaaatcacacgcaaattaggaaaataaccatgagagataggaaaagatgtattctagttatagctacttctcccttgaaggaagatctagaaagaagttagggaggggctcatatatagtgcacaaaggataaaatggtagtgatggtcttagatcacagataaaagagactgtacttagtatgtatgagcatgtatttctcaagtactgaaggcctgtggaatatccacttgtaggctgtttcagtgtatataatgaattaaatgtattg

SEQ ID NO: 552086 - DNA, 1140 bp, Homo sapiens
attctgccttgagctgggtttatagttttataattttcatgctaaatgttgacacctaatgaaatatggcacagaggtgatattgtgactgttgcacacccagatgacagtaaagattgtcattctttaacagtaacacaacccaccactgaggctctgaatctcacattaggaagctgacaaaagttggaaaattgcctctcataggtgaatcctgtccacaggtgggttggtgactctcagaccaagattcagcacagctgtgaggctgtgacttcactaagggtacacagtctgcaggagggactgaggctgtcatgygtggatccagtccactgttgaaattgtgagtcatatactgagacccaacatataggaagtgttgcctcatacctataactgggaaatgtacaggattgttcattttatccctggacttccctgcaggtgtgactgagaaataaacctctgcccagcctttgacttatttgacttttctgcctcagaccagcccacctatgggattgtgatatgtcactagaccccacaactaggtattgtgactctattctccttccttggcactgtctaaagggggcatatgatatattgcttatccttaaagtcaggtgatgtcagtctcttctgccttggcactgcttatagggggcattgtgacatatcactgggctctacacccataactcacattatgtaactctccattcctgggccctgctcatagtggccattgtgacatattgctgactccgaaacccaggtgatgtaactcttctgccttggcccagcctgcagagggcattgtgacacacctctgcaaacatcaccaaggtgatttgactcttctgacaattccatgtcccaaaaggtgattgtgacatatcactgagctcagcacctagctgatgtgacctttttcttcctaggttctgcctgcaaagaagattgtgacatattgctggttgcaacaccacggtgatgttactttttgccttctcactgccctcagaaggcattgtgatatgttggtggtcccagcttcaaagaaatgtaagtatcctctctggacccttcccacaaagggcattgtaacatatctctgcacccatcaactatttg

SEQ ID NO: 552087 - DNA, 1343 bp, Homo sapiens
ctcactttctaggtgacatgaaaaaatactgctggatttccaagacaagtccggatagagatagctccaagggttttcactatgatagcccacctcattcatagacaccatgggatattaatagggcttctgaaacagaaacccaaagcattggaagaaaaacagctctcagtctgagcaagattatattgagaaaaagaagttaaaagcattctttaaaaaactcagattagatataagattgatcaagtttaccagaaaatattcccctaaacgaaatttctttctaaacactcaaagtgcacagctactctcagcatgagaaacatgagtgttatgaagaaagggggcatattctcagcagaatttagtaaggtttctctcccatctctggggctctcatctcctagccattgaataggggatttatattgaaatacatctgacaatttccatcagcactttttggatgaagaattgaaatatgactttgttcatacagtggaatatatttgagtttgcaacatggctaactaaagaggtattatggtttttgggtgcccacatcgtccttgtttatttgtcctgtaatagcagcattccaatttagtgaaatgaaagacactaaaatcatgcttacctataattatgcctttggataaattaataagcatgtgagactaatatctactgtaacaatttggtagtgaattttctttggatattagatgtaaatatctaagtataatttgtgtactagccataatgtacataaaaattttttaagttgtctgtaaccataattcaattaaaaccctttatattgcagaagtatgaataacgatttaaaatgaccatttaagggatctattcaaagtaaatactgtggctttatattcatactattgtagaaaatactgtttaattttttctacaaacactacacataactattcttactgttctgaagaaataaacagaaatcaaagtacaactccagacttcacttttcatacactgaaccttttgcagtgtaagtacttcagcctgcaaatattgcataactactttggataatcagtattttttgtcaaaagaacttactcagtatagtaaagtctatcattctgtactgctaccctaatcctatccttgtgctcaacttttgtgtgtcttaaaatgagctytaatctaaacaaatcagtctactttaaaagaccaaaaataaaaaaacaaaaacaaataaatctgaggtactagataaagacaatcttgagtcaaaaatagtaacaaaaggtttctatggctgttactatgatttacatatctttcaaaacaaagaa

SEQ ID NO: 552088 - DNA, 1591 bp, Homo sapiens
ttggaaaagtcaccatttgtttggttctttctgaatgatgccttttaaccaatcaagagagtgggtaagacaaggatggaagttctcattcttgtccatagattctacctagaactggtagctaggtttcaggctttaaactctccttggcttgaaggtccagtttcactggaaacccatccctgtcttcctaggaatttgtctgtctcctgtctctatcagtcgcattactaccatctatatttatatgtatttacatacatatttatgtgggttttcatgtatgggttcttaaatatttatatgtatttcttttttactttttttctcagataccacaacgttccttttgactaaacagcttttcccaggcagatatttttttttcttgagtcaagatgacaaagtaccaaaattgaatgcagctttttgataatatagctagaattctaaacagtgataaaaggagtttgtaaaaaaaaaaaaaaaaaaaaagaaatatgatgaaaaagtgttttctcattttactgtcagaataatcaattaaaaatgcctgttttctaagagtttacctggcaataaataagtcctgattttttttctccagaaagataatatatgtatcatttgttgctgagtaactatgaaacaagggaacagtttacttatagaaaagaatatcgcacatttgtatatcatgcctggataaagagacttagagggaaagttattatcctgaaaaatcccctgataatcaccttacagttgcatctgaaaacttcaagtgtggaaaaattgatgtgctaaacttgttcatattctgttagtgacaggtgaatgccttttatagctcgtgcttgctgtggcctccatttggaggttggactgttcctgataaccagttttgaataacaatggaagcatcaagccagattgttcctgtacttggtggggaggggttttgtagaggttcacttttctcttagtgtgcttcatagcttgtgaatgtatgatgtggagtcttccctattttatgttatttcacaagtcattatactttaagggtatttatgtagcctcattttgcttttatgcattcaatcaattagaaccatgatttcatttaaatacctggatgcctcataaattcagctctgctagaaccaaagcaaaatcttagagagtgcaatggtgttcgtatggagccaattaacacctaaatatgttttatttttcagcaaacacttagtggctatttgacaaacatatacagtatatcattctagtactgttatctgacatatatggcacatatatatgtatatgggatggtgtgtatatgtgaattaccacatcatttctaatctagctctttattagtcaatggttggctcctgtgtgtgtttatttttctgttgtacttcacatcayactgagtgctactctaggttttctgtaatcactgagctccatggggcccaggctactttcagattgaccaagccttcatcttggtgcttctttctatgcctactgccccctgggaagtccctgtgaatgggcacccatctcatcctcccaatctttgagg

SEQ ID NO: 552089 - DNA, 526 bp, Homo sapiens
tgagtctagtcaacagatagagacagatgatcctagagcccaggagagacactttcactagagttgtacatccttggcagctaggtgccacttaaagccaagggagcagataggaccacgcaggatgagcaggctgaatgcraggagggtgaagacaaagcctagagatctgcaatatttatcacatgagggaaaaaagggggcctgaaaagcaacaggagaggagggaagtcagaggcctaagagctgctctagggaaaatgttgcatggaatccaagttagcccaagtttcaagaaaaagaaggtggctaacaaaccaaatgttatggaggaaaatgtccagtggaatgcagcgtccttggtgaacatgggcagagcagttttcagagaaggaaaatgcctgaatcctaaccatagtgggatgaagagtacaggggattgtggctgttcattgtgagttcttcagtacttttggtatcatgtgtatatgtcactgatatgcttggctgtgtccccacccaaatc

SEQ ID NO: 552090 - DNA, 626 bp, Homo sapiens
ccagagacaggactgcattgggccgggcctgggatagtcaggggtcacactcacctgttgggacctagcttcagtggcttcaatctgggcaatggcctgatgggcggctgccccttctcctctgcttgggggaggcaggagaggaaggtcaggcaggagatctgcttcctgctctcctgaygctggttggaagcagggcgcccacctgtgcctgtctcaccttgctgcaggtgcatcggaggccaaacccctctcctgatctcctgcaggtgcggattccaggtttccaatgggtgtcggggtgggctccagagctctcctggtcctagggaaccctgggctccatgaggccttggcctagctggattgtttcccacactgtcacctccccacccggtcacttccccaaacatggggctgcatactctgtgccctgggtgggacattggaaggagttccaccttccaggtttggatcacagtaaagcctctgccatggggatgtgctggctgagacagatggggttgaaccagccctgtcactttggccttgggcaagtcacctgtgccttgcttccctttccccagcagccagacagctggacagggataatagcacctatttca

SEQ ID NO: 552091 - DNA, 916 bp, Homo sapiens
tgtgtcttaaattgtttacactttttggcctgagtcattgaaaatgaacttcatagaactgcccaacttcatgacataacctgatcatcctagatttaatttcttctatttctcttctgttttacatttgctgactgccctactttaccctttatcatatatgcttatatgatattttatgataatttggaagtaggtttctcttttgtaacccgaaagctatcctagggaatcagtatctgagcagcagcttgtattaattaacttaaatggcccctggtaagttggtctgaactcatgggaaatctaggggagagggaaaccaatctcttattggcaccagcaatagccaacacaaattaaatttgatgtctagcttatgagatagtcaatatacacctagagactgtttaatgagtcccttgataaacaaagaatctatttactgtatctgggataaattactatgtttgtgacttgactggattctacaggtaatctaattacagtattatatatatatayatatccagtgactcacagacacaaaatgattcacctttacttaggaattgttgttagaacaaataagaattagactttattattttgtcctaaaaaagtgtagatatgtattactcatggttagataagaataactgctctgcctttagacagattttgagttcttaatatttgatttttaaaaagagttctatatatgttatccataaaagttacttttatattgagccttctcacaatttttttaacttagcctaattaatcatcttgtggttttatgcaaggtatgcaggacacttctggcttctttccatcaaagtctggagcatgcttgctgagggagaagctacatatcacactttcaggtggtactcaataaatatatattaac

SEQ ID NO: 552092 - DNA, 664 bp, Homo sapiens
attgaaaagccatgtgtatttcttacctgttttcactttagagccaaggtcgtggaactttgagaagaaatgttgaatccctgccctcagagagaccacactttcctccaaataactgttgttgaggctgctaaagagcacattctgaaagaatatggacattcttaggtaataaatttgaaatcaggaattcccatcaaactttgttaactatacagttatttttaaatgttacagagtgactactgttgaattaattagactaaatttgyataactgtatagaaggtgtagaattatctttatatatacatagtattatacattttttgtcttacaaacactatagactaatctataatctgtgtcaatattatgcatgtagtgagatttagaatctagaagcttcaccaatttttcagagagcaactcagaaactacaaactttcttgttagaacagatgggttttttaaattgatgttgtagtgcataattctacctctgttgaatcattttaacaagaaagtgttttaaatgttccaccagttggctggtcaaattaatatcaggcaccagttaagatatacatcacaagcataaatctatctagtgacccatgagcaagtaaaactatatctgcaaaagagtctttctagaagagaag

SEQ ID NO: 552093 - DNA, 1217 bp, Homo sapiens
caatacagctctattcagtcagtctgtcattagcggcatcatttagcctctgtgtgcctcagttatctcatttgtaaaatagggaaaatggggcctacattccataaagagctcagaatcatgcctggcacactacaacctttcaaaaagtgctagctctgtgttgggggtgaggagcaattcccctccctcttttctggtttcttccagttgggataccttacacatccgtggcctcttgccccatccaaggtggtgcaagttatccgagtgrtgaactggaaaaggaatggcaccagcatactgatgctcactgtgccctctctgtggagtctgactttagggagtggcctctcttctgctccttcttgccagaagcttttcaggaccagctgccatgaggagaggtctgtggggtccagattgagcattggccaggtgggaaagtccagctaattctaggcttcagcattagggagtgcatgattactgccttcctgagttacattccttggccacagctttatcgctgtagaggtgagacttggttctctatcaacctcctcctctgtcatgtctcctaactggagggaggtgttaattactgaataaatggtcaaatgccaaaagccattattactttaataattagtgttataacattgtaaatattcccactcacccatgtcatccatatcccctacaaaattgtgggctcctttggggaaactaacaatgtatggggcaaaaaggcacttaatgaatgcttgtctgcttcttggactagattggatgtagatgactttgagcacacggcctgtggttcctatttatttggcatctccctggggtgtactacactgacactgacataatagcacctaaaagaagacactttgaataagtgaaaagttaacacttggttgatgaacagattaaaatggcttcagtcaatgaaaatgccaagccaataatgggtcctagaatcatactgtcacgtgaggttgtttgctcagagtaggaagaattggctggggggtgtgagagggttgaagagtggtttctttgggtgaccatcttgtcctggtttccttggaatcttcctggttttagtacgggaagttctgcatccttgaaaactacccagtctggggaaaaccagtttggcacccttggtttctgaacaggaacccattccatctgaggaagccacaagc

SEQ ID NO: 552094 - DNA, 1217 bp, Homo sapiens
caatacagctctattcagtcagtctgtcattagcggcatcatttagcctctgtgtgcctcagttatctcatttgtaaaatagggaaaatggggcctacattccataaagagctcagaatcatgcctggcacactacaacctttcaaaaagtgctagctctgtgttgggggtgaggagcaattcccctccctcttttctggtttcttccagttgggataccttacacatccgtggcctcttgccccatccaaggtggtgcaagttatccgagtgatgaactggaaaaggaatggcaccagcatactgatgctcactgtgccctctctgtggagtctgactttagggagtggcctctcttctgctccttcttgccagaagcttttcaggaccagctgccatgaggagaggtctgtggggtccagattgagcattggccaggtgggaaagtccagctaattctaggcttcagcattagggagtgcatgattactgccttcctgagttacattccttggccacagctttatcgctgtagaggtgagacttggttctctatcaacctcctcctctgtcatgtctcctaactggagggaggtgttaattactgaataaatggtcaaatgccaaaagccattattactttaataattagtgttataacattgtaaatattcccactcacccatgtcatccatatcccctacaaaattgtgggctcctttggggaaactaacaatgtatggggcaaaaaggcacttaatgaatgcttgtctgcttcttggactagattggatgtagatgactttgagcacacggcctgtggttcctatttatttggcatctccctggggtgtactacactgacactgacataatagcacctaaaagaagacactttgaataagtgaaaagttaacacttggttgatgaacagattaaaatggcttcagtcaatgaaaatgccaagccaataatgggtcctagaatcatactgtcacgtgaggttgtttgctcagagtaggaagaattggctggggggtgtgagagggttgaagagtggtttctttgggtgaccatcttgtcctggtttccttggaatcttcctggttttagtaygggaagttctgcatccttgaaaactacccagtctggggaaaaccagtttggcacccttggtttctgaacaggaacccattccatctgaggaagccacaagc

SEQ ID NO: 552095 - DNA, 622 bp, Homo sapiens
ttttctaaaggacgggggctcactatctaatcctctctaagtccccattccagcccccagtctctccataggggctgccaagaaatacagcaaaaacaacactccaggacacgaaagtcagcttgatccacatcagcagcaacaacatgacaagaggacgctgctcctcaaccaccagttccacactacttgccagagtcagacttctaagaacgggcctctgccttcctgacaggtagcacgagggttcagccaaagaagctttgagggcagagtccatcagaatgtgctgtttcctaggagaatggaaatgagaaagaaccgcctgacagctgggatggaatgttcgctgggaggaagccagagccaccttcttctggctgaataaacagcagccccctgcctgccttctctccatgttttgtgcctcctgtgttgagccaggcatcctcctaagtgctgcacactgtatgatgaagccaytgacctatggttacctcactccatcctcacaaggaccatgtcagagtgcatccccattcttcagcagaagaaactgaggctcggagaggataagtagttggcccaaggtaacatagcccacacacagaaaaggcaggat

SEQ ID NO: 552096 - DNA, 658 bp, Homo sapiens
agtccccagtttctattgctgccatctttatgtccataagtatctggtctccttttaaatttgctttcttctttgctcattatctagaatttccataatagaggagaacctgaaaccacacccaataagaaagaattttatctaaagttttactacctttgcattccagtctttctctacccattctcctaatcttgtctcgtgaaatcatggctgctgagaatragatttcttttggaggacaatgaaaaggatgggaggacagaagctacacagaagggagaaaggaaaacagagcaactgaagacaaaaattactttagaaggtgtaagcacatacaaacagggctgaggttatatgtttcactttgaatgaatctcatttaccgagataccaggagcattttacttaagtctttgagaacacgagttttactggctatatcatactctgttgtagaaatacactgtaaagtactttcactatcctcttttattggacatttagatctaaatgaattttgtgctaatatgaatattgtatgatgaatatctttgactatattttgtgcattttgttataggcatgtatcttgaaaacggcagagggaagattttgctttgttacccattttgataggccttgcctttggccagac

SEQ ID NO: 552097 - DNA, 1347 bp, Homo sapiens
atgttcaaagcagcaatggagcaaaatgggctctggctggaaactaatcaccccccacctcccaccatgaggttttcatgtcagcccaactgggtgagtgttcaagagaagtgtcgtccatattggccctgagaccttcaaaaggtcctgtgacatggctcctgccccaggaactcactctctaaatgggaagcccattaatgaacaagagaactaatatgtggtcagattttccaaactcaaaattgagacctatatacttggaggggcagtgtttttaaaagtaggagtcctggaaaacttgggaccgggggggtcacaaagcattgagctcttcagggagggttctgctggccatccgacgtaaaggggtccttcctgtgactctcatgctacccctgggttctaatttcttaataactgaagtgatcttgtgttcttgtgcctcctctgattagaatgtgagcaccatgagagcggagaccctctctgtcttgctcttgactggttccatatcaactagaacagtgaccagctcttagtaggtactcaattcatattaactgaaaaaaagcaaatacacaccagactctcagaaaaccattatttataccaatctccttcaatccctacagcagtattatgaggtaaaataattagatctcccattcaatgagaaaaatcaaggctcagagagggcgtgtgttttgcccagggctgcatctaataagtgatagaagtggaattcaaaaccaggtatggagcattatgatcctccctttgtaatgagtgtctattattttgtataatttagaaaaagcaaaaatgaaaactctggaggaaaaactgctcatcagaaacagctttatatcaactaatcttatctgtgatgaattcagttctggcacccaaaatccaagttccatttccatctacagaggacactggcagcatagctacagcaggagaaaggattctggggccttccytatgaaaggattctgttcctttctttctgcggggcctcaaaagccaggcagggagtggaggggccatcggcaccagtgatcatcatgcctacggctgctggatgtggcaggcttgctccacggttcactggaaatgttccaaagagaggctcataagcaagtctgaggtcgaagagttaaagtgtttggaatctgccttctcccaaacccataccttaaaacttggaaggaaaaaaaacaagcatttttttaaagactgaaatttcaaaaatgtttaaaatgaaaagtagagatttacacttacctgaattgagaatattaaaccctgctgaagctaagtttatccccccttttagtc

SEQ ID NO: 552098 - DNA, 1377 bp, Homo sapiens
agagtattgggcccataggttaggaaccactggagtagtgagtaattaagaacatggctcaaacccagctctaccacttgtgaggtgtttgaccttgggtggctcatttaacctctttaagtcttcagtttcctccaatgggagctggaaataacaccacctgttcctctaagattgctgtgaggattagagataatgtaggtgtaatgtaggtaaagcacttggcagagtccttgatacatgattagcactcaatatgtgtagcaattagtgttaccactttatattaaaattatctatttaccacaagtctccttgaatgtaaggcattgtgttttatgtagctttatattctcaatgcctagcaaggtcctggattagacaggatatgtttattaagtgaataagtaaattattgaaaaattaaaagcaatgatatgtctaatgtgtctagctcactgaccatagcatggtggctattttaaaaatgtgcatgtattcttctcttcatcatctggacttggacgtgatttagcccagtggtcctggaacttcagtgtgcttgagaatcacctgcagcgcttaaacacaaatgatgacctaacaccaagtttctgattcagtacatcttggatgaggcctgaaaatttgcatttctaacaagttcctatctaatgctgatgctgctggtctggggcccccttttgatcactactgtactatactaatagctctcaactttggctacatattagagggactgggaaagctcttaaaaataatgatgggctgcttggccaagaaaggtgggtcatgcctataatcccagccccctgggagggcctaggcaggaggattgcttgaagcccggagtctgagacccgtttaggcaacccaatgagacctcatctctgcagaagaaaaataaaaataaaaataaaaaaattaactgggtctggtggtgcacacttgtggtccctgctactcaggaggatgaggctgcggctgcagtgagctgtgattacatcactgcactccagcctgggggacagagagagaactgcctagtaaaaaaaaaaatcctggactcctcaccttgagagtgtrattaactggtctgaaatggggcctgggcagccgtattgtgtattattttaaagctcccctccaccaacactctctaatatgctgccagacgtgcaaatcactggccttactactggacttgggcaacccaactcagggcagatttatcatctgcctgttgtccactggtagcactgtagcaactgtgtccaacagaaaaaaatcaacttcagttagtttggtcttgtatttctaaattgattatgtagatacctcacaccactgaaatca

SEQ ID NO: 552099 - DNA, 420 bp, Homo sapiens
ggagaaaaataaagtaggggagaggagagggagagttgagggaggttgcattttaaacagagtggtgagggaagcttcatgatagagtgataactgagcggaaacctactgaaggaaagtgagtcaagtacacccaggggaagggcacaccagggggaggagcatctggtgggaagggcacacctggatgaaaagtacaactgggggaatggtgtacctggggagtgagtgtacctcaggaaagggtgcaactggggagagggagcacctgggggaagggtacacmtggcaagttggtacacctgggagaaggttcacctggggagtaggtgcacttggggagacggtacatctgtggagagggcacagctgggggaagagtacacctggggagggggtgcacctggggagtgggtgcct

SEQ ID NO: 552100 - DNA, 567 bp, Homo sapiens
tgtcaaacaggcacaacctggcatcagactccaatagctgtgcatgcccaccacctccttctcactgagtgatagactttgtggttgctatccacgtacaccttcaggcagcacagcccagacgctatctgtcaagtggcatgcttttcaattgtcctagacatgtttgcttcaaactccactctgatgctctgtattagcaaacatatttgaactagccctgttctttgtgttttattcatgctgaatagctgccttctcggagcccagttcctcatctctaaaatgcaggcaactaaccacctcaaaaggttgttgggatgattaagattgtgaaggcatctagcatagggcccagcatagagtgggcatccaatacatattttttcttccttctttaccactgtcttagttcatttgggctgctattacaaaataccattaactgggtggcttatagacaacagaaatttatttcttayagctctagacaatgggaaatccaagatgaaggtggcagcaaattctgtgtttgttgagagcacacttcctggttcaaagacagca

SEQ ID NO: 552101 - DNA, 541 bp, Homo sapiens
catcaaatgaactctcaatgtgtttcctaacatttcaagtgcaaagaatagtatattggaagtctatccaaatttaggaataaaaaagcttgagaaggcatctaaaagatgctggctccatattgtaagcgatagaacaacaacagcacgtrctcaattcacactactcattttcttttaagcaaaacacttgaaactcagtgtttttaatgttttaattatagcatactttaaaaatattaattttattgttgtttacatttccctatacgtttatgagtgacagtaaagtaattttcaatcaggaaaagaggataaaggaaaaatcatacttttccctattattaaaatagcttggtgtgatatcagcttgtgcagtaatttttattatcacacactacagtgcaaaataaaaactgcctgtatatgaaacaagctttcattagttcctatgaaaacatgtaaaaacaatggctttgttttcccacattttactaaacactccacaggtacacttagaacacagtggttaaaaatgtag

SEQ ID NO: 552102 - DNA, 654 bp, Homo sapiens
tggaattttccttctctcacagaagagaatgatgatccgatgacttggtttttctcctcaaaatgtccatccattggctgggcacagtggctcatgcctgtaatcccaggactttgggaggctgaggtgggcgratcacctgaggtcaggagttcgagaccagcctggccaacatggtgaaaccccatctgtacttaaaatacaaaaattagccaggcatggtggcaggtgcctgtaatcccagctactcgggaggctgaggcaggagaattgcttgaagccgggaggtggatgtcgcagtgagccgagatcgtgccattgcactccagcctgggggacaagaataagactttgtctcaaaaaaaaaaaaaaaaaaaagtccgtccattgacccaagaagtgttttctcctgtccctgtcaaatcagtttcatacattcatgttgaatgttagcagtgaaggtgaaacctgggaggtggaggagaaaggaatgaagttaagctaaccttcaaaataagcagataagaggattttggaaattgagggcaaatgaaaggtgctagaataaagtggaggtaagataattggggaagaaggaaaaaggtaaacgggttgttgccagggggttggtaaagaatcaactttaatacattt

SEQ ID NO: 552103 - DNA, 675 bp, Homo sapiens
gcgtctcgctttgttccccaggctggagtgcagtggygccatctcagctcactgcaagctctgccttccgggttcactctattctcctgcttcagcctcctgagtagctgggactacaggcgcccgccaccacacccggctaattttttgtatttttagtacagatggggtttcaccgtgttagccacgatggtctcgacctcctgacctcgtgatctgcctgcctcagccttccaaagtgctgggattacacagcatgtttcttataattaaaaatgtgatgccagaatttgagcttatgagatgaaggagatgtacttttccctattcctcctggtaagtacaactaaaaaccctggacattatatgtaaaatcaataactaggtaagaagattctgagaggtggagagaaggcagacaggaggctaggaacctcaacacacaagtaacaaaatgataaggagttccaagttaatgttttgcctcacatatgccagagttggaactgaacaagccagcaaactggaaacaccagtgggcacagacaaaaatcgccctgacaaaagcctgctccccacagccaaagggccagcaaaagtcagcctagcaagacagaaaactttcaggcaataaccatcctactccagccaaacacccaagaaaaactgtggctc

SEQ ID NO: 552104 - DNA, 870 bp, Homo sapiens
agctgagtggtgtctgcttcctttggatggagcagggcttcctaattttcctcatttcctatcattctctatggccttacacctgacccagttcacctatttgcatcacttgccttgtcctagcagacatgttgccccccaaccygaatcctgtgcccatgtgtccaatactgcaatgccaatggtaaggtccaatagcatctattcccctctttagcccccaaaacctgcagccacatgttccagaggaagaaaaaagacagtaggagctttcagagtgaatttgaattttcctgcagggcctacagcactgtgactccctaggactcttctataggcactgctctgcagtttgagacatgactccagaaggcagggctgggatataaacctctgggtgtcatttgagggccctgaaacagcaagcagtttggggatagggtctggaattaaggaggtaaggacaagctgggctgctttacttcccagaagctagcttcccctgaagctccccaattttcctatgcaattttatattcttcagtctccatatgccctctgagacttgtagttgtaaaacaccacctggggactaattgtcctccagcttaagtcactaccagaagaagttgtgtataaactttggacctatttctttatcttacttttcaactctgaaattctggtcccctgtgttagttcatttgcaatgctgtaaagaaatacctgaggctgggtaatttataaagaaaagaggtttatttggctcacagttctacaggctgaacaagcagcatggtgctggcatctgcttctgatgaggcctcaggaaacttacaatcctggtggaagatgaagggggagcaggca

SEQ ID NO: 552105 - DNA, 870 bp, Homo sapiens
agctgagtggtgtctgcttcctttggatggagcagggcttcctaattttcctcatttcctatcattctctatggccttacacctgacccagttcacctatttgcatcacttgccttgtcctagcagacatgttgccccccaacctgaatcctgtgcccatgtgtccaatactgcaatgccaatggtaaggtccaatagcatctattcccctctttagcccccaaaacctgcagccacatgttccagaggaagaaaaaagacagtaggagctttcagagtgaatttgaattttcctgcagggcctacagcactgtgactccctaggactcttctataggcactgctctgcagtttgagacatgactccagaaggcagggctgggatataaacctctgggtgycatttgagggccctgaaacagcaagcagtttggggatagggtctggaattaaggaggtaaggacaagctgggctgctttacttcccagaagctagcttcccctgaagctccccaattttcctatgcaattttatattcttcagtctccatatgccctctgagacttgtagttgtaaaacaccacctggggactaattgtcctccagcttaagtcactaccagaagaagttgtgtataaactttggacctatttctttatcttacttttcaactctgaaattctggtcccctgtgttagttcatttgcaatgctgtaaagaaatacctgaggctgggtaatttataaagaaaagaggtttatttggctcacagttctacaggctgaacaagcagcatggtgctggcatctgcttctgatgaggcctcaggaaacttacaatcctggtggaagatgaagggggagcaggca

SEQ ID NO: 552106 - DNA, 870 bp, Homo sapiens
agctgagtggtgtctgcttcctttggatggagcagggcttcctaattttcctcatttcctatcattctctatggccttacacctgacccagttcacctatttgcatcacttgccttgtcctagcagacatgttgccccccaacctgaatcctgtgcccatgtgtccaatactgcaatgccaatggtaaggtccaatagcatctattcccctctttagcccccaaaacctgcagccacatgttccagaggaagaaaaaagacagtaggagctttcagagtgaatttgaattttcctgcagggcctacagcactgtgactccctaggactcttctataggcactgctctgcagtttgagacatgactccagaaggcagggctgggatataaacctctgggtgtcatttgagggccctgaaacagcaagcagtttggggatagggtctggaattaaggaggtaaggacaagctgggctgctttacttcccagaagctagcttcccctgaagctccccaattttcctatgcaattttatattcttcagtctccatatgccctctgagacttgtagttgtaaaacaccacctggggactaattgtcctccagcttaagtcactaccagaagaagttgtgtataaactttggacctatttctttatcttacttttcaactctgaaattctggtcccctgygttagttcatttgcaatgctgtaaagaaatacctgaggctgggtaatttataaagaaaagaggtttatttggctcacagttctacaggctgaacaagcagcatggtgctggcatctgcttctgatgaggcctcaggaaacttacaatcctggtggaagatgaagggggagcaggca

SEQ ID NO: 552107 - DNA, 870 bp, Homo sapiens
agctgagtggtgtctgcttcctttggatggagcagggcttcctaattttcctcatttcctatcattctctatggccttacacctgacccagttcacctatttgcatcacttgccttgtcctagcagacatgttgccccccaacctgaatcctgtgcccatgtgtccaatactgcaatgccaatggtaaggtccaatagcatctattcccctctttagcccccaaaacctgcagccacatgttccagaggaagaaaaaagacagtaggagctttcagagtgaatttgaattttcctgcagggcctacagcactgtgactccctaggactcttctataggcactgctctgcagtttgagacatgactccagaaggcagggctgggatataaacctctgggtgtcatttgagggccctgaaacagcaagcagtttggggatagggtctggaattaaggaggtaaggacaagctgggctgctttacttcccagaagctagcttcccctgaagctccccaattttcctatgcaattttatattcttcagtctccatatgccctctgagacttgtagttgtaaaacaccacctggggactaattgtcctccagcttaagtcactaccagaagaagttgtgtataaactttggacctatttctttatcttacttttcaactctgaaattctggtcccctgtgttagttcatttgcaatgctrtaaagaaatacctgaggctgggtaatttataaagaaaagaggtttatttggctcacagttctacaggctgaacaagcagcatggtgctggcatctgcttctgatgaggcctcaggaaacttacaatcctggtggaagatgaagggggagcaggca

SEQ ID NO: 552108 - DNA, 2383 bp, Homo sapiens
tccaacctagtcccccttcactgtgatcaaaaacatttaactaactcataataggtatcattttcctaaatctagatttctttatttttatttaaattccaacattattttacacacttagtgactgcacaaaattttaatggcatttctagtatctcaaatgctatgattaaattatcaaaacgtaatcgtaataataatattacctaaatctcaaatcagaattttataaatgaaactgtgagtaacgacttagagtcatttcagttgatgaaattcaacatatcatttattgttagtcattctgtcattattcatcaccagtaaagaatgttcatcactctttggagtcagcaaacaaatagtgctttgccccaaattatcttccactgtatgcctgaaggtatttaaatgtatgaaaacaatgtattttacatttcagtgcagatgaaaaagttttagtctatttaaatcgtgttcatatcgttcaaagaacaagctgagttttatgctctcatatacattttcaatattaaacaaaaataaataggaattccactaactttagttgaatagaatgaaaagaaaaaacaaaaatgacagttactaggtctccaattttctagtaaaataatataatatttaaagtagtattttagctaagaatgaagcacacatatatacttaagtgtgtcagtttttacaatatctaagttcattttcacacactatggggggaggagaatgtaattgctgtcaaaatayattgtgtttataacacttaacacttaaagagctgatggatggtctctgagaattgctcatgcttgcttgaattcgaactcattattgtcacagccaaatctcttatagttagattcttctctttaattttctcatctggattgaagatattaatgctttcagttattgcaactttaaccagagcctggcatagtgacagagtctcattgttctgttgaaataacttctcccactttattttctttttaaacatttttatgaactaattttaaaagattaacttcattcttcatattaattttttgcattgggaattgaaacactaatcttaatagtaataataagaagaaagtatcctgatatagacacattaaggaaggaaaagtaaagcaagaacacattttttttattttgaagagctcaaaagagaagcttagaaaaatgaaaaaatcagaaaaagtggagaaatcagaaaaagaaaacttattcttgtaaagctaattataaaaagttagacaactgtagcttattttaggaagacagagatttggccattaatttggagtgttgtcagtgggaagatgtctaacatgcattttggataatttgtgcattatgtcgatatagatacacagtaagtgcattagtaacaaattagagacataaaagttgccagcagtgatgggaagttcaggaaaagccacctaatgcagttgaaatacctcaccggcatctctttgcaatgaattgtgttcagtcatcgtctctttgttcccagaccacatccacagtatacgtcttttattctcaacaggaatttctactagctaatttatcatgctgaatccagactattacccctagctattctctccctgcctttcatgtcatgatcaatggcttaggtgcaagttgcactcccaattcaccctgcttttatgtattatgatgtggacacattatttaatcacctcattttcctatgtcagaatatgcggaaagtaattaatgtatacaaaggattgttgtgagaaataaataacataatatagataaatggtttatgcatgttgggcacataacaaatatccaatagatattactgtagtgagtaaaaattaaatttacaaatgatgtaaattatacaagaaaacacacaattatatttacttaaaaatcaagatgagggcctggcgtggtggctcatgcctgtaatcccagcactttgggaggcagaggtgggtggatcacaaggtcaggaaattgagaccatcctggccaacatggtgaaatcccgtctctactaaaaatacaaaaattagccgagcatggtggcaggcgcctgtagtcccagctactcgggaggctgaggcaggagaatcgtttgaacccgggaggtggaggttgcagtgagtcgagattgcaccactgcactccagccggggtgacagagcaagagtccatttcaaagaaaaaaaaaaaaatcaagatgggcctggtgtggtggctcaagcctgtaatcccagtaatttgagaggcccaggtgggtggatcacttgaggtcaggagttcaagaccagcatggcctacatggtgaaatcccctctctactaaaaat

SEQ ID NO: 552109 - DNA, 2383 bp, Homo sapiens
tccaacctagtcccccttcactgtgatcaaaaacatttaactaactcataataggtatcattttcctaaatctagatttctttatttttatttaaattccaacattattttacacacttagtgactgcacaaaattttaatggcatttctagtatctcaaatgctatgattaaattatcaaaacgtaatcgtaataataatattacctaaatctcaaatcagaattttataaatgaaactgtgagtaacgacttagagtcatttcagttgatgaaattcaacatatcatttattgttagtcattctgtcattattcatcaccagtaaagaatgttcatcactctttggagtcagcaaacaaatagtgctttgccccaaattatcttccactgtatgcctgaaggtatttaaatgtatgaaaacaatgtattttacatttcagtgcagatgaaaaagttttagtctatttaaatcgtgttcatatcgttcaaagaacaagctgagttttatgctctcatatacattttcaatattaaacaaaaataaataggaattccactaactttagttgaatagaatgaaaagaaaaaacaaaaatgacagttactaggtctccaattttctagtaaaataatataatatttaaagtagtattttagctaagaatgaagcacacatatatacttaagtgtgtcagtttttacaatatctaagttcattttcacacactatggggggaggagaatgtaattgctgtcaaaatatattgtgtttataacacttaacacttaaagagctgatggatggtctctgagaattgctcatgcttgcttgaattcgaactcattattgtcacagccaaatctcttatagttagattcttctctttaattttctcatctggattgaagatattaatgctttcagttattgcaactttaaccagagcctggcatagtgacagagtctcattgttctgttgaaataacttctcccactttattttctttttaaacatttttatgaactaattttaaaagattaacttcattcttcatattaattttttgcattgggaattgaaacactaatcttaatagtaataataagaagaaagtatcctgatatagacacattaaggaaggaaaagtaaagcaagaacacattttttttattttgaagagctcaaaagagaagcttagaaaaatgaaaaaatcagaaaaagtggagamatcagaaaaagaaaacttattcttgtaaagctaattataaaaagttagacaactgtagcttattttaggaagacagagatttggccattaatttggagtgttgtcagtgggaagatgtctaacatgcattttggataatttgtgcattatgtcgatatagatacacagtaagtgcattagtaacaaattagagacataaaagttgccagcagtgatgggaagttcaggaaaagccacctaatgcagttgaaatacctcaccggcatctctttgcaatgaattgtgttcagtcatcgtctctttgttcccagaccacatccacagtatacgtcttttattctcaacaggaatttctactagctaatttatcatgctgaatccagactattacccctagctattctctccctgcctttcatgtcatgatcaatggcttaggtgcaagttgcactcccaattcaccctgcttttatgtattatgatgtggacacattatttaatcacctcattttcctatgtcagaatatgcggaaagtaattaatgtatacaaaggattgttgtgagaaataaataacataatatagataaatggtttatgcatgttgggcacataacaaatatccaatagatattactgtagtgagtaaaaattaaatttacaaatgatgtaaattatacaagaaaacacacaattatatttacttaaaaatcaagatgagggcctggcgtggtggctcatgcctgtaatcccagcactttgggaggcagaggtgggtggatcacaaggtcaggaaattgagaccatcctggccaacatggtgaaatcccgtctctactaaaaatacaaaaattagccgagcatggtggcaggcgcctgtagtcccagctactcgggaggctgaggcaggagaatcgtttgaacccgggaggtggaggttgcagtgagtcgagattgcaccactgcactccagccggggtgacagagcaagagtccatttcaaagaaaaaaaaaaaaatcaagatgggcctggtgtggtggctcaagcctgtaatcccagtaatttgagaggcccaggtgggtggatcacttgaggtcaggagttcaagaccagcatggcctacatggtgaaatcccctctctactaaaaat

SEQ ID NO: 552110 - DNA, 2534 bp, Homo sapiens
atgttctccctgccccttggtttctgtctttaaaacaggatactattgcataacttggcagaaatattctgaggtttaagtaaaaaaataggcacatagcatagttcatcgctaatcatggtaaaataacaataagtcacatttattgattgaacaggtgaaatgcaccagccattgtgttatgcatttgggaatgatgaggaataaaacacaattatttttctctcaaaagcaattctcaggatttacaacgtttgtgagtggcgtacagctcagctccaactgtgcccttttgctctgttgcccaagctggtcttgaactcctggtcttaaacaatcctccttccttgtcctcccaaagcatgggatcacaggcaggcagcatcacgaagggcctccagccattcttgattattcaactcaagtagttagagaaaaagaaaaaatgtacattccaaactgtacatttattcattctttttctacatactcttttgtcaatctgtacatgaaatgccagtaaagctcaatttgttttctaatttgctaaatgaaaataaacatgcatagatattcttttcttctcgcttgaagaccttgcacattctattttgaaatttactccctttgctagtaaaaggagcaaatctacctgactgtacagcacgtgtttctcaacaaggcttttgttgttttctactcattgtcttcttttaatatggtataagaggtggtttctttgtgttaagtggctattaaaaaaaataactatatggccggccatggtggctcatgcctgtaatccagcactttgggaggccgaggcgggtggattatgaggtcaggaattcaagaccagcctggccaacatggtgaaaccccatctctactaaaaatacaaaaatgtccgggcaaggtggctcacgcctgtaatcccagcactttgggagaccaaggtgggcagatcacttgaggtcagaagttcaagaccagcccggccaatatggtgacaccccatctctactaaaaatacaaaaacattagccgggcattgtggcaagtgcctgtaatcccagctactcaggaggctgaggcaggagaatggcttgaacctgggaggcggaggttgcagtgagccgagatccggccactgcacttcagcctaggcgacagagaaagattccatctcaaaataaataaataaataaataaataaataaataaataataaaaatacaaaaattagccaggcgctgtggtgggtgcctgtaatcccagctactcgggaggctgaggcagaagaattgtttgaaccttggaggcggaggttgaagtgagccaaaattggccactgcactctagcctggacgacagagcaagactctatctcaaataaaaaaaaaacaaaacaacaaaaaacaaaaaaacaccaaaaaactatgcatcaactatgctactggggagaaaaagaaaatgagggaaaagggaaagaagagattttaaaaagtagtaactcgcaactccacctcaaaaatgaactatttaagttgatcccatgtctttgctattgtgaacagtgytgcaataaacatatgcatgcaggtgtctttgtgttcgaacgatttatattcctttggatatatacccagtaatgggtttgccaggtcgaacggtaattctgttattagctctttgagggatcgccacactgctatccaccatgggtgaactcatttatactcccaccaatggtctataagtgtttctttttttccacaacctcttcagcatctgttatttttttgactttttaatagtagccattctgactggtgtgagacggtatctcattgtggcttggatttgcatttctccaataatcagggatgtagagcttttttccattgcttgctggccccatgtatgtcttctcttgaaaagtgtctgtttatgtcctttgcccactttgtaatggggttgagttttttggtaattttgtttaaactccttacctaaatgcttatcaattttagactggataagaaaacgtgctacatatgcatcatggaatattatgcagccataaaaaaagaacaagatcatgttctttgcaggaatatggattgaactggaggccattatctttagcaaactaatacaggaacagaaaaccaaatattgtatattcttacttataatcaggggctaaatgatgagaacacatagacacagagagaaacaacagacactggggccaacctgagggtgagaggggagagaggatcagaaaaataactaatgggtactaggcttaatacttaggtgacaaaataatttgtacaacaaactcctgtgacacaagcttacctatgtagcaaacctgcacatgttcccctgaacttaaaagttgaaaaaaataattattgctaatctaacactcattgagtattttaagccaatcatagaatgaatgcttagggcaaatacttattacatgttcacaccattctgggaactgtgctaagttctttcca

SEQ ID NO: 552111 - DNA, 1238 bp, Homo sapiens
tgtaatgcacttgaatcatccccaatccatccccacacccccaccccgtgcctaggtccatggaaaaattgtcttccatgaaaccagtccctggtaccaaaattgttggggactgctgtttttcacactagccatcccagttcttcacagtccccaggagatttcatggacctgcacagtgaagaagagacacaaatgaacagagggtatgygtgtgtgtgtgtgtgtgtgtgtgtgtgtgtgttacctccatgtgcatcaggttattggggctggcatttcctgacaacagcttctgtgaactggtgatctagaatattttccactcaaatcaaatgtgaagagtttctagtgacattaatttagttgacttctttcttaatacatctcatgcaatcacacatcttttctttcttgcgtctgaaattaattctacatgccttgtaagtttcttaaggtagatcatgtttctatattgcatattttgcatatgaagcctaaaaattacattgtacacaaagtctaaagatgccaaaacatgagttttttttaagagctaagggcaaattattctcagtaagagaccaaaacttttttattaattcccaaactcatcaaacatttacagagcccctattagatatggcaaaggataacaatttttattattattataaaaacaatccctttcattcatttattctttaattgtctgaatatttatttatctcttctagggtcaggcactgctattagctaaaaattccagatgaataagatatagtgctgcactccaagaacacacactccagagattaacatcctgaattattattagcttacttctgcccaaagacagagggaggagaatgtgatggaaaggcgggacttcagctgtatttgtaatgttttattcctttataaatcctaataaaaagaatattaacatttggaaaatctaaatggcaagtacattggtatatgatatattatttttctgcttttcttgtatattagaaatagtatataaacattgctctgaaaactagatcatgatgatgatcatgatgatgataagaactgtgttaagaatgatgttagaaatctgcaaagggctgggcatagtggctcacacctgtaatcccagcactttgggaggccgaggcaggtggatcatttgtgctcaggagttcgagaccaacctggacaacatggtgaaacctcatctctaccaaaaa

SEQ ID NO: 552112 - DNA, 1238 bp, Homo sapiens
tgtaatgcacttgaatcatccccaatccatccccacacccccaccccgtgcctaggtccatggaaaaattgtcttccatgaaaccagtccctggtaccaaaattgttggggactgctgtttttcacactagccatcccagttcttcacagtccccaggagatttcatggacctgcacagtgaagaagagacacaaatgaacagagggtatgtgtgtgtgtgtgtgtgtgtgtgtgtgtgtgtgttayctccatgtgcatcaggttattggggctggcatttcctgacaacagcttctgtgaactggtgatctagaatattttccactcaaatcaaatgtgaagagtttctagtgacattaatttagttgacttctttcttaatacatctcatgcaatcacacatcttttctttcttgcgtctgaaattaattctacatgccttgtaagtttcttaaggtagatcatgtttctatattgcatattttgcatatgaagcctaaaaattacattgtacacaaagtctaaagatgccaaaacatgagttttttttaagagctaagggcaaattattctcagtaagagaccaaaacttttttattaattcccaaactcatcaaacatttacagagcccctattagatatggcaaaggataacaatttttattattattataaaaacaatccctttcattcatttattctttaattgtctgaatatttatttatctcttctagggtcaggcactgctattagctaaaaattccagatgaataagatatagtgctgcactccaagaacacacactccagagattaacatcctgaattattattagcttacttctgcccaaagacagagggaggagaatgtgatggaaaggcgggacttcagctgtatttgtaatgttttattcctttataaatcctaataaaaagaatattaacatttggaaaatctaaatggcaagtacattggtatatgatatattatttttctgcttttcttgtatattagaaatagtatataaacattgctctgaaaactagatcatgatgatgatcatgatgatgataagaactgtgttaagaatgatgttagaaatctgcaaagggctgggcatagtggctcacacctgtaatcccagcactttgggaggccgaggcaggtggatcatttgtgctcaggagttcgagaccaacctggacaacatggtgaaacctcatctctaccaaaaa

SEQ ID NO: 552113 - DNA, 530 bp, Homo sapiens
tttgagacagggtctcactctgtcgcccaggctggggtgcaatggcgattcttgtgtctcagcctccctgaatagctggaactacaggcatgtgcacyaggcccggctaatttttttgtatttttagtagagacagggttttgccatattggccaagctgatctcgaactgccggcctcaagctggtctgcctgcctctgcctcccaaagtgctgggattacaggtatgagccactgcacctggcataaatttgctgtatttttaatacagaataattagccagcccttttgacacagaatataagaatgaatgaaaagagttgggggattttttaacttcctcaggccaaaacaatccagtggttagaattgacacattatatgtcatctaaaaatattccagcctatcattttatacttggaagaccatgtcacttattttttttaattggcctgagacaaggaggttttcattaactctcaacattattccagagaagagtcagcttccgataaagccatacacttt

SEQ ID NO: 552114 - DNA, 530 bp, Homo sapiens
tttgagacagggtctcactctgtcgcccaggctggggtgcaatggcgattcttgtgtctcagcctccctgaatagctggaactacaggcatgtgcactaggcccggctaatttttttgtatttttagtagagacagggttttgccatattggccaagctgatctcgaactgccggcctcaagctggtctgcctgcctctgcctcccaaagtgctgggattacaggtatgagccactgcacctggcataaatttgctgtatttttaatacagaataattagccagcccttttgacacagaatataagaatgaatgaaaagagttgggggattttttaacttcctcaggccaraacaatccagtggttagaattgacacattatatgtcatctaaaaatattccagcctatcattttatacttggaagaccatgtcacttattttttttaattggcctgagacaaggaggttttcattaactctcaacattattccagagaagagtcagcttccgataaagccatacacttt

SEQ ID NO: 552115 - DNA, 1008 bp, Homo sapiens
caatcttgtttacatctgcagggcagagaattgcttgctttgcttggacgctccctccacccccttctaatttgaagtaatcggaatctaaatacagtcgccaaggcccgctcttcctttactgctttgacaagggaaaaacctgaaatccacgtcttaaatcagctcggtggtttgtagccccccagcaccctgcttctacgattgcatgcctaatgtattccctggtgattctgggcattaattagttgtttaataggagtatgactaaaaatgtaaaagaaggattaggagcgtgaaacgtatgtccagctccttccacacactcgaggagggaatgagaatcattctgtatcttctatttctccaggagccatttgcatttcccaccagctgctcacttcagctgcactggcgctgggcaaggcgaggacccaaaagctcagcgcagtgtctgcggcggccgggactggggttaaccagcctctggcgggcgagactccagacagaaggggggcgagaggaacgtgagcttcccgagccccttcctctcagccctggtttgcaaacctctgaaacctgaaaggggagggagttgcacgcgcgtatctttgcgtcttttcagcgcaactcccttccctctccctgtgtctctccgcggatctctgaatctttctgtctttggttttctcattctcttccaacttttccatgagattgcctatcctcgccaccagctgaaggcaaggccgttctgctacgagcgcctcttaatctctacaaaatgaaaagaaaaaaagrgaggattattagcccattactcagaggaatggggaggctgcaaaaatcgtcgatgggcagaggtgaagatgtctttctcggactgcactttccggtgtcctgtaactagagttcagttgtgggacttgttgaagaaatttgattttcttgcctcggcgagatttcaaaaaccagaaatagaaattctcagagtcagagaggaaatac

SEQ ID NO: 552116 - DNA, 602 bp, Homo sapiens
atcttttcagtaatacaccccttggagggctaatttattacagtttctgagactccttaccagtttgtgattgttgactggatttttagaaagtcacgttcatggctcatttcttcattggctgaatagatctggggtcaagatcgtgctgtcagagctctgcactttcttgtctttctgcgatatgtagggtcagaaggacaagaaaggacatctgaatttctcarccactgccctgactttcctttcagggttgactatcaattcctcacatatccttctaactattttgcctctaattcttgtatttgttcatggtattgagtaataagatgagagtgacatacaaggggaactcagtgtctaatagaaaggtagaatacaggttagaggacatgatttggacagcattactccggggaagcataaaaatgctatcggttattctaatgggcttctcagcctcaggcactgtaggcttgctggagctctcaggatttcttttaaaaagaaaaagaaaagttggctcttttctttagtgctcatgaaaatttttattagacaaggaatgagtatgagaaattaatttttgatattttttt

SEQ ID NO: 552117 - DNA, 662 bp, Homo sapiens
ccattctcaaacaggaaggagaatggggagcaaaggagccctgtaggatggttattttattcaggagaaaaacttcactgcaagggcctgtactgtattactacctttggatcttacaggtcaggactagggcagagcacagaccattcactggtgaaaaagaaccatatgccattattggcttakatcaataaggtgaatctcccaaggcctggcaaacaaaatcaagattctggtaggaaagaacaggatatggatgttgggtagtcagccaacagtgtgtgctccaagaactgatactgagaagttatcatattctaagctcctcatggtaaagcttgaggacctgttgctcaaagaaggaaacgagcagggagtgtcattgggacttaacattcaggcctgttcaattttaaagcacctctttggagcggaaacatggctcctttgtatgcactgtgtcttcccttgcagcctgtcttctttctgttagttttagggattattgatggcagacttactagaatcaggatcccacagtatgcctctgaataggggccacatatgttacatcacacacgttgctatctggcctctttggccgtgggtgtgctggaataccactataataatagaaggaaaactactcctatgtgcaaagt

SEQ ID NO: 552118 - DNA, 532 bp, Homo sapiens
gattatcatccccccgcccctagttatttatgtactatatataaaacatatattaatatatataattttataacaaaactgtgtagattcattgaagaaaatgtagaagatatgggagyaaaagcaagatttttaaatcacctttagtctcactatctagatattaatactaataatattttgtgggatttcctttcagtcttttgggggatttttaaaaatgcatatacacacacagagtacacactttaaaacaattaattgggccaaattatacaaatataacatattatcacttgctgttttcatttaacaatgtatcattgccacttttctctatcctaaagtaatcttctataatattttaattatctcaaatattcccttgtataatgtgccaaaaaatattcagatcatctactaagtcttggatatttttgttgtctccaattttttcataatatagaaaaaaatgtggctgggcgccatggctcatgcctataatcccagtactttgggaggccaagatggg

SEQ ID NO: 552119 - DNA, 476 bp, Homo sapiens
aaatatctaaattttaacactgtcaccttgcwtaaattaggctgaatagctgatggaataagacctaaattcaattttgttccatgcctttttactgtgatctgaaaggggtcttgaggtgaatgatcctgtactcatcctccaccagccaatcagtctgtttattatttggctttaaaaagaaaccccttcaccatgatggagcaaaaactgttacttggctatgtcaagagaaagcaatgcaacaagtacaaagcgtgctgattaatgcaccttgtctatctctatcagacagagagctagatattgatagagactgctatcctcatgtgtaactacatcaagctagagagactgttataatacaagtggactgaggcagccgtgagcagagaaaccaggaatgctcgccccgatctctagtcttcagtcttggccctgtttcaactttcagtttcacatgtggaaaaatcgaa

SEQ ID NO: 552120 - DNA, 503 bp, Homo sapiens
ttgtatttttagtagagacggggtttcaccatgttggccaggctggtcttgaactcctgacctcaggtgatctgcccgccttggcctcccaaagtggtgggattacaggcatgagccaccgcatccggccagatttcaggtgcttttaaaaagtaactgaaattttatttttacttaattcctttacttatatatatatatacctgaaattaaggcaaaaagcatgatatgagacccaaaaaagctcatatcctactcaactaaaagtgtttaggacctaaacagggcaaaagatttaaatagcactaacagctcaaggaatgtataggttaaaccttttgttttacatccagaaaattagaaaactcagctaaacattgtatatatcacaaggttttaaaaataatttgtaagatttaatcttaccaagaaagcttactcatttaaagacttctttataccggcccttcatatcatcagtggraactgtttattaaaaggga

SEQ ID NO: 552121 - DNA, 590 bp, Homo sapiens
tcgaactcctggcctmaagtgatctgcctgcctcagcctcccaaagtgctgggattacaggtgtgagccaccacacctggtcttttcaaaactttctaaacatcatagtaatatgtacttaactcatgaggggcttttcagatttttgcctagaatgaataaattcagatagctctacaagtatatggagtgcctaccctgcacaaggcactatgctggttgagggatgggttaaggtcagattttgttggatagagtggaattatgcaatggaagtggatttagaagatgttaggcccctgtcctgacagcacgcatggtctagttggaccttggaatgttggctaacagaaaggaacataagttaggtgctcaatgaagtcgcttgctttgtctgctcagcagagctggaggctgtgtcgtctgagtatttgaagatgagggcttttaggaagggcgtagatattgggttgggtttgatattgtggttagtcagttgtcagccagcagtggaaagtgaaagtggcatgtgcttgagcaaagctggcctaatgggatatagatttacccgacacacactgatagcaaat

SEQ ID NO: 552122 - DNA, 590 bp, Homo sapiens
tcgaactcctggcctcaagtgatctgcctgcctcagcctcccaaagtgctgggattacaggtgtgagccaccacacctggtcttttcaaaactttctaaacatcatagtaatatgtacttaactcatgaggggcttttcagatttttgcctagaatgaataaattcagatagctctrcaagtatatggagtgcctaccctgcacaaggcactatgctggttgagggatgggttaaggtcagattttgttggatagagtggaattatgcaatggaagtggatttagaagatgttaggcccctgtcctgacagcacgcatggtctagttggaccttggaatgttggctaacagaaaggaacataagttaggtgctcaatgaagtcgcttgctttgtctgctcagcagagctggaggctgtgtcgtctgagtatttgaagatgagggcttttaggaagggcgtagatattgggttgggtttgatattgtggttagtcagttgtcagccagcagtggaaagtgaaagtggcatgtgcttgagcaaagctggcctaatgggatatagatttacccgacacacactgatagcaaat

SEQ ID NO: 552123 - DNA, 590 bp, Homo sapiens
tcgaactcctggcctcaagtgatctgcctgcctcagcctcccaaagtgctgggattacaggtgtgagccaccacacctggtcttttcaaaactttctaaacatcatagtaatatgtacttaactcatgaggggcttttcagatttttgcctagaatgaataaattcagatagctctacaagtatatggagtgcctaccctgyacaaggcactatgctggttgagggatgggttaaggtcagattttgttggatagagtggaattatgcaatggaagtggatttagaagatgttaggcccctgtcctgacagcacgcatggtctagttggaccttggaatgttggctaacagaaaggaacataagttaggtgctcaatgaagtcgcttgctttgtctgctcagcagagctggaggctgtgtcgtctgagtatttgaagatgagggcttttaggaagggcgtagatattgggttgggtttgatattgtggttagtcagttgtcagccagcagtggaaagtgaaagtggcatgtgcttgagcaaagctggcctaatgggatatagatttacccgacacacactgatagcaaat

SEQ ID NO: 552124 - DNA, 553 bp, Homo sapiens
tttgggggttaagactttaatrtattaattttgagggggcaaaaatatgtagcccataacaattatctttattatttttgtgatcatctgtgagtccccttgcaaggcattctcagttggtggggcagtctcagaactggagggaaggaaggtattgggaagatctttttgactccagtgggatctttacagcccatggtggtggtcttgagccttcgagaaactactttcactgtgtcatatttccctctccttttgacctctgggaaaatgctcttggttggcttagtctaggtaagaggaagaaggaagaagtcagatttattaggcagctacttcttgagccaggaagcttagggtgtggagattcatctcattgcgtcctctaagccaccccctgtggctggcactgccattgccatttacaaagggagatgcgctcagatgctcagggggaggaaacaccacctatccaaggtcacactgctcaggagttgcagtaagatgcgaaccttgagccttttgacccccaagcccttgaaaccagctgtag

SEQ ID NO: 552125 - DNA, 553 bp, Homo sapiens
tttgggggttaagactttaatgtattaattttgagggggcaaaaatatgtagcccataacaattatctttattatttttgtgatcatctgtgagtccccttgcaaggcattctcagttggtggggcagtctcagaactggagggaaggaaggtattgggaagatctttttgactccagtgggatctttacagcccatggtggtggtcttgagccttcgagaaactactttcactgtgtcatatttccctctccttttgacctctgggaaaatgctcttggttggcttagtctaggtaagaggaagaaggaagaagtcagatttattaggcagctacttcttgagccaggaagcttagggtgtggagattcatctcattgcgtcctctaagccaccccctgtggctggcactgccattgccatttacaaagggagatgcgctcagatgctcagggggaggaaacaccacctatccaaggtcacactgctcaggagttgcastaagatgcgaaccttgagccttttgacccccaagcccttgaaaccagctgtag

SEQ ID NO: 552126 - DNA, 650 bp, Homo sapiens
aacaagcaaaggtacgaaagtaagaaaatacaaagtacatttggagatagtaaattaataaattcagctgaatctaaggtttcatttgaraatttaaggggcaataaaccagggcaagtagattggattttgacatggtagtattcaaaagcatactaaagaatttagaccgtatctttaggcactgtggaagtttttttggaaagaggtattcttgagggtgctttaagaaaattctggaaaaatgattctctcctactcaaaggagcttttcaaagcgtaagggatataactattaactactcagcaccatttcctaaaatactggagaattacttaattcccgaaatctccaagttaagagtcagtatcccttaaagcatagtcatgtatgcttacaaaataagaaaatacacatttaatttttctttaaaaaatgacttttattaatttttattacaaaagtaaagcatttataatagtacaattataaaaataaagagcataaaaatcagccataatctacccaccattaacatgtatcgtattcgtctttgttctaaacatatttttacaaaaatgggaaggtacagtacattctattctatagccaccctctctcactgaaccacatataatgagcaccttca

SEQ ID NO: 552127 - DNA, 650 bp, Homo sapiens
aacaagcaaaggtacgaaagtaagaaaatacaaagtacatttggagatagtaaattaataaattcagctgaatctaaggtttcatttgagaatttaaggggcaataaaccagggcaagtagattggattttgacatggtagtattcaaaagcatactaaagaatttagaccstatctttaggcactgtggaagtttttttggaaagaggtattcttgagggtgctttaagaaaattctggaaaaatgattctctcctactcaaaggagcttttcaaagcgtaagggatataactattaactactcagcaccatttcctaaaatactggagaattacttaattcccgaaatctccaagttaagagtcagtatcccttaaagcatagtcatgtatgcttacaaaataagaaaatacacatttaatttttctttaaaaaatgacttttattaatttttattacaaaagtaaagcatttataatagtacaattataaaaataaagagcataaaaatcagccataatctacccaccattaacatgtatcgtattcgtctttgttctaaacatatttttacaaaaatgggaaggtacagtacattctattctatagccaccctctctcactgaaccacatataatgagcaccttca

SEQ ID NO: 552128 - DNA, 541 bp, Homo sapiens
taaagtggttggcaggaaactctcaatccacccttaggaaaaaatgcttcctcttgttgagtctttgaaccataatccccttaaaccctctacactgagcacatataagcgctattgggatgattgtttttctagaacattttatgtcctcagaacttttgacaggtgccttttttcatcggcagtttgcagatgcmgtgtgggtggaagaaggatactcctcattttaagtgaggaaactgaagaatacagaggtaaatttaaggcaaagctcaacagtcttaaaaacatagaagtgaatttgtagttgggactatgtcccatgacaaagatgtgactctctttcctattccctctgagttttgtacagatgattttgcttgtccttagataaaagcccttcaatcaagattatattcaagaggaaagaagctgagatgtaagagagtggtcgaattatacgcaattatttttttttataaattttcgaatttcatgaagtgagcattttagagtttgaacacaaccatttaaaattaaa

SEQ ID NO: 552129 - DNA, 541 bp, Homo sapiens
taaagtggttggcaggaaactctcaatccacccttaggaaaaaatgcttcctcttgttgagtctttgaaccataatccccttaaaccctctacactgagcacatataagcgctattgggatgattgtttttctagaacattttatgtcctcagaacttttgacaggtgccttttttcatcggcagtttgcagatgccgtgtgggtggaagaaggatactcctcattttaagtgaggaaactgaagaatacagaggtaaatttaaggcaaagctcaacagtcttaaaaacatagaagtgaatttgtagttgggactatgtcccatgacaaagatgtgactctctttcctattccctctgagttttgtacagatgattttgsttgtccttagataaaagcccttcaatcaagattatattcaagaggaaagaagctgagatgtaagagagtggtcgaattatacgcaattatttttttttataaattttcgaatttcatgaagtgagcattttagagtttgaacacaaccatttaaaattaaa

SEQ ID NO: 552130 - DNA, 602 bp, Homo sapiens
ggaagattcaaccaaatataccatgatgggattggttaagacaattgccatgatgttcacgtttcacttctctgcagttgttgtgggatgcacattatcttttgatggaaatagcaatagatactagaccagaattcttttaatgyattattcaaagttctttcaagaaaaccaaaattgtcaacaacattcataaagtgtaatatggcaatggtgaatgtaccttacattatgtcagtagatataacctggagatcacagaggcagatatttaataatgtaaactaattaattaaatattatttgttattttctcatactatccatgtatctttactacatatatttaaaaggtaaaaaatcaacattatattaattttgcatatttatgtaaaatatatatttcagtataattaatttaatgtaaaaccaacttttaaagaaaattttgaaattcaaagcaaaataaattttagcatattatcagaaatgtatacaacataaatgaagacaacagagcttatcatctgtttccaaagtagacagcttattaccagtagaataaatatgtctaatattcttttagaatttagagctatgag

SEQ ID NO: 552131 - DNA, 656 bp, Homo sapiens
aattccaatggccctaaaaatagcaaagaaaagaaagattctacttaattcaatgataataaaactaaattaagaggtttgggcttccattttgcatgtggaagactagaaagaggaccattcctatccacatgacaaaaactcagmcagataatctgaaaatatacaatttttttgaatttaccagagagcagtgatcctaagtcctagaataatcaaaactgctcctaagaacaaagtcaaaggaataacactacaaaattcaaaggcttattataaagctgcaaaaatcagtgtggtattagccaaaagaacagatgcatatatcagtggaacagaacagagaattcataaagttcctcacatgaatatggtcaatttacttctgacaaaggtttaaaggcaattcaatgagggagagtatgcttttcaacaaatgctgctggcataatggcatatccatatataacacacaaacaaaaaaatcttaacatatactctacaagaactaactcagaataaatcagagatcacgatgcaaaatgtgaaatttaaatctattagaaaacataaaagaaagtccatgtgacctccgatatggaataagttttcagaaataaaaccaaggatacaatcaatgaaagaaaaaaaggttg

SEQ ID NO: 552132 - DNA, 656 bp, Homo sapiens
aattccaatggccctaaaaatagcaaagaaaagaaagattctacttaattcaatgataataaaactaaattaagaggtttgggcttccattttgcatgtggaagactagaaagaggaccattcctatccacatgacaaaaactcagccagataatctgaaaatatacaatttttttgaatttaccagagagcagtgatcctaagtcctagaataatcaaaactgctcctaagaacaaagtcaaaggaataacactacaaaattcaaaggcttattataaagctgcaaaaatcagtgtggtattagccaaaagaacagatgcatatatcagtggaacagaacagagaattcataaagttcctcacatgaatatggtcaatttacttctgacaaaggtttaaaggcaattcaatgagggagagtatgcttttcaacaaatgctgctggcataatggcatatccatatataacacacaaacaaaaaaatcttaacatatactctacaagaactaactcagaataaatcagagatcaygatgcaaaatgtgaaatttaaatctattagaaaacataaaagaaagtccatgtgacctccgatatggaataagttttcagaaataaaaccaaggatacaatcaatgaaagaaaaaaaggttg

SEQ ID NO: 552133 - DNA, 656 bp, Homo sapiens
aattccaatggccctaaaaatagcaaagaaaagaaagattctacttaattcaatgataataaaactaaattaagaggtttgggcttccattttgcatgtggaagactagaaagaggaccattcctatccacatgacaaaaactcagccagataatctgaaaatatacaatttttttgaatttaccagagagcagtgatcctaagtcctagaataatcaaaactgctcctaagaacaaagtcaaaggaataacactacaaaattcaaaggcttattataaagctgcaaaaatcagtgtggtattagccaaaagaacagatgcatatatcagtggaacagaacagagaattcataaagttcctcacatgaatatggtcaatttacttctgacaaaggtttaaaggcaattcaatgagggagagtatgcttttcaacaaatgctgctggcataatggcatatccatatataacacacaaacaaaaaaatcttaacatatactctacaagaactaactcagaataaatcagagatcacgatgcaaaatgtraaatttaaatctattagaaaacataaaagaaagtccatgtgacctccgatatggaataagttttcagaaataaaaccaaggatacaatcaatgaaagaaaaaaaggttg

SEQ ID NO: 552134 - DNA, 656 bp, Homo sapiens
aattccaatggccctaaaaatagcaaagaaaagaaagattctacttaattcaatgataataaaactaaattaagaggtttgggcttccattttgcatgtggaagactagaaagaggaccattcctatccacatgacaaaaactcagccagataatctgaaaatatacaatttttttgaatttaccagagagcagtgatcctaagtcctagaataatcaaaactgctcctaagaacaaagtcaaaggaataacactacaaaattcaaaggcttattataaagctgcaaaaatcagtgtggtattagccaaaagaacagatgcatatatcagtggaacagaacagagaattcataaagttcctcacatgaatatggtcaatttacttctgacaaaggtttaaaggcaattcaatgagggagagtatgcttttcaacaaatgctgctggcataatggcatatccatatataacacacaaacaaaaaaatcttaacatatactctacaagaactaactcagaataaatcagagatcacgatgcaaaatgtgaaatttaaatctattagaaaacataaaagaaagtccatgtgacctcmgatatggaataagttttcagaaataaaaccaaggatacaatcaatgaaagaaaaaaaggttg

SEQ ID NO: 552135 - DNA, 562 bp, Homo sapiens
ccttgcaaaaccaagcacaagtcacatgattgcctggaagctgatacaactgccttcaaagttaacaacaaatatcaaatatgcttagagagaaaatggccctgttgggcagtrtgcagtggaatggtgacaacagtcacctgtgcataccagcaggtatttcccttttgtggtgcaccaaatcatcagttggaagagaatgcttttacccttggcaaatgcagactacatatatgagcaagaagggctctgtgaaattttttttccccaaaacaattgtttagtgagtcctgatattctgtaagaagtgcactggcatcagtttcaactagctgtgagtgccaagccacacactttatttggagagcacccttggcagtcagtaatatatgacttcatcttgagttagggttgaggaaagtggacaactgcggacaggatcgacatgtagtcacagtgcactgtgtgataaaagcatattttgtcctagtgaaattcactacatattaaggagagggagcatgatagaaatttatagcattggatgaagcataattatttt

SEQ ID NO: 552136 - DNA, 913 bp, Homo sapiens
atggaatcgtatggaatggcatcaaacggaatggaatggacagccacggaatggaatgcactcgaatgcaatggagtcgaaactaatggactggaatagaatggactcgactggtacggactccaatggaatggaatcgaatggaagggaatcgaacggaatggactcgaagggaaaagactgcaatggaaaggtctcgaatggaatggaaattaatggaatggaatggaatcgaatgaaatggagtcaaaaggaatggaatcgaatggcaagaaatcgaatgtaatggaatcgcaaggaattgatgtgaacggaacggaatggaatggaatccaaaggaatggaatagaatggaatggaatcgaatggaaaggactcgaatggaaatcactcgaatagaatgcaatttaataaaataggatcaaatgtaatggaatggaatggaaaggaatcgaaacgaaaggaatggagacagatggaatggaatrgaacagagagcaatggtatagaatggaatggaatcatctggaatggaattgaatggaatggaataatatgaaatggaatggaatggaatggaatggaatgcccttgaattaaatggactggaatggaatggactcgaacagagtggaatggaaagtgttgagatagaatggaatggactcctttggaatggtctagtatgcaatgcaatcgactggcagggaatcaaaaggaatgtaatcgaatggattggactggaatgcaatggactcgaatagattggaaacggaatgcaaaggaatggaatggaatagtatggaatggaatggaaaggaatggagtggaatagactagagtggaatggaatggactggaaagcaatggactggaatggaactatcttgaatggactggaatcaaacggaat

SEQ ID NO: 552137 - DNA, 913 bp, Homo sapiens
atggaatcgtatggaatggcatcaaacggaatggaatggacagccacggaatggaatgcactcgaatgcaatggagtcgaaactaatggactggaatagaatggactcgactggtacggactccaatggaatggaatcgaatggaagggaatcgaacggaatggactcgaagggaaaagactgcaatggaaaggtctcgaatggaatggaaattaatggaatggaatggaatcgaatgaaatggagtcaaaaggaatggaatcgaatggcaagaaatcgaatgtaatggaatcgcaaggaattgatgtgaacggaacggaatggaatggaatccaaaggaatggaatagaatggaatggaatcgaatggaaaggactcgaatggaaatcactcgaatagaatgcaatttaataaaataggatcaaatgtaatggaatggaatggaaaggaatcgaaacgaaaggaatggagacagatggaatggaatggaacagagagcaatggtatagaatggaatggaatcatctggaatggaattgaatggaatggaataatatgaaatggaatggaatggaatggaatggaatgcccttgaattaaatggactggaatggaatggactcgaacagagtggaatggaaagtgttgagatagaatgsaatggactcctttggaatggtctagtatgcaatgcaatcgactggcagggaatcaaaaggaatgtaatcgaatggattggactggaatgcaatggactcgaatagattggaaacggaatgcaaaggaatggaatggaatagtatggaatggaatggaaaggaatggagtggaatagactagagtggaatggaatggactggaaagcaatggactggaatggaactatcttgaatggactggaatcaaacggaat

SEQ ID NO: 552138 - DNA, 565 bp, Homo sapiens
ctcgaacagagtggaatggaaagtgttgagatagaatggaatggactcctttggaatggtgtagtatgcaatgcaatcgactggcagggaatcaaawggaatgtaatcgaatggattggactggaatgcaatggactcgaatagattgcaaacggaatgcaaaggaatggaatggaatagtatggaatggaatggaaaggaatggagtggaatagactagagtggaatggaatggactggaaagcaatggactggaatggaactttcttgaatggactggaatcaaacggaatggaatgcaatgcaatcaaatggcatggaataaaatagaatgaaagagaatcaaatggaattgaatcgaatggaatcgaatggattggaaaggaatagaatggaatggaatggaattgactcaaatggaatggactagaatggaatggattcgaatggaaggcaaaggaatggaatctattggaatggactgtaatggaatggaatggaagggattggaatggactcgaatggaatggactgcaatagaaaggattcgaatggaatgaaaaag

SEQ ID NO: 552139 - DNA, 565 bp, Homo sapiens
ctcgaacagagtggaatggaaagtgttgagatagaatggaatggactcctttggaatggtgtagtatgcaatgcaatcgactggcagggaatcaaaaggaatgtaatcgaatggattggactggaatgcaatggactcgaatagattgcaaacggaatgcaaaggaatggaatggaatagtatggaatggaatggaaaggaatggagtggaatagactagagtggaatggaatggactggaaagcaatggactggaatggaactttcttgaatggactggaatcaaacggaatggaatgcaatgcaatcaaatggcatggaataaaatagaatgaaagagaatcaaatggaattgaatcgaatggaatcgaatggattggaaaggaatagaatggaatggaatggaatkgactcaaatggaatggactagaatggaatggattcgaatggaaggcaaaggaatggaatctattggaatggactgtaatggaatggaatggaagggattggaatggactcgaatggaatggactgcaatagaaaggattcgaatggaatgaaaaag

SEQ ID NO: 552140 - DNA, 671 bp, Homo sapiens
tggaattgaaaggattgggatcgaatacaatggaatatactggaatgtaatgtaatgaamtcgaatgtaattgactggaatggaatgtacatgaatgaaatgtaatcgaatggaaagtaatccaatggaatagaatctaatgcaatgaaatcgactcagatagagtagaatgtaatggaatggagtgcagtgcaatggaatggaatggaatggaatgcaatggaatggaatggaatggaatggaatggtatggaatggatagtaatggactggagtgaaatggactggaaagaatggactcaaattgaaagggctcgaaaggaatggagtcaaatggaatggtctggaatggaatgaacacgaatgtaattcaatccaatagaatggaatcgaatggcatggaatataaagaaatggaatcgaagagaatggaaacaaatggaatggaattgaatggaatggaatcgaatggaatgggaacgaatggagtgaaattgtatgcagtagaagagaatagaatggaatgcaagcgaaaggaaaggaatggattggaatggaatggaattcattggaatggaagggaatgtagtgtaatggacaggcctggaataaagtggaatgctacggtctcgaatggaataaaaatgtatggaatggaatgcaatgaaacg

SEQ ID NO: 552141 - DNA, 671 bp, Homo sapiens
tggaattgaaaggattgggatcgaatacaatggaatatactggaatgtaatgtaatgaactcgaatgtaattgactggaatggaatgtacatgaatgraatgtaatcgaatggaaagtaatccaatggaatagaatctaatgcaatgaaatcgactcagatagagtagaatgtaatggaatggagtgcagtgcaatggaatggaatggaatggaatgcaatggaatggaatggaatggaatggaatggtatggaatggatagtaatggactggagtgaaatggactggaaagaatggactcaaattgaaagggctcgaaaggaatggagtcaaatggaatggtctggaatggaatgaacacgaatgtaattcaatccaatagaatggaatcgaatggcatggaatataaagaaatggaatcgaagagaatggaaacaaatggaatggaattgaatggaatggaatcgaatggaatgggaacgaatggagtgaaattgtatgcagtagaagagaatagaatggaatgcaagcgaaaggaaaggaatggattggaatggaatggaattcattggaatggaagggaatgtagtgtaatggacaggcctggaataaagtggaatgctacggtctcgaatggaataaaaatgtatggaatggaatgcaatgaaacg

SEQ ID NO: 552142 - DNA, 671 bp, Homo sapiens
tggaattgaaaggattgggatcgaatacaatggaatatactggaatgtaatgtaatgaactcgaatgtaattgactggaatggaatgtacatgaatgaaatgtaatcgaatggaaagtaatccaatggaatagaatctaatgcaatraaatcgactcagatagagtagaatgtaatggaatggagtgcagtgcaatggaatggaatggaatggaatgcaatggaatggaatggaatggaatggaatggtatggaatggatagtaatggactggagtgaaatggactggaaagaatggactcaaattgaaagggctcgaaaggaatggagtcaaatggaatggtctggaatggaatgaacacgaatgtaattcaatccaatagaatggaatcgaatggcatggaatataaagaaatggaatcgaagagaatggaaacaaatggaatggaattgaatggaatggaatcgaatggaatgggaacgaatggagtgaaattgtatgcagtagaagagaatagaatggaatgcaagcgaaaggaaaggaatggattggaatggaatggaattcattggaatggaagggaatgtagtgtaatggacaggcctggaataaagtggaatgctacggtctcgaatggaataaaaatgtatggaatggaatgcaatgaaacg

SEQ ID NO: 552143 - DNA, 671 bp, Homo sapiens
tggaattgaaaggattgggatcgaatacaatggaatatactggaatgtaatgtaatgaactcgaatgtaattgactggaatggaatgtacatgaatgaaatgtaatcgaatggaaagtaatccaatggaatagaatctaatgcaatgaaatcgactcagatagagtagaatgtaatggaatggagtgcagtgcaatggaatggaatggaatggaatgcaatggaatggaatggaatggratggaatggtatggaatggatagtaatggactggagtgaaatggactggaaagaatggactcaaattgaaagggctcgaaaggaatggagtcaaatggaatggtctggaatggaatgaacacgaatgtaattcaatccaatagaatggaatcgaatggcatggaatataaagaaatggaatcgaagagaatggaaacaaatggaatggaattgaatggaatggaatcgaatggaatgggaacgaatggagtgaaattgtatgcagtagaagagaatagaatggaatgcaagcgaaaggaaaggaatggattggaatggaatggaattcattggaatggaagggaatgtagtgtaatggacaggcctggaataaagtggaatgctacggtctcgaatggaataaaaatgtatggaatggaatgcaatgaaacg

SEQ ID NO: 552144 - DNA, 671 bp, Homo sapiens
tggaattgaaaggattgggatcgaatacaatggaatatactggaatgtaatgtaatgaactcgaatgtaattgactggaatggaatgtacatgaatgaaatgtaatcgaatggaaagtaatccaatggaatagaatctaatgcaatgaaatcgactcagatagagtagaatgtaatggaatggagtgcagtgcaatggaatggaatggaatggaatgcaatggaatggaatggaatggaatggaatggtatggaatggatagtaatggactggagtgaaatggactggaaagaatggactcaaattgaaagggctcgaaaggaatggagtcaaatggaatggtctggaatggaatgaacacgaatgtaatkcaatccaatagaatggaatcgaatggcatggaatataaagaaatggaatcgaagagaatggaaacaaatggaatggaattgaatggaatggaatcgaatggaatgggaacgaatggagtgaaattgtatgcagtagaagagaatagaatggaatgcaagcgaaaggaaaggaatggattggaatggaatggaattcattggaatggaagggaatgtagtgtaatggacaggcctggaataaagtggaatgctacggtctcgaatggaataaaaatgtatggaatggaatgcaatgaaacg

SEQ ID NO: 552145 - DNA, 671 bp, Homo sapiens
tggaattgaaaggattgggatcgaatacaatggaatatactggaatgtaatgtaatgaactcgaatgtaattgactggaatggaatgtacatgaatgaaatgtaatcgaatggaaagtaatccaatggaatagaatctaatgcaatgaaatcgactcagatagagtagaatgtaatggaatggagtgcagtgcaatggaatggaatggaatggaatgcaatggaatggaatggaatggaatggaatggtatggaatggatagtaatggactggagtgaaatggactggaaagaatggactcaaattgaaagggctcgaaaggaatggagtcaaatggaatggtctggaatggaatgaacacgaatgtaattcaatccaatagaatggaatcgaatggcatggaatataaagaaatggaatcgaagagaatggaaacaaatggaatggaattgaatggaatggaatygaatggaatgggaacgaatggagtgaaattgtatgcagtagaagagaatagaatggaatgcaagcgaaaggaaaggaatggattggaatggaatggaattcattggaatggaagggaatgtagtgtaatggacaggcctggaataaagtggaatgctacggtctcgaatggaataaaaatgtatggaatggaatgcaatgaaacg

SEQ ID NO: 552146 - DNA, 1459 bp, Homo sapiens
caccgccagyagtcctcggctgagaaaggcaggttagagaagctcagctcaccatgcaatcaccatgcagccaccatcagaatgaggtcctcccatccaaactgcatggcttggagtaagggaagcaaagtcccgagggaaaaatccaagggatgatctctggggaagcgacaagcaccccacaacattaggtgtgcaaccggggctactcttgacctcctgagcctcggcctcttcactctgaccccaggggccgatgccctcacctctaagaggtttggggaggactccatgagacgccttcaagtcagcactccaagccagcacagagtgagagctccacaaccctgagcctggcgcgctgtcgtgcttgggaagaatgggttctgtcccagaaggcaagaatagttagtttgaggctggctgaggtcccctggcggaagccaccgacgtgggggtagccgtggggacgctcaaaggaaggctccacgctgccgcccaggggcccgggtgcgtcagggctcctcggacctcgggcgagctcaggcgggcggcggcctggcccgtgcccgctcccccacgcatctgaacatgccgggctctgctggctggccaggatggcagagagagccggctggtgccctcggggaggggcgggactctccccgcagggtcccagatggctcgggaagaaaagccatcaaccaggaaatgaagaaaacagcaggtcaattagcggcgggcctgtgatgcgaggggcccccgcggcggcggggactgcgtggggccacccaccctcagcgtgcggcccgtagggtgtgccgctagtcctgcgatcccaggaccccagccccatgtcccggggactgggagccgcccgcggacacactgactctgggctgctaagacgcgcctcttctctgagctgcctgccaggaggtcacgggcagagcggctgcggatctggctcctttttattttttaagaactcagcggtctggagctggtcagcctggtgcacggctctttttccctttcttctcaatgtttttctcactgtggcctcgtttacccctgcccccaccgctaagtgcttttagtcggaggaaaaattgacccgcagaaatcactgcattttgtacccaagacagtatttgaacttcctaatagcccttcgaatcccctcagggctctgcttctaataaaccaaaccttcaaagtggaataaaacagttttctcaccctaccaaccttcttcataattagcctcagctagagggtcccacttggactgtctggctgacggctgtgccgcccaggcctggaaactgggccctcaaggactggtagcagagagaacaaaggcggaaaccggctgcccccactgaccctgggctgggtgttctataaagccatcctgtgcctatggactattaaacccattttacaggaagggaag

SEQ ID NO: 552147 - DNA, 501 bp, Homo sapiens
ccaatctggcagtgtttgctcatttgtttgcttgttttaaataaaaacgaggcttaattcagaagaaatctttgctcagaaatgggacactaagtcattcttgttttctaactaaattgatggtgcactgttgttgactctggggttaaagacttcagtaagaagcctgcttggccttttctccatacatctggtgaccttagaaagtgatgactttataggatgtgaccacatggctcataccactgtgaggtaaatgcaaagctcccagaaatcccagtgggggagcagaaagagttattattcagaaagagttactgggtcaccactgaacatggtccataatatttctcctcaaactcaaatgaaaattcaacttgttttatgtaagttatagaatatgttctagcacctatatgattatttctctctctctctctctctctctstctccgtgtgtgtgtgtgtgtgtgtgtgtgtagttttatggaagaatggaga

SEQ ID NO: 552148 - DNA, 501 bp, Homo sapiens
ccaatctggcagtgtttgctcatttgtttgcttgttttaaataaaaacgaggcttaattcagaagaaatctttgctcagaaatgggacactaagtcattcttgttttctaactaaattgatggtgcactgttgttgactctggggttaaagacttcagtaagaagcctgcttggccttttctccatacatctggtgaccttagaaagtgatgactttataggatgtgaccacatggctcataccactgtgaggtaaatgcaaagctcccagaaatcccagtgggggagcagaaagagttattattcagaaagagttactgggtcaccactgaacatggtccataatatttctcctcaaactcaaatgaaaattcaacttgttttatgtaagttatagaatatgttctagcacctatatgattatttctctctctctctctctctctctctstccgtgtgtgtgtgtgtgtgtgtgtgtgtagttttatggaagaatggaga

SEQ ID NO: 552149 - DNA, 501 bp, Homo sapiens
ccaatctggcagtgtttgctcatttgtttgcttgttttaaataaaaacgaggcttaattcagaagaaatctttgctcagaaatgggacactaagtcattcttgttttctaactaaattgatggtgcactgttgttgactctggggttaaagacttcagtaagaagcctgcttggccttttctccatacatctggtgaccttagaaagtgatgactttataggatgtgaccacatggctcataccactgtgaggtaaatgcaaagctcccagaaatcccagtgggggagcagaaagagttattattcagaaagagttactgggtcaccactgaacatggtccataatatttctcctcaaactcaaatgaaaattcaacttgttttatgtaagttatagaatatgttctagcacctatatgattatttctctctctctctctctctctctctctscgtgtgtgtgtgtgtgtgtgtgtgtgtagttttatggaagaatggaga

SEQ ID NO: 552150 - DNA, 501 bp, Homo sapiens
ccaatctggcagtgtttgctcatttgtttgcttgttttaaataaaaacgaggcttaattcagaagaaatctttgctcagaaatgggacactaagtcattcttgttttctaactaaattgatggtgcactgttgttgactctggggttaaagacttcagtaagaagcctgcttggccttttctccatacatctggtgaccttagaaagtgatgactttataggatgtgaccacatggctcataccactgtgaggtaaatgcaaagctcccagaaatcccagtgggggagcagaaagagttattattcagaaagagttactgggtcaccactgaacatggtccataatatttctcctcaaactcaaatgaaaattcaacttgttttatgtaagttatagaatatgttctagcacctatatgattatttctctctctctctctctctctctctctcygtgtgtgtgtgtgtgtgtgtgtgtgtagttttatggaagaatggaga

SEQ ID NO: 552151 - DNA, 585 bp, Homo sapiens
aaagggtatggaaatcttggcaagcattacttttcaaaatactttcttcaaggttttaggggaaaatagtgtctgattctctttatcctccttttttatttcttaaatttatagtgatttatttacttgctaaaatattttttgccacttctgtttcttatgtgagttgcatattcgtatcagtggtgtgtacattctagtggagttagaaaggacggtaaacaaatgtattgggaaggtataaatcttaaaaagaaaaataaaatgagattagagtgattaggttgaagaataccattataagtactgttttcaggagatgctttttatctttggttacatttgagcatagaagggtggaggctttctgagagaggaggattacaggcagcrgggaccacagtataaacgctcttagctgaggatgtgtttgatgtgtctgcagagcagccaggagaacagtgtgcctgcattagggacaaggaggggatagtgatggaagagatcagattgacagtcaagaccagatctcttaggtacttggagtgtggactagggtaaggagtttggattttattgagaaca

SEQ ID NO: 552152 - DNA, 642 bp, Homo sapiens
gcaaattattttatagttttgattttatgatagataatggggatatagtgttaaaacatgatgattcagccatttgctagatttgtgtttcagaactgttttttgacagaaaaaccagctaataattgaacctaatgaaagagtcctgtggttaatatttaatagcttactacgattgrgtgctcttgtgtttattctgttagcttagtcaaagcattgagaaaaaatcattacaaggcttcagcatttttattgactaattttatctgtgctggattttcaaagttgatatgtaaaaattaatactacctgattatataacaaacgactgttttaactactttacatataataactcatttaaacttcacaaaactcctaaaataggtagtacaattgactcagttttacagacgagaaaactgaggtgcataaatgtaagtaacgtgtttaagggcacacaattttaagtgttggagttgggatttgaatatagggagtctggctccagactactgtatgttcttgacactgtgcatttttacctgtgtgatgtgtatattctaggcatgttgctacttgtatgtatttcatagatagttatattttatcattcatgttttgagggtgaacaaagagttg

SEQ ID NO: 552153 - DNA, 642 bp, Homo sapiens
gcaaattattttatagttttgattttatgatagataatggggatatagtgttaaaacatgatgattcagccatttgctagatttgtgtttcagaactgttttttgacagaaaaaccagctaataattgaacctaatgaaagagtcctgtggttaatatttaatagcttactacgattgagtgctcttgtgtttattctgttagcttagtcaaagcattgagaaaaaatcattacaaggcttcagcatttttattgactaattttatctgtgctggattttcaaarttgatatgtaaaaattaatactacctgattatataacaaacgactgttttaactactttacatataataactcatttaaacttcacaaaactcctaaaataggtagtacaattgactcagttttacagacgagaaaactgaggtgcataaatgtaagtaacgtgtttaagggcacacaattttaagtgttggagttgggatttgaatatagggagtctggctccagactactgtatgttcttgacactgtgcatttttacctgtgtgatgtgtatattctaggcatgttgctacttgtatgtatttcatagatagttatattttatcattcatgttttgagggtgaacaaagagttg

SEQ ID NO: 552154 - DNA, 642 bp, Homo sapiens
gcaaattattttatagttttgattttatgatagataatggggatatagtgttaaaacatgatgattcagccatttgctagatttgtgtttcagaactgttttttgacagaaaaaccagctaataattgaacctaatgaaagagtcctgtggttaatatttaatagcttactacgattgagtgctcttgtgtttattctgttagcttagtcaaagcattgagaaaaaatcattacaaggcttcagcatttttattgactaattttatctgtgctggattttcaaagttgatatgtaaaaattaatactacctgattatataacaaacgactgttttaactactttacatataataactcatttaaacttcacaaaactcctaaaataggtagtacaattgactcagttttacagacgagaaaactgaggtgcmtaaatgtaagtaacgtgtttaagggcacacaattttaagtgttggagttgggatttgaatatagggagtctggctccagactactgtatgttcttgacactgtgcatttttacctgtgtgatgtgtatattctaggcatgttgctacttgtatgtatttcatagatagttatattttatcattcatgttttgagggtgaacaaagagttg

SEQ ID NO: 552155 - DNA, 405 bp, Homo sapiens
tttttttaaatttggaaggtaactaagggctgaaaattatacttcttagaagtatagctaaaacctgaagaaaaacttccaagctctccttcaaaactgctcaggtattatggaaagaacatttggatttgagtttaaagatgtgagtgaaatcaggatccaaatatgcaattgttaactataagaagatggctagatttctttctatatgtgaaaacccctattagttamttccttgcccctacagcatgccactaatactcaccatagacacttctttcttcaaagtaaaactctgtttttgttcaggtagacaatgtgttaagcccaaaagacgtatcataattggtctaagaaagtcatgactagcatactcaccctttccagaaattctctttttagcct

SEQ ID NO: 552156 - DNA, 1057 bp, Homo sapiens
taccagctggggtaggaagagcccatttctaacaaaacccccaacagcagcatggttgggggcaagtggccttcgtagtttcctcagataggggctggcaggactcaggatctttttgctggcgaccccaccccgaagactcccagttttcaaggtctcggcaagggtcatgtaaacctcacttcgtggaggaaaaccgccaacctggcagttccatggtcaaggttctcacagtgcaagcaaggcacggtctgaccaccagagggcagcagcgaccgcccacagaatcccaagaccacagcagagctgggaaggggaggccggggaggcaccccaggttctcagtggacgccctcttcaggcactgggcaaagggtaatctcctgggtcaagcaccccctagacaaatgcacagcaactcatccattccttttttgcaacacgtttattgagaggcagttgtgctccagccttccaggaggtcacagtcttaggggaagcagtgcaatggaggttggaagcaggggaaccctttactgaaggctgagcgctggctggcacactaggcctggcagcactggagggcaggcagggaaagtagggtgggtaacccagcctggcaaatgcacggcagctagaaaacctcttcaggttctggggtggctgggccatgagaggggaggccaggcagggctgtcaaggtaaccggggtcagatcatggagttgcctgccaggctccacaggagtsggggacagaagcagagcaacccagctaccagccgggccctgagctccctcagggtgaccagggaggagctgtgactggctggggaggcagggctggggccgaggttccccaggacgacaggagggagccaaggcactctaagaggtggaagaagaggaccagaagctggtgagtgcatcactggagcccataggagggctcctgactgtcctcaaaagcctcagacctcagtgtccactttctccatccaagaaatggggctgtgatctctgcttatgacagcacaagcttgcacagaagtggaggcg

SEQ ID NO: 552157 - DNA, 1724 bp, Homo sapiens
agaaccctgcagaggggccacccacatgaggcagaagacactcagccttcagggatgaagctactccctgaggtcccagggacgggagctggcctggcaaatacatctaccctgcctgagcagtccccaggccttggctgcccatgagcactsggggacaggccagagacaaggccactccttgagtgctaaaagttcccgtcacaaaagccagactcagcaacagctcaaaacattattgtccggccaggcgcggtggctcatgcctgtaatcccagcactttgggaggccgaggtgggcggatcacctgaggtcagtttgagaccagcctgaccaacatggagaaaccctgtctctactaaaaatacaaaattatccgggcgtggtggcacatgcctgtaatcccagctactcggaggctgaggcaggagaatcgcttgaaccctggaggcggaggttgcggtgagcccagatcacaccattgcctgggcaacaagagcgaaactctgtctcaaaaaaaaaaaaaaaaaaattattgctggacctgctcctcccagcgctcaggggcaggagcttgctggaagtcacatgccagctacagatgcactgggccagacgacctgagatggtggtgccacctcactgcacagcccaggcagaggctgtgtctccacccagagggtccgaaaggtcatgttccacgctagggctccgggcggagaggccggaagaggcggggatgccggcgactcagtagtaaggcaagtcctgccacctcctggccggcccttccgctggcgtggccctctctctgcaagccctggggcccagcgccagcagcggccccgccccgcgttcgctgggtgaccggtgggcggggcgccctcgagggaccagcaggaacagcagcaggaggacaaactgcctcaccctccctgccccaagaggtgatggtggggggacaaagaaagaagagggaccaaagcagagagagaggggtacagtccagccaggtgggtcccgacaccgtgccgagaaccacatccagaccacagctgagcacccaacagctcactgattggatccagggaggggagaaactggctggagccctccagggtgcagctgggagggagacgtacatcaattacttaattatccaaagcaggtggggagtaaagaccccacccggagagcaacgaagactctaaagggaggcgccacaccctcgggcggcagagggtaacgtgagagcaacggggttcaatggcagagccaaatttaaaacaggtttcagggagtatagaaggaggaggcttttgggatattaacaatgtgaacctcaatttttatcaggtgctttcgccctcttgctgtacttgggcagcggggagtctgggcaggaacactcttccctcccagcaaaggagctggacccagcacggctcatcggggattgaagacccagccctggccctcacaggaggagccaacagcaccacgccagttacttccaaccagacagtcccgggcagggatgccagcagacagctggcacgggaggaagcccaaaataacccagacagctggggtgagggggtgccatgggcacaggcgctggctgccaagtcaagccacctggaaccccatcctggctctattggtggtggccttgtgaccttggggagtcacttctccccggaccatgggtgggtgacccaaa

SEQ ID NO: 552158 - DNA, 1724 bp, Homo sapiens
agaaccctgcagaggggccacccacatgaggcagaagacactcagccttcagggatgaagctactccctgaggtcccagggacgggagctggcctggcaaatacatctaccctgcctgagcagtccccaggccttggctgcccatgagcactcggggacaggccagagacaaggccactccttgagtgctaaaagttcccgtcacaaaagccagactcagcaacagctcaaaacattattgtccggccaggcgcrgtggctcatgcctgtaatcccagcactttgggaggccgaggtgggcggatcacctgaggtcagtttgagaccagcctgaccaacatggagaaaccctgtctctactaaaaatacaaaattatccgggcgtggtggcacatgcctgtaatcccagctactcggaggctgaggcaggagaatcgcttgaaccctggaggcggaggttgcggtgagcccagatcacaccattgcctgggcaacaagagcgaaactctgtctcaaaaaaaaaaaaaaaaaaattattgctggacctgctcctcccagcgctcaggggcaggagcttgctggaagtcacatgccagctacagatgcactgggccagacgacctgagatggtggtgccacctcactgcacagcccaggcagaggctgtgtctccacccagagggtccgaaaggtcatgttccacgctagggctccgggcggagaggccggaagaggcggggatgccggcgactcagtagtaaggcaagtcctgccacctcctggccggcccttccgctggcgtggccctctctctgcaagccctggggcccagcgccagcagcggccccgccccgcgttcgctgggtgaccggtgggcggggcgccctcgagggaccagcaggaacagcagcaggaggacaaactgcctcaccctccctgccccaagaggtgatggtggggggacaaagaaagaagagggaccaaagcagagagagaggggtacagtccagccaggtgggtcccgacaccgtgccgagaaccacatccagaccacagctgagcacccaacagctcactgattggatccagggaggggagaaactggctggagccctccagggtgcagctgggagggagacgtacatcaattacttaattatccaaagcaggtggggagtaaagaccccacccggagagcaacgaagactctaaagggaggcgccacaccctcgggcggcagagggtaacgtgagagcaacggggttcaatggcagagccaaatttaaaacaggtttcagggagtatagaaggaggaggcttttgggatattaacaatgtgaacctcaatttttatcaggtgctttcgccctcttgctgtacttgggcagcggggagtctgggcaggaacactcttccctcccagcaaaggagctggacccagcacggctcatcggggattgaagacccagccctggccctcacaggaggagccaacagcaccacgccagttacttccaaccagacagtcccgggcagggatgccagcagacagctggcacgggaggaagcccaaaataacccagacagctggggtgagggggtgccatgggcacaggcgctggctgccaagtcaagccacctggaaccccatcctggctctattggtggtggccttgtgaccttggggagtcacttctccccggaccatgggtgggtgacccaaa

SEQ ID NO: 552159 - DNA, 1724 bp, Homo sapiens
agaaccctgcagaggggccacccacatgaggcagaagacactcagccttcagggatgaagctactccctgaggtcccagggacgggagctggcctggcaaatacatctaccctgcctgagcagtccccaggccttggctgcccatgagcactcggggacaggccagagacaaggccactccttgagtgctaaaagttcccgtcacaaaagccagactcagcaacagctcaaaacattattgtccggccaggcgcggtggctcatgcctgtaatcccagcactttgggaggccgaggtgggcggatcacctgaggtcagtttgagaccagcctgaccaacatggagaaaccctgtctctactaaaaatacaaaattatccgggcgtggtggcrcatgcctgtaatcccagctactcggaggctgaggcaggagaatcgcttgaaccctggaggcggaggttgcggtgagcccagatcacaccattgcctgggcaacaagagcgaaactctgtctcaaaaaaaaaaaaaaaaaaattattgctggacctgctcctcccagcgctcaggggcaggagcttgctggaagtcacatgccagctacagatgcactgggccagacgacctgagatggtggtgccacctcactgcacagcccaggcagaggctgtgtctccacccagagggtccgaaaggtcatgttccacgctagggctccgggcggagaggccggaagaggcggggatgccggcgactcagtagtaaggcaagtcctgccacctcctggccggcccttccgctggcgtggccctctctctgcaagccctggggcccagcgccagcagcggccccgccccgcgttcgctgggtgaccggtgggcggggcgccctcgagggaccagcaggaacagcagcaggaggacaaactgcctcaccctccctgccccaagaggtgatggtggggggacaaagaaagaagagggaccaaagcagagagagaggggtacagtccagccaggtgggtcccgacaccgtgccgagaaccacatccagaccacagctgagcacccaacagctcactgattggatccagggaggggagaaactggctggagccctccagggtgcagctgggagggagacgtacatcaattacttaattatccaaagcaggtggggagtaaagaccccacccggagagcaacgaagactctaaagggaggcgccacaccctcgggcggcagagggtaacgtgagagcaacggggttcaatggcagagccaaatttaaaacaggtttcagggagtatagaaggaggaggcttttgggatattaacaatgtgaacctcaatttttatcaggtgctttcgccctcttgctgtacttgggcagcggggagtctgggcaggaacactcttccctcccagcaaaggagctggacccagcacggctcatcggggattgaagacccagccctggccctcacaggaggagccaacagcaccacgccagttacttccaaccagacagtcccgggcagggatgccagcagacagctggcacgggaggaagcccaaaataacccagacagctggggtgagggggtgccatgggcacaggcgctggctgccaagtcaagccacctggaaccccatcctggctctattggtggtggccttgtgaccttggggagtcacttctccccggaccatgggtgggtgacccaaa

SEQ ID NO: 552160 - DNA, 615 bp, Homo sapiens
tggatagattggaattttaatagcaaatttgaagactaggggctcagagagattttctgagtagagcctatggktcacaggtaaaagatgatatggcttagattatgagaagatgttcaattatgggtgcttgggaagagttctgcaacttggaggccattgttggtggagtgctaaaggcagctggcatctgagagatatggtgggtctaggtttagttttatttacccttttttcttctgtaaagaagaaagcttcatggtgacaacatggcttctttattcaatcaaaaattcagaaattcaggacaatttgatgtgatgcagacaaaatctctggatgttgggctagatttttaaaaagttttaaagagcaatttaactagatattttggcgtaatctagatacggtctgtaattcaattttcttaggagtttagcaattccttttgaaattggtaggtattattactccatcattcaaaattttaccctttgacagaaagaattggaatgtttaattaacatggccagtatctttgcattgatacatagctttaggatttgtgaggatattgacatgggggaggtgaaaccaatcagaatttatgtacct

SEQ ID NO: 552161 - DNA, 1015 bp, Homo sapiens
aatattagccaggtgtggtggtgcacacctgtaatcccagctactcaggaggctgaggcaggagaatcgcttgaacctgggaggcagagggtgcagtcagccaagatcacaccactgcactccagcctgggcaacagagtaagactctcaaataaacaaggctgccactacttagcttatttttaaaggtggactcagcatttttttggtaagccgactgtttaatggtgcttcacattcccatgaactgagctgtttatgccaaggcttctgctggtggctccccaagtagttctcattatcctaatacaagttttcttccagcagcagcttagtgtctaataactgacctatttaaaatccattttcctttgggaaggaccctaaattgtcacagcaccagaargaatttctgctatttgatagttattctatgttaagttgacggactatccacttcaaatatacaaagaaaaaattacatgaaataattgaatttaacaacttgcattacagggatttggtaacccttcaggagaatattggctgggaaatgagtttgtttcgcaactgactaatcagcaacgctatgtgcttaaaatacaccttaaagactgggaagggaatgaggcttactcattgtatgaacatttctatctctcaagtgaagaactcaattataggtaagtgagttcatggtaattgaaagaaaaaattaaaagatttgtggccgggcacggtggctcacgcctgtaatcccagcactttgggaggccgaggtgggcagatcacgaggtcaggagattgagaccatcctggcaaacaaagtgaaaccctgtctctactagaagtacaaaaaaattagccaggtgtggtggtgggcgcctgtagtcccagctactcgggaggctgaggcagaagaatggcgtgaacccgggaggcggagcttgcagtgagccgagatcgtgccacggcactgcaacctgggcgacagagcaagactccgtctcaaaaa

SEQ ID NO: 552162 - DNA, 624 bp, Homo sapiens
caggtttgtggtaatttgttacagaagcmacaggacactaatacacaaacaacatgctttagggtgctagggcttaactgaaagttattttggtatacatgaaaagttatctatatgaacatatattaatgtcatgccatatatcttagggaatttatttgtgatagttagttgattttattttgggtgatgaacgcaggtatataatcgtgtcatctacacccaggggtttaacgtcatctttttttttttttttcctaacttctagtatctctctcagctggctccctttagtacaatgttaaataatagtcacgccagtgggtatctttgcaatgttcctgacttttgcacaaatgcttccagtgtttcctcattcttccaccatctcccaccctcgaatgatctgttatggactgaggggacaattagtaacttttccaagtctagtggtgttgtaaccgagtaacctatttttaagggttttttttttgtcctttttttttcttttttacttccctcccttatttggtgcctgtttcttgttaataataaaataatgacctttactctccttctttcccccaggcactcccttgcactgctcacttatctaattatgtc

SEQ ID NO: 552163 - DNA, 1476 bp, Homo sapiens
aattaaataaaatttcaagatgtgctcggtgtcgctctctatcttggacggttctatattcattgtttaacctggtttttatttccagtcttaatcagaggactttcttctaatttatcctaaatctttatttcaaaaacattccctccagagcagcccccaaattgcaagccagattcacatccaaagctgttttggcagcttgtctgccccctttgtctagcctcaccacgagcggattgttttcctcaaaggccaatttagatcatgagtgaccccaccattttctctagttcattttcaccgggttgtcctgcacctccctgctcaggaaaaagcagaaaaagagaaaagcagtgatcacagtcatgcttgtgactttagtctcctctggaaaaggttttaattgactggaaaaacmtaagaatcttcttctccactgacccacacctgtatataaactgctgtttggaccctggggccatttctctggtacttctgtttaccagcccacaatatacccaaattatagggctacatctaagagaaaggagcatcctcacaagccaagtatggcaaacctgattctattaaatcacagacaagggctcgccacctctctctgcctttttctttctaaacctagctaactgcttaatcccattcaatctctacccacagctacagttttgatatcttcctcttctgactctagcactttccagccatgagagtgtcacctttcagatagcccatgcctttccaacaagaataatctttctaaaaccaatttgtatacaaattaactgaaactttggccaaagaaatgcatgcatgtgtaggcatacaaactgcattgccttggaagactgtgcctagtttccacccactcacgctcagtatcagcactgataaccttcagcccagccacttggagcaccatgcctgatgccaccctgagcatcatgagctggcacaactcaggagcaactaccatgaaaacaggcttcgtttctttgccctctttcttcatgtctcactgaagatgacaattgactctcagaggtgtttaatgggggaaatcacccaccctgtgcccagtgtgctccaaaccaggcaaagcaacggtggagaaggaatatttttggaacagagaaagcaagacacagagggctgtacccctccaggaatagtttctcccctgatagatctcttctccttcttctcccttgcaaggtgcctattacctggttagttgatcaaagtatcaagtggagaagccagaaataattgacagaaatatggggaacccctggcctttattacatcctcatccaggaaagaaaaacttcctgtccacagcagcacctgagtggatcatggtcagtacgtctgtgtgggagtacattcacacatgctgattttctgaacaggaaacagcttcctgatatttcttccaaacatattctctatact

SEQ ID NO: 552164 - DNA, 1640 bp, Homo sapiens
atttatttatttatttattttctcaaatggagttttgctcttgttgcccaggttgaagtggaatggtgcaatcttggctcactgcaacctctgcctcctgggtttaagtgattctcctgcctcagccccctgagtagctgggattacaggcgtgtaccaccatgccccagccaatttttgtatttttagtagagacgggggttcaccatattggccaggctggtctcgaactcctgacctcaggtgatccacccacctcccaaagtgctgggatcacaggcgtgagtcaccgcgcccagcctactacatagtagtttttaaaagttgacacgaagcattcaatatagttcatgggccagcaaagtacatcccatgggctggccactcgtttttgtaaacacagtttttatctgatcacagccaagcttatttatttatgcatcgtctgtggttgcattcacattgcaattgtaagttgtatcgttgcaacagagattgtttggctcacaaaatctaaaatatttatgatctggtcctttaagaaaaagtttgctccaaaaatagctttgtcacagatttaagtttacttgtgtttgagagggaatggaaggggtcttgaccacgttttggagtaaagccttccagggaagtgcaggggtcatctgaaaatggagcttgggacagcagtcgaagcgagaggagtgtgtgctaccagtcttgaatttgtagaacatgcaagcactgcccagggagtctcagaaatcctcagagaggggactaagcttcctgccacatccaagtgagaccttggatcataagacatattcgagctcccattcatgaagcatgtggtctttggattatatttgggacttatctcaatccttaaggagatccgggaatatgtcctcagtagaactgctaaatgtgtgaagaaaatggtgctatttaatatagagtgatactgcacaggctcactgtataattgtatcccaaagcaaatagtatatttctatttcctaacagcttctgagatgagaggatgacaagagtagaggtgagaggcacttttttgaataaggatgtctcaggcatgacaccaactayatacaaagctactcaggtttttcattaccatttctcaacattttaaatcttaaatttccctaagaagtgaatgaatcatatactagatattatagattggatttcctttagtggaattgttcctggagtgagaacagagctacaatttgattgatcacaagttattcccctgccctgggtagctgtgggaaattcccaggaaacagtgctccgactgacatcatcaattgggcaggcagtggagctcagtctgaacttctttatcagggagcagagtggtgccctaaattctaccagacttgacttttggatttcccagaaaagctaccagttatgcatgatgttccagctgatactatcttctacccagtctcaggacacgaggggctcagatgctgatggcaatgcttttcattaacaaaatttcactctccactcacgccatcccagagagtaggttactagcaaccttgtaaaaagtatttctctctcctatgttaattaaattccacaaatttcactctttttaaaaa

SEQ ID NO: 552165 - DNA, 964 bp, Homo sapiens
taaaaaaaaaaattaattaattagccaggtgtggtggcaagtacctgtagtctcagctactgaggaggctgagatgaaaggatcacttgagccccggaggtcgatgctgcagtcagtgagccatgattgagtcgctaaactccagcctgggcaacagagagaaaggccctgaagaaagaaagagagaaagagagagagagatggagggagggagggagggaagaaggcaggaaggcaggcaggcaggcaggcaggcaggcaggmaggaaggagggagggagagaaacacacacacgcacaaaaggaagaaaagaaaaacacacacttacatttttgcatgcaatttcagaggattggtgtatcaatctaaagaccatccaggaactcccttagctgagcatctcttatccagtctacaacttccattttataattgttgaaaatcattgctagaagaatagttggaaaattgtgtcacctaagccaaagctggctcacttcttgtttttatacagcctgtgagctacgaatggtttttatagttttaaatggttatgtaagtaccaatatattagcctcagttctacctcttggcttgcaaagcctaaaatatttactatcaaggcttttgtagaaaaagtttgccaacccctggtctggaatccttagacaatattcccccaaattatgcagccaattactagaaaacagaggactagaattcacaccacctgattcctcatccattggtcttcccattacttctattgactgattaaaatcctaattaactgatttaaacccaataaaacagaaaacaaagacatgtaattctggagtacttaataagtaatttctcagataagtaattgtgcagttatgtagaacgctgaagtccagagaattaagtgacctatcaaaagtcatataacaaatttgtaaaagaaacaaaattaaatgccta

SEQ ID NO: 552166 - DNA, 533 bp, Homo sapiens
agtgcagtggctcaatctcggctcactgcaacctcctgccttctgggttcaagcgattcccccgcctcagccctccgagtagctgggactacaggygcataccaccacgccgggctaactttttgtattttagtagagatggggtttcaccatgttggccaggatggtctcgatctcctgacttcatgatccgcccgcctcggcctcccaaagtgctgggattacaggtgtgagccactgcgcccggccctattatttaatttttaaagcatcttatcagtgttttgttacggtgactaatggtattcatagtaccattaatggtaagatgtaaacaagaaatgcctacatttaggggttaaaataatattttagagagcatttttccccataactaggaaagctgtagaattcacactaaacacagatataatgagattgtatgttaatgtatgtaattacaataatattttataacatcagtaatacagtaagtaaattgagtataggaatgaagagacagaagatttcag

SEQ ID NO: 552167 - DNA, 533 bp, Homo sapiens
agtgcagtggctcaatctcggctcactgcaacctcctgccttctgggttcaagcgattcccccgcctcagccctccgagtagctgggactacaggtgcataccaccacgccgggctaactttttgtattttagtagagatggggtttcaccatgttggccaggatggtctcgatctcctgacttcatgatccgcccgcctcggcctcccaaagtgctgggattacaggtgtgagccactgcgcccggccctattatttaatttttaaagcatcttatcagtgttttgttacggtgactaatggtattcatagtaccattaatggtaagatgtaaacaagaaatgcctacatttaggggttaaaakaatattttagagagcatttttccccataactaggaaagctgtagaattcacactaaacacagatataatgagattgtatgttaatgtatgtaattacaataatattttataacatcagtaatacagtaagtaaattgagtataggaatgaagagacagaagatttcag

SEQ ID NO: 552168 - DNA, 533 bp, Homo sapiens
agtgcagtggctcaatctcggctcactgcaacctcctgccttctgggttcaagcgattcccccgcctcagccctccgagtagctgggactacaggtgcataccaccacgccgggctaactttttgtattttagtagagatggggtttcaccatgttggccaggatggtctcgatctcctgacttcatgatccgcccgcctcggcctcccaaagtgctgggattacaggtgtgagccactgcgcccggccctattatttaatttttaaagcatcttatcagtgttttgttacggtgactaatggtattcatagtaccattaatggtaagatgtaaacaagaaatgcctacatttaggggttaaaataatattttagagagcatttttccccataactaggaaagctgtagaattcacactaaacacagatataatgagattgtatgttaatgtatgtaattacaataatattttataacatcagtaatacagtaagtraattgagtataggaatgaagagacagaagatttcag

SEQ ID NO: 552169 - DNA, 691 bp, Homo sapiens
gctaaaagcatgcagaagatcctgggaaaatatttggctcatatgtattaaagaattaaggtttctaatatgcaaagaggtcctatgaatcagtaagaaagtggcaaaaagcccaattaaaaatgtgtaaagcaggtgccctgcgttgcccagactagcgacaatatagtcaggatggctaaagatgacccccaagaaaccaaaaggtgagatgtctgcttatgccttctttatgcagacatgcagagaagaatgcaagaagaaaaacccagaggttcttgtcaatttcacagaaatttccaagaagtgctctgagaggcggaagacaatgtgtggaaaagagaagtctaagcctgacgaaatgaccgaggtggatgaagtactctatgattgggaaataaagaattacggaccagctaagggaggcaagaagaaggaccctaaagcccccaaaaggctaccatctggattcttcctgttctgttcagaattctgccccgaggacaaatccacaaaccctggcatctctattggagatgtggcaaaaaggctgagtgagatatggaataacttgagtgacagtgcaaagctgcytgacatcactacggcagcaagctgaagaagtgtgagaagggtgttgctgactcgaagtctgaaggaaagttcgatggtgcaaaagttaaagttgcct

SEQ ID NO: 552170 - DNA, 541 bp, Homo sapiens
tgtaggtgttcaagtgtggcaggggcgttgcagaagcaactttggcatcgcatggggctcctcttcatggctgcttccagccctgagctttcctagccttgggggagatgggcacccaattcccacattccccggagtcgctatgtccttaagcatcacaygggtctttctagccgcatcaggccatgcttgtgggcaggtggtgcctctatctagaaaccctcttcatagcctggctgtctggcaaggttcttccaaggaacctccaccatgaaagccatgaatgcatcttcagagacccctgtccatgtgtaaatagctcagtgggctggatgggagggagcagagggggagagggacccagctgaagaggactggagtgaacagggagaggctgagggaggtcaggagggcaggacacccacctcctgaatcttcaggaccccttgctctcccttatccaacaggcttgaacctgaataggggcattcctgaccccatggcacttcccctgccccccacctgcctagagccatgggca

SEQ ID NO: 552171 - DNA, 541 bp, Homo sapiens
tgtaggtgttcaagtgtggcaggggcgttgcagaagcaactttggcatcgcatggggctcctcttcatggctgcttccagccctgagctttcctagccttgggggagatgggcacccaattcccacattccccggagtcgctatgtccttaagcatcacatgggtctttctagccgcatcaggccatgcttgtgggcaggtggtgcctctatctagaaaccctcttcatagcctggctgtctggcaaggttcttccaaggaacctccaccatgaaagccatgaatgcatcttcagagacccctgtccatgtgtaaatagctcagtgggctggatgggagggagcagagggggagagggacccagctgaagaggactggagtgaacagggagaggctgagggaggtcaggagggcaggacacccacctcctgaatcttcaggaccccttgctctcccttayccaacaggcttgaacctgaataggggcattcctgaccccatggcacttcccctgccccccacctgcctagagccatgggca

SEQ ID NO: 552172 - DNA, 808 bp, Homo sapiens
gttgtaaaatggagtgagtaggaattttgttttttaatgttgaaagattgtgacacttctccaagcctcagaattcccatcccatatggatgttataaaaattaaataagatgccttacctaaagcctayatattatagggcctctatattcattcactatctcatttttccactgtttaggccagtcttgttgaagtcaaatttcttgtttataccgaagtgtttctgggatgagaatttaacctccaaagacacttaaaatttctgtggctccctcgaatcaaatacagaagctgtataatcatatttaatatatttcccttcagacagggtggtagatactgataatcaactagcttaaattacatttgatccatcttcaagcaagcaatggtgggaaagtttaaaactacatttcctatattcccagacagagggggaaactctgttagtttaggttctgccaatcgaataagcctgacttaaatttgatctgggacaagtcaggtaaagaggcagggaaggagacattaattcttttctgttacatattatggtccagaagacatatgtttatggagctggtagccatgtcagggattcattcagcagataactttctcattctgcagcttcctcattcagggacagcagctccttcagtaaactccttctacattgttgcttgtgaagtcattactagaagctcagctaggaacctatgtcttcaggctttccaacaattcttaagccagcttttttgttttgttgtgcttttattttcattttattttatttttgagacgg

SEQ ID NO: 552173 - DNA, 664 bp, Homo sapiens
atacaaataacgagatattcaaagccattctgcctcaatgaactctctgaccaagcttaggccaaagctgytctaacattaatttgcatacagatcatctggaagatcttgttaaaatgcagatgttgattcttggcctctagggtgaagcttgagagtttgcatttctaataagctttatgaagaagccatgccactggtctacagacctaacttgattattaagggattaacacaaaactgacagattagaaatttcctaactctgcttccaattctattttaatattagaccactgtatatttcacttaataaatatttattgagcatctgcaatgtgcaaggtctgctttagctggctgggaattcagccgtaatttttttcccagtgccttttaggctttagttcaaaaaagcaggtctccacttcaagacctctctgcaacaattctaatacagctttgacgttaaattaagagcaaggattttggaaattagaaagatggctctgccatttaatagccttgctactttgggtagattaactaaactctgagcctcagtttccacatctatgaaggatgaaaggatatatttgtaaatcattcataccatgagtaataaacgtcaattggtatttttcttgccccaattgtgtcgttc

SEQ ID NO: 552174 - DNA, 664 bp, Homo sapiens
atacaaataacgagatattcaaagccattctgcctcaatgaactctctgaccaagcttaggccaaagctgttctaacattaatttgcatacagatcatctggaagatcttgttaaaatgcagatgttgattcttggcctctagggtgaagcttgagagtttgcatttctaataagctttatgaagaagccatgccactggtctacagacctaacttgattattaagggattaacacaaaactgacagattagaaatttcctaactctgcttccaattctattttaatattagaccactgtatatttcacttaataaatatttattgagcatctgcaatgtgcaaggtctgctttagctggctgggaattcagccgtaatttttttcccartgccttttaggctttagttcaaaaaagcaggtctccacttcaagacctctctgcaacaattctaatacagctttgacgttaaattaagagcaaggattttggaaattagaaagatggctctgccatttaatagccttgctactttgggtagattaactaaactctgagcctcagtttccacatctatgaaggatgaaaggatatatttgtaaatcattcataccatgagtaataaacgtcaattggtatttttcttgccccaattgtgtcgttc

SEQ ID NO: 552175 - DNA, 614 bp, Homo sapiens
tgattgaaaaggacttcaggtcccttgataaagaacccttcaatgccacaacaagtgtttaaaataaatattagcccagttttccctcaaaaagaaactaaaatggttaggttaaagattgatccttatgagtagctaatgtaaagggagaatcttagatctaaataaagaacaaattagctagataggttggtttgaacaaaaaataattctgatacattccaatctgcattacaggtggtcctgaaaaatagtagtaaatagaaatattttcatcagctaatttggagccatatcctggagcattcactttgagtggaggaaaaagttgttaatgcaatggtgtatarggccttcggggcagccacaaatggcttggaaagataattacagtcttggaaggtgcaagggtagaagaaaaaactcaagaaattctgaaagatgtatttatggatggatctctgctagtgggttcaaaggaagcaggtctttgtgtcccatattaactcagctattgaatgtctgacttgtcatcagcaggaaccagtgttgaagccacattagagacacattcgccctattatataccatgttactcagaagttacagacctt

SEQ ID NO: 552176 - DNA, 540 bp, Homo sapiens
ttctcctgcctcagcctcccaggtagctgggactataggtgtgagccaccatgcctggctaagttttgtatttttttgtagagatggggttttgccatgttgcccagctggtcttgaactcctgacctcaagtgacccacccagcttggcctcccaaagtgctaacattacaggcatgagccactgtgcccggccacatgtgttcttattaatttatcttttccccaacacttggtattttcagatttcttaattttygccagtctcatggatttgatttacatttccctgattactaatgaagatgaggatcttttcatatatttatcagtcatgtgagcgttctccaaggtgaaaatgcctcttcctgtctcttgaccattttcctgttgtttcagtgcaggatttccccaaagtaggccccacggaactctgattctgccagttggatggaaaaagtttccatgtccagtgaagttaggaaatgcagcacactctctcatggaggatcacaaggtgtacgtccatattaaaggcact

SEQ ID NO: 552177 - DNA, 1405 bp, Homo sapiens
ttttctaatagtttcctaaaggaaactaaagtcaaaggtgaaatggaaacactgtttccaaaggaaactgttagaaaaatcacttttcttttcttttcctttttgctttgtacatgttgaagcaatttttttcttaaaaaacgaataagtgttcatgtattatgggttttatgggtttgccctgtacctcaagcaccaacttgaatgtacttttgggggcattctaggcatccttcctcacaaaactaatcattcccatctctgtggttctattccattttgtgcattttgataagagtattggagaccatcagaccagttgtttactgattttcctctccaatagattgtctgagcaactcctttccagagaccatggcttcctacttctgtgttctcagtcctttccccagtgtccatcccattctacaaatatttgttgagctgtacagaaagagcgactcatttctgaataaacacactctgctatctctgtataagtacttgttcttgtcttattcccttctggaataaggatgcaaattaaaagtatatttctgtaatacagagagtcagaaactaatttgctgacacaggcacttgaagcaagggaatgcgttacagacaggtaattatcctgttaagttaattacaactcattactctttattttttatcttaatttttgagttgagtgtttccagaatcctgctccaacatcaaacaagataaaatgcacagtgttttaatttcacctttgactttaatatgaagcaatggatttaaaatcttcttatgaaaaactagactgttattttatatagttttcttgttttaacaagtattttctacttctatgttttaagcaggtaacaatatttgcttgatataaatttaacataggaaatccatagcaaacaagtaattcagtttctttcactcttttaatcagtttcagttccaagtttttgggaagaatgtttttggctaaatcttgatcatgttctcactcctgaaccatacatctcagcctgacatttaaattgttaatactcactttgttatcacacatgtcaaattttgatccagggaagcttggggtgtgtatatgttgggatgagggtatggattttcarttcccaacgtgtagagaaggtacagttatctatcatatccaggactggttacctcaatatctcttttctgaaaaaaaaaatccagattttcttttgatttttttttgttttcactacttgaaaaaataattactattatgggaaaatgacatactttctgtgttgcaacatctctgcttctcctggtatcctcatccttgactccaccatcactgctgatgcttgaggtttcactgcctcagagtttcttgttcagtaatctagacaat

SEQ ID NO: 552178 - DNA, 1393 bp, Homo sapiens
atggaggcatttggttccctgagggcgtattggctgctcatacctgggtccctctccaggaactgtcctcccctaaaggcacatcccctctccaaggagagtcgccatccagtgactggtgggtgcgggcataccagagcccagctcccagagtctctctggrgcaattctgaaggatcatctcagctctagagctgtgggaccagctgatggctccgtgtgtcgaagttcaagttctccctctgcctggtctgctttcctcactcccttcggatgcttctcccgagtcctccccagtcatctcctgcacttaaatgcacctcacagcatttgccaagaacctgcccaaggttgaggaacctgacctccaccaagaggctgagctctgactgggagtgtagtggttggacagcctctgcaacagtcagagcctccacagtgggcagggtttgggaggctggaggctggagtctgagggagacatctgggcctgtgatggagtcagcagagtaaggggatcgggaggctgaggtgaaaaccacgtgaacatttactcaaacaatctgctaatggttttttttttgtttggttggtttttttgtttgtttgttttttgagacagagtctcactttgttgcccaggctggagtgcagtggtgtcatctcggctcactgcagcctccgcctcctgggttcaagcaattctcctgcctcagccttccaagtagctggggttacaggttcccactgccacacccagcttatttttgtatttttagtagagacagggtttcaccatgttggccaggctggtctcaaactcctgacctcaagtgatcctcccactttggcctcccaaagtgctgggaatacagatgtgagccatgcacccagccgaaatccgctaatgttaatcatccgattgtttccaattttcattattataaacgttaatacatggcctgatacctaaattctttcattcacagttctgatcatttttttttctcatatttttagagactatgtctcactaggtcttgctaggctggtcttgagctcctagactcaagcaatcctcctgcctaagcctcctgagtagctggaattacaggcgtgcaccactgcacctggctctgatccctttttttagtgaaagattttgagtgaaatgattcatcgcttgagtgaaataatgaattaaagaatatgagcattcttgaggctaccaggattttccaaggcccctttgcacaccgcatttacacggcattctccttcagccaaattccctaaattcacaagaggcctgatttagggaaggtcactgattcagctggagagttaattattcatttgaattggtttatgcaaaaagctccagagagcccac

SEQ ID NO: 552179 - DNA, 1454 bp, Homo sapiens
cgttgttgggacctggagtcgggccagagtccggcctggagacgcagccgggaggaagagctgggcccggagaggacgctgggaggctgcaagtgggtctgagaggccgacttgaggaggcccggcctctgcctcccgcatggcccagctgttcctcctggctgcatctcccgcctcccagcaaacaagctcttttggctcagctcccgccggcctttgtagaccccgaagtttctgcaaccaagctcttcagacccacatcccttctcccagtgactgaacagtcccagctccagctggagaagggtgtctgcagaccccgctgttgcctcccaggggagtctccaggcccagctctcgccccaccgcgacctcccaggcccaagtccctgcctacctcccagcagcccgcgtgcgaccctgctcctccctcacggtggcctgttgaggcaggggctcacactgacctctctcagcgtgggaggggccggtgtgaggcaaggggctcaggctgacctctgtccgcgtgggaggggccggtgtgaggcaaggggctcaggctgacctctgtccgcgtgggagggtgggcatcaacaggccaccgtgagagaggagctgggccgcacgtgggctgctgggaggcaggcagggacttggccccgggaggccgccgtgggggcaagagctgcgcctggagaggcccctggtaggcaagggcggggcctgcagaggctgttctccaaccagtgctgggcctgtacaggccaccaggaggcaggaggtgggccctcagagcttggctggagaaagttcggggcctagaaaggcggttgggagctgggcaggagttgagccaaaagagcttgcttacttgctgggaggcagggccaggagaggccgacttcaggacaacttgggcctgcagcggtcgccgggaggcccaagcttggcgtggaggagcccaccgaccggagaccatttggggcctggagatgccatcggagggcaggagctcatcctggagaggccaccgtgaggcctgacctgggcctggggagcttggcttgaggaagctgtgggccgaccaatgccgccaggagatgggtaggcactgagtccaaagaggttgttgagaggcaggagtcgggcctggagacgcaaccaggaagaagagctggrcccggagaggacgcccggagggtgcaagtggctctggagaggccgacttgaggaggttctgggcccggagaggccgccggaagggaaaaactgggcctggaaaggccgttgtgaggaacgagccccatgggcctgaagaggccactggcaggtgggagctgggcctgccgaagcggccgagaggcaggagctttggactcgggaggccgcaatgaggcgacagctagctgggcgtggagagtccgctgtgaggcagaggctgggcctgtgcaggc

SEQ ID NO: 552180 - DNA, 1146 bp, Homo sapiens
tcactcattaaacccctctttactgagcagctcctatgtgtaaagcactgtgataaacacagaggataaaatggtgagaaaaacagacacggttcctccactgatagagcttatagtacagcaagagacactatttatcaattcagtgactagagttgtttgcacttcaagtttttgttctttactttatgtgtgtttgctttggccttactgaatcctaagtactgggctaaatgtggctgggtgaagtgcagaccatacaccctctgcctccatagaacttatgaataatgtgatatgacagaggttacaggatgctttggtggtacacgaagtttaccccaggcttggggaatcaggggaggctgtccagagattgtgacatctcattaagacctgaaaaatgcatgcgaattggccaggtaaaaaagacggaggagtcaggcaaggtggaagaatttcagagaactgycagcacttcaatgtcattgaagcatcaaggagcaagcctgacaggtcagcagggccagatcgtaaaaaggttatataatatatgcagataattgacttttccccaaggacaattgaaactattgagcataaatttcttttttgttgttgttttttagagtttttccatctgaaacttcattttgcaatcaaataaagttacttttgtctactgtattcctaccttaaccccaatgctagaaataaataaacacagaaaagacatttaggattggtcagagtaggtaagtgtggctatttctataagaaagtggagaaatgccacaaactaattttattagccgtagtactgaaaacattcagtctttcagagacaaaaggaaatatgactttttttaaaagctcacttcttcccaaaacctgcacatttttgttgtagatatagatgaattactgccagattctacttaaaatgacaaatacactcagataactgttgcctgagtatttcagtgtcatccctatgttagtaacatttttctccagagtgtcagacataactcttcactcagtacttgggaaaaaaaaaattacaggaagtttcagaggaaccagggcagacaaaacagtgatccactgctctttaatttccattctcattttcccattttaaaa

SEQ ID NO: 552181 - DNA, 902 bp, Homo sapiens
gcagggcccagagtaatatggctgcaccgtctttatcatgtttgtgggatatttgaagacaacctacagttctcttcctctgatgaaacattcctggttcctatgaccattactcatacagcaaaattttccagatccttttttattttgcctatgtccgccaaatttattactctgagtgaccttttgaattatgatccacaggacatgaccccaaactcaaagaatgtcatgacctggtctatggcctggaattcctctatgcaggatttgatattttaacctctttaaagactatgtggtcttggatagatatttctagaaatgatgtcatgctgttggatcagagcaagtgtgtggacacataaaatccccaaatccattttgtggaaggtgctattaagccgggttttctagcttcttggtaaacttgggccagtgctctattttctcagaagatcaagagatatgctggattcacacatgattttcttttggcacactatgcactatgctccagcaacaagattgttatataagaagccaggccagaggtttggtgtcaggaggaaacaaacctgaaattatctaaagacactaaaagggaaggtctgagttagcacaaataattgaataatattcatggttctgaaatgattttggaaattctatcatatagaaatacaaagttcaaaaattttttctgtccagtcattcttacccttagatccatatatacttcaggaagtctataactctcctcaaaggcatgcaaaattcrtgtaaatatatattcctaatattttttctggagagagaatttatagctttcattagactcataaaagggccaataaccaaaagagcgattaagaaccactgtcaacttaaaggcatatttg

SEQ ID NO: 552182 - DNA, 1514 bp, Homo sapiens
ggaaataagtataacgtcctaacaagtgcttctggaataaatgatcatggctgaaatgagcatctgaaatgacgatatatctagaaagaacagaaaatatacactggacgtattttaggtggctgagattattgaatgggaaaatagtgagatcttacaattgaatgggtatcataaatgcttcctgtataatatctgattttgcccttatcacaaagaattcatataaccaaaactatctccctaaaaatgtcttcctaaacatgaaaacaaattatttgacttcataatgcagctttttaccccaaagtgtctgaccctttcactaaacattactcggtattaaatagtatagatataatttctctgaaattcactgaatatgattttcaaatgctgtaattcctaaaaataatatctaggctgcctttaatttctcatgtcagtaataattaatgtccctacaaagcttatggggaatcagaaacatttgtttataacatactgaagaatttttaaacaaccacagaatatgaatataataagataaaatattaaatatttccaggcatgcttatctttgtgaactgaatcttggagaagcaggattgaaaataagagctatctttgaggctctagcacctacaagagacaccctccctctccaccgtggatcacctgtctcacccgtgtgagtctccacacagaaaccagtcatggccctgcctttgccccccttgaaatcacccaagaggatgcttcaaactcaggcaagcacaactgatactcactctgcatgcgacagcaggggagtgaccttacgagaaactaatgggcctcgcttcctgagaatcactgtcagagcccgtaacataagataaatcacagccaaggatttttgaaaagtttcctgatgagagaaccatgaccttttcaagggtagtgatggattgatcagggcaagcaataggtagattttttaaaacaagcctggcgaaaaaaacaatgatatatatctaccaaagttggctggaatacccggctggtgtcccagtcaggaaacacaggaaaaggttacatctgtagaaagaaaaacagcttgttaagcaaaacaatgcagttaaaaaccaagctcactgtaagaaatgccgcgtgggccagtggggacggccatgccgaaagcgctcagtgctcctgaagctgggtggccaggtgttttcacacaaaaaggccttccctgctcgggccatgggataagcctttgagtggagacctaggaaggagctgaagtctgcgttgggggtggaaggtggcaatcccattagacagctctccctcgtgtgaatttatgaagccccacgcagactgtgacttttaaaataatcacttagttggttttagcacatgkcgcagatttcattacaggccgccccttaacgagcattgtaacctggaggaaagaatccaaattctttagtcaccacctaactccacattcattaccttgttgccca

SEQ ID NO: 552183 - DNA, 543 bp, Homo sapiens
taatatttttgacacctgagaccaccacttcagctgttggtatgagtttgccattggtgggtctattttgtgtaacagcagcagctaacatttctgaccacttccctgcgccaggtattgtgagagcttctcctcatggactgcccccagcctggcctaggacgactgctcctgtctctatcagaggagaacggcccagggcaccagcatgcaagcctgactctgcgttcatattcactcggacagagcgatttgcatttgtttataaaataggggtgcattttccttgagactaagagatgccttaaagggtttcttttgattcctaatgacacgggctgaattgtgtccccaaaaattcatgtgttgaagccctaacccccaggacctcagatgtgaccatatttggagataggctttttagagaggtaattaraagaaaatggggtcacatggctgggctctaatccaatctgacatgtttctgataatatgaaatttgcctataatcccagcactttgggaggcagaggagggtcgatc

SEQ ID NO: 552184 - DNA, 1749 bp, Homo sapiens
tattggcttttcatcttcttgctaattgactcatggttgcaaggtggctaccagaactctaacatcatgccctcacaccactgttccagttaagtgggaaggagattatcagaagaaacatgtttttttttcatctgggaagtaaatctgcactcacagacatctccctgtgtctggttagccacaactgttccacaagaatatgcccttgtgaatctctctctgtagggcatctgcaaaccaagaaatcagggattgggtcttattcactttggattcctcagactccagcagaacaataaaacaaagttttcctctggaaacagagtttggattcagctgccacacccaacaaaaggcaactggtatacctgggatcaagaccaggtcccaaccatctctctgtaattccagccctttctttccctctcaaataagtctgcagctcagtatccctcagcaatcctggcccactctatatataactagatgatgatagtaaaataactgtttatattttacataccactttgcaaggccttttgtttaaccctaacatctaccctgaaggtaaatagtatgatccctattttacagagaggaacagaggctcaaggagggtaagtgtagttgcccgagtccacgaagcttaaggcagcaggtataaggttgcatcgcaggccacctgactctacgtctgcttcagtcactctctgcttctcacaccctggggctgctctgagctagaaataagcaaaatattgggcaagactccatgaactccccgaccctcactaccccacaaggaataagctccttatcaccatccaagcccatatagaatgagcccagtgtctagactgcaagaaagaggcaagaaatagtctttctctctccactgtagaatgactgacacattgcaagagaaggtttcagggtttcatatagacccaatataaaggacccaacttcttttaaacatagagaaagtgtaagtgtttggtaaggataataaaattcaatgaatagtaactaaacatgcttattgagaacccaaaatgggttgactcccaaacaaaatgcaaaatcagacctcgctgtctaacagcaaactaagccatgtcaccaactactttatgaaataaatataaaaacagactcacacattattctgagataacagacacgggttctttttagatttaaatcatgtaccctattattaagagcattaatagaaatgttccctgaatgtttacaaggtgtttactcagtttctatactgaaagtcaggacatcttggtactgaaaatatttcatgcccaacagttatacaaaaccactatttcttcggtttatagcccctcttaatctctttgtggaaatctccagacctcaactacattccttgaaattttacagggcacaagaggaacagaaatcagctcaaaatgaatatgtgtattcagaaatgcattgagatttttccaacttttcaggtacctcatacaaattaatcttcttaagggccctggtggtctctgaatcactgcttcacttccccacttctcagcacccccgttgtattctcttggtaggaataactgccagatcattagggaagaaaaagtttattgagtcaagatctgggagggcccccacaaggtcaggagcaggtaccaccagttttacrtaatttttgcatctgcaccaatttgatttaaggttataagtggaatttattggtga

SEQ ID NO: 552185 - DNA, 667 bp, Homo sapiens
ttgtaggttctacaatagtgatgttatttacaggagtaactggagaagtcacaaatcttgtgacctctggccacatgactactgagcagcaagatatcataggaaagaaatctaggggacaatggctggatatcatttaactacacctacatcttagaagagttcaggcccytcccatcatcctaatcttgtggccattcctttatcttacaatggtggcttcagttctcagacagtggcctttcattagtcttacaaaggcagtttcagtccccaaataaggagggagtcagttttaggggggaactgttatcatccttgctttaaagtaaaaccagaaactaaattcctcccatagttattgtattagtccatttcatgctgctgataaagacatacccaagactgggcaatttacaaaagaaagaggtttaattggactcacagttccacagggctggggaggcctcacaatcatggcagaaggtaaggagggacaagtcacatcttatgtggatggcggcaggcaaagagagcttgtgcagggaaactctcccttaaaatactgtcagatctcgtgagattttatttgctatcacaagaacagcaggggaaagatctgcccccgtgattcaatcatctcacatcagaccctcccacaacacgt

SEQ ID NO: 552186 - DNA, 712 bp, Homo sapiens
caggagggtgagactcagagaggatgtgatgatgaaaacagagatgagacagaaaaagagaaaaagacggagggaaagagggaaagagagagataaacaaagacaaagagaggcagagacagacagatttgaagatgctatattgctggctttgaaggtagagaacagggtcataagatagtgactgcggggagctctgggagccagaaaaggtaagaaaatagactctgctagagactccagaagaaatgcaacactgccaatacttgaatttagtccagtgagattaactttaggcttctgatgttcaggaatgtagataatgtatagaaaatacatttgtattgttttaaatcaataaatttgtgacaatttgttactgcagcaatatgaaactaatgcagagttcaaagaaatttcaaagctttatatgaaatataaatctttcatatttttaaagaagttgcatatttagttacatatgtaccactgaatactgaatagtttaaaggaaatatttgtgtaacttcaaaccatatagaagactcccagtaatttaaagctcctcatatactccttaccaatcaaaatcccattaawctcttagaggtagctacaagtgaaatttacaatatggttgacctatgaacaatgttggggttaggggaaccactccccatacagccaaaaatcaaagtgtaacttttttttt

SEQ ID NO: 552187 - DNA, 594 bp, Homo sapiens
atcccagcatttagggaggccgagacaggcagatcacctgaggttgggagttcaagaccagcctgatcaacatggagaaaccccatctctgctgaaaacacaaaattagccggggtggtggcgtatgcctgtaattccagctactcgggaggctgaggcaggagaattgcttgagcccaggaggcggaggttgcggtgagccgagatcatgccatagcactccagcctgggcaacaagagtgaaactccctcttaaaaaaaaaaaaaaaaaaaraaaaaaaaaaaaagaaatgcaatagaaaggagcttgctactctacaaacaccagaatatacttctttggttttgttttgggtataaagtgtaaaatgacactattttatttatttttaaattttttgtagagacaaaatctcactaagttgcccaggctggtcttaaaactcctgagctcaagcgatcctcctgcctcagcctcccaaagtgctaggattataggcatgtgccactgtgcccagccagtgacgctattttaaatgccaagaagtaatcactcaatcactgacgaaggctgaccccttcctaagaatactg

SEQ ID NO: 552188 - DNA, 550 bp, Homo sapiens
gtcatgagttttgccatatgtatcatctggctttcagaggacctttcatggttgtcaggttaagttcctgatacagaagtggcatcagtgctggtgttaatggctgcagtaaagtcaaattcctagattttagtgctctgtggtagcagagagaatggtggtagtttattttttctttccttttttttttaaaaaaaaaaaaaaacctttttcatgttgaagttcacatgacctacaactawccattttaaagtgtaattcagtgtcattcagtacatccacaatgtgcaatcaccacctctgtctagttccaaaacatttttatcaccctaaaaggaaaccttgcacccattaaacagtggtagtttctctatcatgccacttttgtagcatgctttggggtcttattcctgggatctttctctacagtggtatgattatataagggtggaaatataaaagagtaagcctttagaaacagtttgtgtctaaattagctctcaggcatattgtcttcaaaggaatgttttaaaccagccaaagactaaca

SEQ ID NO: 552189 - DNA, 911 bp, Homo sapiens
ccttcggctggccatccgacttcaaaagaaggctattttatttcacacagagtttttaacctctagggggtcaactgggttccataatcccccttgtaacatttttaaagttctttaacatgaattctaatggggtgggttttgatgacttccctcccatttctcccagttacagtgcaacacattctctctctctctcttttgcttcagacggattagaccacacccctcgcaggagttttcaggcactgcttagctttgaagtgtttgttaatctcccacaattactaaattgtggggcacctccccaagccatatgcagatcacygctagtccctgttggtcccacaattcacttggagtgtacagtctatgctaagagacctgtgccccccacacatcactccccgcattgaatcctcctggaactgcctctttcataagcagtcacacacttcccagttgctttctggaccaactttgcaaaccactttcacatcctgggtcgggtggggtgtaagtttccccaactttgcgagccagtctcgcatcctgtgtcgagctactagttacaccctgggaagtggtcaggctccccttccatccttatgggatgggtcctgccttgggccccaaatcttaccatggtcctgaagcacactgtcccaagaatcgtcctacagccccttagatttcgttgcactatcagggaagggcactgagttgcaggacagccaatctcctctctgcgttgaagttcttctgatggcaccaggggtcatgggtctccccttgcctggggttcaagtcccacaggcaaaggagacagtaaacctgtcatctccaatcccacaggagcccccagaaaaatactgcaggaatcagaggactggagagaccaaacaggtgaa

SEQ ID NO: 552190 - DNA, 1041 bp, Homo sapiens
gtctgtgttctttccacgatgcttcacaacctagacatagtcacacatagatttttggctctttcatatttctcatccttgataactaacatgcagtcaaaacaaagtgaatgaggggggaaattatactcagaataaacattgtaattataaaagaaataaaaaggaaaagaagaaaacagtcaagctgtggcaaagcaaactccaaagcgaccaagaggcttataaacctctcrttttctttaaaggagctatatttcctccctctaaaaactctggctttggaacgaaggtgacatactgtgggaagaccaaggaaattaaacttttttcatcttattgattcctatttctttcattccatctgtttccttggcatggtgaagggggtgacgatcgacgcagagtaagctggctctgtcagtcagaagataggagctgacaaaccagacacgggcttgggaaggccttccatgaggggaagaatctgtgccagatgacaggactcacagagagtctgacaaaatgttgcagacaatcaggaagcatctgatccagatttcatagataataagcaggctctttcctgtgtgcatgcacatagatttgagtatttctgatcaagtgccccatttttacacagaacaggaagtacaacacagtaaaatatcaaatgaaaggggacaagaaggagggtataaaaaaggaaaaacaaacaactaaactggtagcacagaaaacttgaatattttgcatccatagagcatacaatatgatgacgtgatttacaaaaaaaaaggctttagaagttaataattctaatattatcaccagggtgcaaatacattggaatttcacaaaaacaatttgctataggttagagccttcttaaaaatcatacagcactcagctgctcttctatcatacaaaggatattttgtgatttctattaggtcgtatccaacgtaaactctaaaatagccctaaaaactgctggttgcatcagaaagaatctgaagtagatcactagacagtcttgtg

SEQ ID NO: 552191 - DNA, 548 bp, Homo sapiens
gatgcctatatagaagcacatagtcttaaaggtactcaaagggcctaaaagggtcaatctatttgcaaatgctaacattgtaggtaaaagatgaaaatgccaagccacatcagggcacatcaacatccacagttttaggctgaattgagatcagtaggtgattcccacagtttggtaccaatcagccataccagcctggggagcaytctcagccaaccctgcctaccaccaacacttccccataaaaaaccaacttccggagcagcttctggaggtagatttacccaggtgtgaacgaacgttccctttcacatctctagcagtcagcactgatttggattctgttcttggtccagtccaagtccccagggtcttctgtgagaagagtcaatactgcaggcttaaaaggcctggctgggcaggcatccatcatctctcatcttcacacagccctgtgaggtaggcattattgtcttcattttacacataaagagatgggctcagcaggtcagactttctgccacaccagttagcagccagaatgaacg

SEQ ID NO: 552192 - DNA, 1417 bp, Homo sapiens
ataaaccaggcatagaggctagttaggaggctgggctctggagctgggcagacctggctttgcctcttagaggcaaatcagcttgccccacttctttcatctctctcagtctcagtttcctcatctgtaaagtggtaaactcagtggtatcctctcacagggttaatgctcgatagttgttggctattatgatccacgtatgagatgagtctgatgtctctgtgcacgttagagaaacccattccccgaacacttgcatcagccgtaggataccatgcagggcacatttttcttttcagtgggcctctaattaccagctaattagaaaatccccccaaaatatcctgtatatttcatactgtctattaatcaataatgaaatcaggtttaaacctacagcagtatcagtatttttttagcctttcttcatttggttatcatatttcttccccaattgcttaacatcacagatggtgcgacagataacttctgtgccctccaagtaactttggagctaaacacattaactggcatttgtcatgtggtgggggaggggtgggaacaaagtgtttaaaattaatcaaaataaagatggaatattaattcacgaccgaggagttacaatactaatgaagctctgactcgaatgagttcttatttatttatatttatttatttgagacagggtctcgatctgtcacccaggctgtgcaccatcatggctcatggcagcctcgacctcccaggctcaactgatccttccgcctcagtgtcctgagtaactgggactacaggcatgtgccacaatacctggctagtttttctttcttttttttttttttttttggagagatagggtttcagcatgttgcccaagctcgtctggaactcctgggctgaaccaatctgcccactttagcctcccaaagtgctgggattacagccatgagccactgtgcccagccaaatttttacttttatttaatttatttatgtatattttagaagtgggaatcttgctgtttccaggctagagtgcactgactattcacaggtgtgatcatagagcactacagcctcaaactcctgacctcaagggatcctcctgcctyggcctcccaagcaactgggactacaggtttgtgccaccacgcttggctttaaattaatatttatttatttagtggggtttttgtttgtttttgtttctgccaagtgcacagtatgataagcgaatttttagaggatttgttctaggcctgatgcagtggctcacacctataatcccagcactttgggaggctgaggccagaggatcagttgagcccaggagtttgagaccagcctgggtaacatgttgggatctgcctctctgtataagaatcttttctataaagaaatgtaacacgtgatgacc

SEQ ID NO: 552193 - DNA, 538 bp, Homo sapiens
  misc_feature 106: n = A,T,C or G
tgactcattaaaaaagaagaaaaaactaatgaggcaggaatggaaataattccaggagcaaagtcctttaggaggagtggggaacaggatccagtacaaagtgggngggttggcctaagaagccagggaaagccgagtgcatggagacagatgtctgtgcctgctgcattttgtagaatgatccattctgatttctcctgtatcaaaattgaagccttcaggtgagagtgagaagcagagaggaaatgttgaggtttgaataagagaagaatacggaacggtcrtctaggaggatgggcaagcaaggagaccagaactggcaggcagcgcaagggctgctgaacagcccgatgcagtgaagtggctgaaataggaacatcaggtgtctctggtgattatttcttttttgtagttttctgattttccagatgttccctaataggcattatcttacttccacagttatccttttttagactgttacagaggggtgaaaaatagaacatataatgtatgagagaggacttaggatttgggg

SEQ ID NO: 552194 - DNA, 609 bp, Homo sapiens
tgtaatcccaacactttgggaggctgaggtgggtggatcatgaggtcaggagtttgagaccagcctggccaacataatgaaaccccgtctctactaaaaatacaaaatttagctgggtgtggttgtgcacacctataatcccagctactcgggaggctgaggcaggagaatcgcttgaacccsggaggtggaggttgcagtgagccgggatcatgccacagcacttcagcctgggcgacaaagccagactgtgtctcaaaaataaataaataaataaataagttcctctgagttatttaccatctttctgttgaaatctttattgaaattataaatctcagctttcagaacaagatgtggtaattaaatcctatgactgttaaaacacacagagctcagctgtgtggacgcagagtaactgcgtggggtgtgaggtagggtgtgtgtttagaactctgcaagttgaagatttcagagacaagggcagctgcagaagtcctgagttttacactaggacaaaagagaatagatttttctcttatggtggaaagaatatttaacccagcaatatgtatttagatgatgtcatactttcttcttgaaatatac

SEQ ID NO: 552195 - DNA, 609 bp, Homo sapiens
tgtaatcccaacactttgggaggctgaggtgggtggatcatgaggtcaggagtttgagaccagcctggccaacataatgaaaccccgtctctactaaaaatacaaaatttagctgggtgtggttgtgcacacctataatcccagctactcgggaggctgaggcaggagaatcgcttgaacccgggaggtggaggttgcagtgagccgggatcatgccacagcacttcagcctgggcgacaaagccagactgtgtctcaaaaataaataaataaataaataagttcctctgagttatttaccatctttctgttgaaatctttattgaaattataaatctcagctttcagaacaagatgtggtaattaaatcctatgactgttaaaacacacrgagctcagctgtgtggacgcagagtaactgcgtggggtgtgaggtagggtgtgtgtttagaactctgcaagttgaagatttcagagacaagggcagctgcagaagtcctgagttttacactaggacaaaagagaatagatttttctcttatggtggaaagaatatttaacccagcaatatgtatttagatgatgtcatactttcttcttgaaatatac

SEQ ID NO: 552196 - DNA, 609 bp, Homo sapiens
tgtaatcccaacactttgggaggctgaggtgggtggatcatgaggtcaggagtttgagaccagcctggccaacataatgaaaccccgtctctactaaaaatacaaaatttagctgggtgtggttgtgcacacctataatcccagctactcgggaggctgaggcaggagaatcgcttgaacccgggaggtggaggttgcagtgagccgggatcatgccacagcacttcagcctgggcgacaaagccagactgtgtctcaaaaataaataaataaataaataagttcctctgagttatttaccatctttctgttgaaatctttattgaaattataaatctcagctttcagaacaagatgtggtaattaaatcctatgactgttaaaacacacagagctcagctgtgtggacgcagagtaactgcgtggggtgtgaggtagggtgtgtgtttagaactctgcaagttgaagatttcagagacaagggcagctgcagaagtcctgagttttacactaggacaaaagagaatagatttttctcttatggtggaaagaayatttaacccagcaatatgtatttagatgatgtcatactttcttcttgaaatatac

SEQ ID NO: 552197 - DNA, 668 bp, Homo sapiens
agaattgtgagtagtgttaaaaactctaagaaattctgaagtaaaatgtctggaagacttttattatggtacatgtattgatgtgcttgagatcaccagtttagaaaaactgtccagtgcaagacaatgaaagaaactaggacattaggagtaggaagagaaagaagatatgacaacaggtgatattgtgaaagccaaatagataggttttagctattgattcaagtggaagataaaggaaagaaggagtcagaggcaaattgatatccctagcagaagccttcctaacagcacctctttcagagttattggtatcttgtcaactttcttagtttgctctatagtccttgaaacttgctcagtctttgtagaagtaagggtaagaaatatattctgtgttttcttcctgatgcaaaacacagaacagctatttccttagactattttaacagaaaattagataactcttaaatatagtaagaccaattatgtttacttgcaaaataaactatacattgggttattatttttcaagctgctactaatatataaatatatwattaatatatatttatatattatatataaatatataattaataatatacttatatattatatattttatatacattatacaatatatatttatataattaatcctaata

SEQ ID NO: 552198 - DNA, 562 bp, Homo sapiens
tgtattttactgctcatattttcttaaaagcttttgaaaaaatctagttcataaagtgaatgttggttccaagagatgtgtctatatatagttctatgagatataggagtttctgaatgggtatgctgtttcacaaagagaaagtgtcaggcttagtaacccctgaatggttttaaaagcgactaaaaaaataggaaacaatgttgggatggtgctgttccaaaataaaaagccatttcacatattctctaaatgatttgtgaagttacagcatcaccataaatgtctaaaacgtctagaagaawactgatgtgttggggctttagcaaagtataaataaagagcaggagcaggaagatttttttttctccccaaagtcttgctttgttgtccaggctggagtgcagtggcacaatcttggctcactgcaacctctgcctcctgggttcaagcgattctcctgcctcagcctcccgagtagttggaactacaggtgtgtgccaccacgcctggctctttttttttctttaatagagacaagctttcaccgggttggccaggc

SEQ ID NO: 552199 - DNA, 937 bp, Homo sapiens
gatggtaactattagtatagttgagacagataattctttttgattgaatgactataacaaaacaatgactgaataacacattagtgtcaacatagagaaagaactgtaataaatgccgagaacatgtattaggataagctatcaagaatgtgagggccatctggctgcaacatctttcaccccattgatcatcagggttgatttggctgatgtggctggctaggggggtgtccccttccctcctcaccgctccatgtgcgttgctctggaagctgtgtcctgggtctaagaggacaaccatctctagcagaagagggcrggtcttccctcaagaatataggagtagctgtgcttccctgctaggacctccaaacaagctctcaaggacaggctatcaaacaatcccatgtggtaaaaacaataaataatggctctcctggaacgttttccttcaaattatgaattcatggatccatcttcctcccgttttctgattctctcatttcagagttattttctccctgcaagtaaattggggacagggtgaagatcttcatgctagatgtttctgcccagcactgaaatatatcatatggtatttttgcccatatgccactgaccaaaacttagtcccttgccctaccaagatattagaggggttggttatgtagttgtcctgtatgccaggaggaaaataaaataacttggtcaacacatagcaatgtatctgccataaatattataaatactttgtataagagcatcaggaccaaacaggctaaaaccatgattcatatctaacaagctgatataggttaaaaaaatttttacaaatcaacttaaatcaaaactgtaagataagagagatttatctaaacatcagcaaattaaaacataggtcaaaaataaataaatgtgaaggacattaattaaagta

SEQ ID NO: 552200 - DNA, 1275 bp, Homo sapiens
tgagaggctcaaaatcagggaagctgacagtgcagccttcagtctgtgaccaaaagcctgaaagaccccagcaaaccattggtgaaagtttcaaaggccaayggccaaagaacctggattctgatgtccaggggcaggaggagcagaaggaagcatccatcatgggaataataaggaagccagaagcctcagcaagcaaacttattccaccttcttccacctgctttgttctagccatgatgacaggcagtaggatggtgcccaaccatattgaggttgaatcttcctatctcagtacactgactcaaatgtcaatctcttctggcaacacctacaccctcacagacacacccagaaacaacacttcaccagccatctaggcatccttcaatccaatcaagttgacacctaatattaaccatcccaattacttaacttcctcatctgtagaatgtaaaatattttaggttaaaattttcacaggactgttatgaaaactaaactaggtaatacacagaaaaaatgttaatacagtgcttgatacttggtagaaactcaaaatgggcatttattaaaagtaaaagtttacaatttttgtgtacatgctttgaaacagataattttttaaaaaatacaaacacacttgagcatgccacttcctcctttaaaactctccaaagttcctattgctctcaaaataaaccttcacaatggcctatcaagttctgcaatgacatggtctttgtgacttggtctctccccacactcctcccctggatgtgggctttctttaagtctcttaaagactgtgcttctcaccacggctctttgcaggagctcatctctctaccttgctctcttctgtaacatttatcttatatgatctcatttgtttttgctacagctctagtatatacatattattaatttcagtttatggaagagactagaagttgagttgttcttctaagaatatatacaattaaaaagagtgacctaagattggaatcctggggctgtctgattctatgccccattctctttcctaatcagattgcttctctaaatatgaacctgcaaacgtacttgttttctctattgacttttgagggaaatatttagggcagcattaacgagtatctacatttaaaatctataaatgtgatttgcgtcttctatctctagttcccctattggtacccaccccgatagaaataaattaaaccagtctggataaaataagggcctttttagctaccatccaaaatctaatta

SEQ ID NO: 552201 - DNA, 1308 bp, Homo sapiens
gcatatctatatgaaggtccaactttgattctgctttgttttggctttcttttttgtattacttttctccaaagagtaaaatacacacttgttttattctcttattcctacagcacctaacataattcttactaaaaaatattatttaatgaagaaaattattatataatacattttgttgatacattattttctacatattatgtgtcaattttgttccttactatcctcagctggaatccatttgaagagacagaactgtattgtgtagattcaagcaatacatagtaggataccatacatactgtagggtttggctctgtgtccccacccaaatatcaccttgaattgtaatctccataatcctcatgtgtcaagagcaggaccagatggaagtaagtagatcatgaaggtggtttcccccatgctgttctcattatagtgagcgagttatcttgagatttgatggttttataagcatctgacatttcccctggttgcactcattgagtcttgccaccctgtgaagaaggtacctgcttctcttgcattctgccatgattgtaagttttctgaggcctccccagaactgtgagtcaattaaacctattttctttatagattactcagtctccagtcttgcgtatgtcttcatggcagtgtgagaatgaactaatactcatataatggatactaacaagtaaatctttatttaccacttattagaagcttgacttaaccaattatcaaattttatataagctttaatgttattgggaaatatccttttcctgtaaaaataaatgagattacctacctgaagtaccttaggcctttctaatattttcaattttcattaaatgtttatttttatgtatctatagatatcttgaatatgtattgtaaatattatatgtatgtagaatatatgtattctagtatttcttccagatagcacttaaaaaccagtgtttgcatttttgcatgtgagyaagcaattcctacttacaatgatggaagaaatagataccctggaagaaggaaaattaaattcatgctttcaaagcatccttcccaacaaatccaattcatcttttgcacagaaggaataattagatgaagatatattttaagtcagattgttagtattttggccacatggctacatcataagtgtagtttaaaattctgttcatttttatttttttaaatcaaaacactcattgaactgtacttaatttttaaatgcaaaatacataaaactcttgcatttcttggaaataaattctctttattctactaataaat

SEQ ID NO: 552202 - DNA, 1308 bp, Homo sapiens
gcatatctatatgaaggtccaactttgattctgctttgttttggctttcttttttgtattacttttctccaaagagtaaaatacacacttgttttattctcttattcctacagcacctaacataattcttactaaaaaatattatttaatgaagaaaattattatataatacattttgttgatacattattttctacatattatgtgtcaattttgttccttactatcctcagctggaatccatttgaagagacagaactgtattgtgtagattcaagcaatacatagtaggataccatacatactgtagggtttggctctgtgtccccacccaaatatcaccttgaattgtaatctccataatcctcatgtgtcaagagcaggaccagatggaagtaagtagatcatgaaggtggtttcccccatgctgttctcattatagtgagcgagttatcttgagatttgatggttttataagcatctgacatttcccctggttgcactcattgagtcttgccaccctgtgaagaaggtacctgcttctcttgcattctgccatgattgtaagttttctgaggcctccccagaactgtgagtcaattaaacctattttctttatagattactcagtctccagtcttgcgtatgtcttcatggcagtgtgagaatgaactaatactcatataatggatactaacaagtaaatctttatttaccacttattagaagcttgacttaaccaattatcaaattttatataagctttaatgttattgggaaatatccttttcctgtaaaaataaatgagattacctacctgaagtaccttaggcctttctaatattttcaattttcattaaatgtttatttttatgtatctatagatatcttgaatatgtattgtaaatattatatgtatgtagaatatatgtattctagtatttcttccagatagcacttaaaaaccagtgtttgcatttttgcatgtgagtaagcaattcctacttacaatgatggaagaaatagataccctggaagaaggaaaattaaattcatgctttcaaagcatccttcccaacaaatccaattcatcttttgcacagaaggaataattagatgaagatatattttaagtcagattgttagtatyttggccacatggctacatcataagtgtagtttaaaattctgttcatttttatttttttaaatcaaaacactcattgaactgtacttaatttttaaatgcaaaatacataaaactcttgcatttcttggaaataaattctctttattctactaataaat

SEQ ID NO: 552203 - DNA, 1308 bp, Homo sapiens
gcatatctatatgaaggtccaactttgattctgctttgttttggctttcttttttgtattacttttctccaaagagtaaaatacacacttgttttattctcttattcctacagcacctaacataattcttactaaaaaatattatttaatgaagaaaattattatataatacattttgttgatacattattttctacatattatgtgtcaattttgttccttactatcctcagctggaatccatttgaagagacagaactgtattgtgtagattcaagcaatacatagtaggataccatacatactgtagggtttggctctgtgtccccacccaaatatcaccttgaattgtaatctccataatcctcatgtgtcaagagcaggaccagatggaagtaagtagatcatgaaggtggtttcccccatgctgttctcattatagtgagcgagttatcttgagatttgatggttttataagcatctgacatttcccctggttgcactcattgagtcttgccaccctgtgaagaaggtacctgcttctcttgcattctgccatgattgtaagttttctgaggcctccccagaactgtgagtcaattaaacctattttctttatagattactcagtctccagtcttgcgtatgtcttcatggcagtgtgagaatgaactaatactcatataatggatactaacaagtaaatctttatttaccacttattagaagcttgacttaaccaattatcaaattttatataagctttaatgttattgggaaatatccttttcctgtaaaaataaatgagattacctacctgaagtaccttaggcctttctaatattttcaattttcattaaatgtttatttttatgtatctatagatatcttgaatatgtattgtaaatattatatgtatgtagaatatatgtattctagtatttcttccagatagcacttaaaaaccagtgtttgcatttttgcatgtgagtaagcaattcctacttacaatgatggaagaaatagataccctggaagaaggaaaattaaattcatgctttcaaagcatccttcccaacaaatccaattcatcttttgcacagaaggaataattagatgaagatatattttaagtcagattgttagtattttggccacatggctacatcataagtgtagtttaraattctgttcatttttatttttttaaatcaaaacactcattgaactgtacttaatttttaaatgcaaaatacataaaactcttgcatttcttggaaataaattctctttattctactaataaat

SEQ ID NO: 552204 - DNA, 554 bp, Homo sapiens
tggtggagttagctctcagtccctgctggcccccaaaaggtactacttcagagagggagttctggctccatgacttctgaagcttggtattccagtggcccatctcctgacatcactcacttcctaacctaatggtgaggttttcggttaggtcactggtttttgcaagtgcttttcactgaaagcaatttggggtctgcgggggatatggacttttttggagaatccttaggggtttggatgatttttgtcaaacatcccattcctgagtgacctcatacaattccagagtcttagatctcagaggtgggaaggactttaggactcatgggaccgtatcttccactcggtgcagaattccctccataacattccaacgatgcatcattccgcctctgctggacgtttttaawaaaagagggtccgtgcctgtcaagacagcctccctgctgtgggtctcctgtaagcctctctgatactgttgccacctcagctccatcaaccacatgacatccttcaggaatggactgcagcccttgtgactttccagagct

SEQ ID NO: 552205 - DNA, 1380 bp, Homo sapiens
aacccaagcctgcccactctgatgcctaagatctgcatcacctggctatattaaaacagagctgatttactgctccgtgacaaggcaagctggatggcagccaggytcaggagctagaattggccactatggaaaaagaatgcagctgaaggagctggaagtccagtctggcaagtgtaacctgacactcaaggccacagcagtagatggtaggtggtgtcccaacagacacgtggatagtgggatggagaacccagaacaatgggccagagggcagcatccggaaatcctgcccagcagccacaccgctgttggagacagaatcccagtccctaaaagaggtactgacaagagcaggggagcgcctggggtctagagacacagggaggccactaaggagggaaggacttagagccagggaacaatgtagggatccagagagcagaaccaggaaaccagatagaattgttcttggcagtaaatccaaagttgtcagaactagggcatgaatactgggcttgacgacttaacgctcccagagaattgggcagcagctcctgagattccccagggactccttggaagcgaacattactcattcattccttcagcaagtactgaacacctgttacgtgcctggccaatgcaaagccctagagatagagtgctgagcaagaaagacacagtcactgacccccgtgaatgcaaaggcaatgtttctcaaactggagtctgaggatccccagaggtacctgtaaaactgaagattcccaggccccggaagaggctgggagcaggaatctgtgtgggccttgagcaagtcttctaactgctcagtgcctccgtttctccatttgtaaatgggactaggaacacgaatgacccacaagttgctgtattaagtgagtgcactcagcacagggtaggggcttgacacaagccaggatcatcatgatcttcatcattttaattttctacatcatcatggaggaataggggttcattttaacaagacccctcgtcatttgtgtgcactaaattttgagaatcactagataattttcagctctgcaggcagttcctgcttccatcacatggggcctagccaacaacttagaattgagacaaacaagtatctgtaccttgggttgcccaggagaaaacaaggccacccagaccccaattctgaacccctatgtcttgtcctctctactgtgaacccagacacagtggcaggaaacaaggaggctgtcgccaccaagcttcacactatgtagtcatgaagacaggaagtgccttgttcacagcccgtgtctgtccacacagggatgatgacaacagaatcagcccaagagggtaccaaagacattgttgggacct

SEQ ID NO: 552206 - DNA, 1588 bp, Homo sapiens
ggaggctgcagtgagttgtgatcatacaactgcactccagcctgggcaacagaatgagaccctgtctccaaaaaaaaaagcaaaaaaatggatatagagaaaatatgtatcccttgcaatggccttaggctcaacaggcagagtcagttgatatctacagagtgaccctgaggcccttctcagccagctacatgcataattgatatgtttattcctgccatatttttgttgttgcctttgatggcttctgaagctcctcctgggtcttggacaaggcaggttggaaacccaggagggccttccctgagaggccaagtcaaagggtctgtagtggatatgctttcaaatttaaaacttacatcctcttttattaatagtgtatttgtttctyaagtcatgtatccagtttaggttatgtctttggaagaatagctaaagttttttctctaacatttgattatgaaaatttccaaacttttcaaaaaattttaagaattttatagcaaacccctgtgtactcacttcttccgagaacatactgccagcattgcttcctgacatatttgtccatctgtgcattcttgtgtctgttaggttggtttgaaggtaattgcagtttttgccattgaaagtaatggctaaaggctgggcacagtggctcacgcctgtaatcccagcactttgggaggctgaagcaggcggctcacttgagctcaggagttgaagaccagcctggctaaaatggtaaaacccctgtctctaccaaacgtacagaaattagctggacgtggtggtgcacacctgtaatcccagttacttcagaggctgaggcaggtgaatcgttcaaacccgggaggtagaggtggaggttgcagggagccgagatcacgccactgccctccagcctgggcgacagagtgagatcccatctaaaaaaaaaaaaattagctgggcatagtggcatatgactgtaatcccagttactcgagaggctgaggcacgagagaggcgcttgaacccaggaggcagaggatgcagtgagctgagattgtgccactgcactccagcctgggcaacagtgaaactgtctcaaaaaaaaaaaaaaaaaaagagaacgaaagtaatggctaatatcaatctgtcttatttgtgatgcaatttcaaaggaaatcaaagatgtcaattcactccccttaaatatttgaataaccagagtctttgcttgtgtgtccccctgccacattcctgggtatctggactcctctcccatttggcagatcctcataagcccacctgtgcctggcactgtgctgggtgccagaggtgccacaagcactgcctgcggggcccttgggtcagtgggggattcaagtgggaagtggaaggggtgcttcaatggagaacacaggagataccgtgcccggaggctggggccgggagaccgtcctgtgcctggaataccctcctcttccttccctcttcaactccatcaatttgagtttttaaccagtcacctccaaattccatcaaggaggggaaaggggatgaggtgcagggtggcccaagattgcatcatgcagcccaggca

SEQ ID NO: 552207 - DNA, 553 bp, Homo sapiens
ctttagttcataaaggctgcagaatgtarcagtgattcatacattttagtatacaacagaatcacttgaatgggtgacaagtgtgttttaagatgcagatttctggaactcttttctcagagattctgattgattaagtcttgaatggagctgataaatctgcattttaacccacttgctggatgattctgacatgggcagtccaagaagcataattcgagagacacttaacttgaccaattgaagttaagtgcccttgaatataccattgtctatattagtctcttctatgaactcccttcttgtattttggaaaacattgtgcatcaggccaactaatagtgcctaaaaattaatttagagtcaaaaggaggagctgtgtgaagatggcattttccccaacatcagaaatttttcatgactctggatccttacagcaaccagtcaggtggctagtggtttcgtttgtccatgtcttgcctttgaggagacagagaggagccaagactttctgaaaattactcttctacattattttttccagatttatctg

SEQ ID NO: 552208 - DNA, 553 bp, Homo sapiens
ctttagttcataaaggctgcagaatgtagmagtgattcatacattttagtatacaacagaatcacttgaatgggtgacaagtgtgttttaagatgcagatttctggaactcttttctcagagattctgattgattaagtcttgaatggagctgataaatctgcattttaacccacttgctggatgattctgacatgggcagtccaagaagcataattcgagagacacttaacttgaccaattgaagttaagtgcccttgaatataccattgtctatattagtctcttctatgaactcccttcttgtattttggaaaacattgtgcatcaggccaactaatagtgcctaaaaattaatttagagtcaaaaggaggagctgtgtgaagatggcattttccccaacatcagaaatttttcatgactctggatccttacagcaaccagtcaggtggctagtggtttcgtttgtccatgtcttgcctttgaggagacagagaggagccaagactttctgaaaattactcttctacattattttttccagatttatctg

SEQ ID NO: 552209 - DNA, 553 bp, Homo sapiens
ctttagttcataaaggctgcagaatgtagcwgtgattcatacattttagtatacaacagaatcacttgaatgggtgacaagtgtgttttaagatgcagatttctggaactcttttctcagagattctgattgattaagtcttgaatggagctgataaatctgcattttaacccacttgctggatgattctgacatgggcagtccaagaagcataattcgagagacacttaacttgaccaattgaagttaagtgcccttgaatataccattgtctatattagtctcttctatgaactcccttcttgtattttggaaaacattgtgcatcaggccaactaatagtgcctaaaaattaatttagagtcaaaaggaggagctgtgtgaagatggcattttccccaacatcagaaatttttcatgactctggatccttacagcaaccagtcaggtggctagtggtttcgtttgtccatgtcttgcctttgaggagacagagaggagccaagactttctgaaaattactcttctacattattttttccagatttatctg

SEQ ID NO: 552210 - DNA, 553 bp, Homo sapiens
ctttagttcataaaggctgcagaatgtagcagtgattcatacattttagtatacaacagaatcacttgaatgggtgacaagtgtgttttaagatgcagatttctggaactcttttctcagagattctgattgattaagtmttgaatggagctgataaatctgcattttaacccacttgctggatgattctgacatgggcagtccaagaagcataattcgagagacacttaacttgaccaattgaagttaagtgcccttgaatataccattgtctatattagtctcttctatgaactcccttcttgtattttggaaaacattgtgcatcaggccaactaatagtgcctaaaaattaatttagagtcaaaaggaggagctgtgtgaagatggcattttccccaacatcagaaatttttcatgactctggatccttacagcaaccagtcaggtggctagtggtttcgtttgtccatgtcttgcctttgaggagacagagaggagccaagactttctgaaaattactcttctacattattttttccagatttatctg

SEQ ID NO: 552211 - DNA, 1614 bp, Homo sapiens
gaaaggttggtcagcatttgcatatttcagagttttgaaatccttcataattttgaagcgattttccattattctcacaactacacaccaaaaagttgaaactagagaattttgatgactcattccaaaactcacaataaaccaataaaaaccaacgtaagtattgttgactctttaacctggtggacacatgtaaaaagttacttcacatggcatggatagaagacactcattaatcaaattcttcttgctcccagagcaaggcagagcctcattacccacttccctacaatctcataaagcgtcccacattatctccttcagaggatgagggttagatttggcttcctttggaattttcaaagttattattcttccaccaggtcatgaatttctgaaactagcataagataatcagaggacaaaatttctcacctggcaagacttcataaatatcttcttcttctttctcctctgtaggctcttttatccccacactcccaggcaagatagtgggtctgcactgggaaccacaacttggggagtcaaaaccatcaatatcatcatatgtctcttctttttcttcttcctcctcatcctcttcatatggaatggttaaggagctcagatctaacaaggcaaagatgagaatgaatcaagaaacagagaaaaagaaaataagacaggaaaggaaagagggagaaggaggaggagggatgagagtaaaatatgtcaaatgaaaatgaaacattaggttaaatgctattatttctaatgtgggctttggtggcagraaatctacagaaaaggccagaatagcactgcatcaggtttaaaccatcaacataaatccttccttgcaataaaacttgatcagagtgaagcagcctgaaaagtatgggtgtgtgaatgagaacatgaggcaaagggaagaaaataggccagaagaggaaaagccagtgtgctgtacacagcttatcacgtagaaaactggaagggtgagtgaaggcttgcagtcctccagggtactcaggccatgggagctaaggtggcctctgtagggtgctggagctgtcagaagcttatctccccagtgatttcactgcagaatttcagacaagtttgttcgcagagaaaaaaatgggcaacagtggaagataaaaagaaacggggtatggaaaaatataacagtaatacaagaccaaatggaatggctgaacaatgcagttaccatgtccttttgcaactgcacagtctagctgaccttaaagtgggtcactgcatagaaggtgttgagccattacagcactggggagcaccagggcaggggagggagattggttttttattttaatggggaactgggaatgttcattctctgatgtgtactacagagtgctctctgaaaccctgctgagggccctctgcaggatgggtgagtgcagtcagcatactctggggaaggaaaggatggagagacgtccaactttcatttcaaaatgcaataaaattgtttggcttgattagccttttaataaagattttgcaacaattttcatctgaattttggtgccaccacatacgaggaaaagatcaaaaacacatttgtggctt

SEQ ID NO: 552212 - DNA, 541 bp, Homo sapiens
tgtctggagcatcctgctccaagaacaaagtgggcaggaccaactttctttcattcaccatgaccgctgggttagtttcacttcatagcataattaagtatatcagacactttttaaaatgtcccaaagatctctgaggctctatttatttttcctatttttttttatttttttcagattggatattttgttttaaackgtcttcaaatttcctgacttttaccatttcccatctgctgttaaaccccttaaattgttattttaattttctgttctgcaattccattttgaatttcatttgtttcattgttatgctgaaatccctgacctatatgataaaattatattacatttaatttgatatttattaattttttaaatacataaataatagttgctttaaagctttttctgctaaatgcaatgttgtttcttacatgatttgataatttgattaaatattagaaactataaatattacacacattctggattgtattattgtccttgattagcactgtgacttgtttgttctagtgaa

SEQ ID NO: 552213 - DNA, 541 bp, Homo sapiens
tgtctggagcatcctgctccaagaacaaagtgggcaggaccaactttctttcattcaccatgaccgctgggttagtttcacttcatagcataattaagtatatcagacactttttaaaatgtcccaaagatctctgaggctctatttatttttcctatttttttttatttttttcagattggatattttgttttaaactgtcttcaaatttcctgacttttaccatttcccatctgctgttaaaccccttaaattgttattttaattttctgttctgcaattccattttgaatttcatttgtttcattgttatgctgaaatccctgacctatatgataaaattatattacatttaatttgatatttattaattttttaaatayataaataatagttgctttaaagctttttctgctaaatgcaatgttgtttcttacatgatttgataatttgattaaatattagaaactataaatattacacacattctggattgtattattgtccttgattagcactgtgacttgtttgttctagtgaa

SEQ ID NO: 552214 - DNA, 524 bp, Homo sapiens
aacacaggtgatagcgtttggctgtgtccccacccaaacctcatcttgaattgtaggtttcataattcccacatgttgtgggagggacccagtgggagataattgaatcattggcgtggtttcatcaatactattctcatggtagtaaataagtctcatgagaactggtggtcttataaggagaaatcccttttgcttggctctctcattctctcttgccactgccctgtaagaagtgcctttcacctttgcaatgatagtgaggcctccccagccacatggaactatgagtccattaaacctatttttttaaattaattacccattttggggtatgtctytatgagcagcatgaaaacagactaatataagggataatgtaaatctattatttctacccatttcaatgaatcttgttcagacttcacccttttcttgttccatcgtcgtctccttcctgcaacccagggtttatttcctatgaagtagcaagagtgattcaaaccctgaaatgacttcccatc

SEQ ID NO: 552215 - DNA, 576 bp, Homo sapiens
taggactttttttttcctcctgtgtccaccttccatattgaagagtgacttctttacttactggtgtagacagtttgcatatctctaataacttccttcaacctcaacaacctcttcatgattattttgtgctgggagcaagaacaccagaaaatgaacaagtttataaaaaattatggacgaataagaggcaataactttatctgagggtccaagagattctcttatgagaaacgtgcatgtgccaaaggacatagacayagtgacatctattttgggtgctcaggagacacttggcttgtgtccaagttcttagttgtgttctgtagtagaggttgccatggaagtagttctggaataagtaatgtgttactgcatcttatacagaaagtgtggtttgttctttttataaagttactggaggtgtgtgtcaaggaatcagtgactaaacaaatcccaagaggcatacctaatattaatcaagcactaagtgttttattttagtcccattcacaatcacgctgttcacatgcatgtctagctgggaaacagcataataatgctttgtaggaaaga

SEQ ID NO: 552216 - DNA, 576 bp, Homo sapiens
taggactttttttttcctcctgtgtccaccttccatattgaagagtgacttctttacttactggtgtagacagtttgcatatctctaataacttccttcaacctcaacaacctcttcatgattattttgtgctgggagcaagaacaccagaaaatgaacaagtttataaaaaattatggacgaataagaggcaataactttatctgagggtccaagagattctcttatgagaaacgtgcatgtgccaaaggacatagacacrgtgacatctattttgggtgctcaggagacacttggcttgtgtccaagttcttagttgtgttctgtagtagaggttgccatggaagtagttctggaataagtaatgtgttactgcatcttatacagaaagtgtggtttgttctttttataaagttactggaggtgtgtgtcaaggaatcagtgactaaacaaatcccaagaggcatacctaatattaatcaagcactaagtgttttattttagtcccattcacaatcacgctgttcacatgcatgtctagctgggaaacagcataataatgctttgtaggaaaga

SEQ ID NO: 552217 - DNA, 607 bp, Homo sapiens
taaatacttgatcatttaactttatttggaatcacattgtgaagacttttgtattagaagctcatttttctttaatttttaaaaaaatacaagtttcacctagtcactgtagaaatttttcctaagtgttaaagcatcagatggtgtatatgacaaacttttctgtttgaaacaatgaattagagactggcttttgtctgcaataatgaatttgggatatgcataygtttgttaactttgtctaaaacaattctctaggccaggcatggtgattcacacctgtaatcccagcactttgggaggccaaggcggacgaatcacttgaggtcaggagttcgagggcagcctggccaacatggtgaaaccccatctctactacaaaaaataaaaaaattagccaggcacggtggcgcatgtctgtaatcccagctacccgggaggctgaggtaggagcatcactgcaacctggtaggcggaggtttcagtgagccgagatcacaccactgcactccaatatgggcaacagagtgagattctatctcaaaaaaaaaaaaaaagaaaaaaaaaagaaaaacaaacaattgtctagaaattgtgcttatttttg

SEQ ID NO: 552218 - DNA, 607 bp, Homo sapiens
taaatacttgatcatttaactttatttggaatcacattgtgaagacttttgtattagaagctcatttttctttaatttttaaaaaaatacaagtttcacctagtcactgtagaaatttttcctaagtgttaaagcatcagatggtgtatatgacaaacttttctgtttgaaacaatgaattagagactggcttttgtctgcaataatgaatttgggatatgcatatgtttgttaactttgtctaaaacaattctctaggccaggcatggtgattcacacctgtaatcccagcactttgggaggccaaggyggacgaatcacttgaggtcaggagttcgagggcagcctggccaacatggtgaaaccccatctctactacaaaaaataaaaaaattagccaggcacggtggcgcatgtctgtaatcccagctacccgggaggctgaggtaggagcatcactgcaacctggtaggcggaggtttcagtgagccgagatcacaccactgcactccaatatgggcaacagagtgagattctatctcaaaaaaaaaaaaaaagaaaaaaaaaagaaaaacaaacaattgtctagaaattgtgcttatttttg

SEQ ID NO: 552219 - DNA, 607 bp, Homo sapiens
taaatacttgatcatttaactttatttggaatcacattgtgaagacttttgtattagaagctcatttttctttaatttttaaaaaaatacaagtttcacctagtcactgtagaaatttttcctaagtgttaaagcatcagatggtgtatatgacaaacttttctgtttgaaacaatgaattagagactggcttttgtctgcaataatgaatttgggatatgcatatgtttgttaactttgtctaaaacaattctctaggccaggcatggtgattcacacctgtaatcccagcactttgggaggccaaggcggacgaatcacttgaggtcaggagttcgagggcagcctggccaacatggtgaaaccccatctctactacaaaaaataaaaaaattagccaggcacggtggcgcatgtctgtaatcccagctacccgggaggctgaggtaggagcatcactgcaacctggtaggcggaggtttcagtgagccgagatcacaccactgcactccaatatgggcaacagagtgagattctatctcaaaaaaaaaawaaaagaaaaaaaaaagaaaaacaaacaattgtctagaaattgtgcttatttttg

SEQ ID NO: 552220 - DNA, 1987 bp, Homo sapiens
tgtaaacctggaaacttttatgttaatcccccattcatgacattgttcacattccttatgcttgttatattaaatatgccatgatttgacaatttattagaggcacaggaatccactctctgatggttctaatcacacagaccaataactaattttcctttgagaaattttgttctatcagaaaaaaaataaccaagtttttttggggggcttaatgtgtcagaagctgttatatattttgtaaatattatttaatcctgtcaacaatcctatgaaagagaggttattatctttctcactcttataggtgaggagaccaaggcacagagaaattaagtaactggtttaaggctacacagacagtaaatgagaaaaccagaatttgcaagtaggctgtgttgtgctgtagcccaaggtagacatctctgtttccccttcaatctaatgtataaagacatgaatagcactgaaagctaaatgcaaataacctagagttaaatactacgcaggaagttttatagattattttcattttcatgtattttgagtggtacttgtccagtatcaaatggattttccattattaaatagtgaaattcaattattcttctaagcatttaatatgttttttgagcataataaggtcatccatacttttatttggatgaatggctggattatacattttagcacatagaaatttcacaaaggcttctaatcttggctttatgaacatttaagaactaaagttaaatatatttatttattttggtgattttgcatacatacaaaaaaaccctcacacacattggaggtagttctagtagtagaaatatactaaattgatatgtaactgtttagaaggaattttgattattacaaacagtaggtaacctcaaattttaaaattgcataaggttgtgttatatattgattttttttaagcatcatcagctgaaatgaaaatagtattttataagaatttcttattggttcaaactcagctgttagtttatacctacaagttaaaatccaaaaaaaaactttgttaaggatgtgagctgaaagctgcagacttcacattgcctttttaatacactttccaccttgcccgtcagacttcaggtaaaattctcctttatccagtcagcccatggctacactcgtgcttttagaaaatttgttctgctcatgtcagaaaccattaggcatttaccggaatctaactaagattgaaaactaacgcagtgagtgattagaaaaagtagggtagtgattgattaatggggaaagaactggattattttgatcccacttagcggctgagagagatggaactagtcttccaaaccacccagaaacccctccagttggggtgaggagcttcagtctgagaaactgtccagcattcctccgaagaggatgcggattgttttyttccttgtaaccccaagtgctctctcatgcccactggcccggctgcagtcgttcatttcaagtgaatattgcagacggttgactttacagtattcggggtcattaatcatcatttatatttacacgtatctttttaaaaaccacgcacaaaacactaacatattaatctcatcttcttgctcctgtgaagtagaatgttattcctactttcatagaagagacaattaatttgacagaggtccacacagggaatatgacatccaacgagagctagagcccctgtcggtcttatatactcacctttatattactaagtcgtttgtgacgggggcaagacaagcaggctgggaagaacacagcttgggagagcaagttgggtaagagggatctaaataaagtctctgcttttctaacagaaggtggtttcaagtttttctattggctagataaacccttcatcacttaaccaagcatgcaagaagaaaaagctcactttaagtaaaaattgtcagaattggtttgtttgcggagccatcatgaaaaaatattt

SEQ ID NO: 552221 - DNA, 1238 bp, Homo sapiens
tacgtaggaatattaaaatgtcattatttcactaaacataggacattttgactccaaaaagataggatgaacataactttagattaaatttagaaacagtttataattttatactaacatgtatacaacgctatattcaattttcttcatttcattccagactcctgaaaattatcacaagtgaaatctacctgtagtatagtattagaaatcactgttgtactcagcacagcattcaccccactccgtcttgtatggataatttttttaatcaattttgttttacttatcaaactttttcygctttgtatcactcacaacaggggttcccaacccctaagccacagacctgtaccagtctgtgtcctgttaggaaatgggccgcacaggaggaggtgagtggcaggtgagcgagcattacagcctgagctccgccttgccagatcggtggcggcattagagtctcgtaggagcgcgaaccctatgagaactgaagatgcaaaggatctaggttgcacatatcttgtgagaatctactaatgcctgatgatctgagatggaagaatttcatctcaaaaccatcccctccccgccgccccaccgtccatgggaaaattgtcttccacgaaaccagtctcaatgacaaaaggttgggaactgctgtcccgcaacacttttgtcaaataattcgcccatttgtatataccaacacaaaataccagaataaaatgactagtgggttatgccaattagacttttgtatacttttctttcttactaagatgagtaaatcaaatttattcttaagtaagaattttctaaataaagctaaaagattttagtacattattaccaaaaaggaagtttggtataaagaaattatattgtatgaagcaagagtgttcatttttaaaaaagttcttatcaatttaattgcttactgaagtcccccatcatgtctaataaaggaatttgcctacttaaagttacttaattatattctgtgtgactgtagagcttctcttttgattgtttgttgtgttaaaaagcaattaatgactaacgctaacctgttaagtaactcacctcatttgtctaccatctgtatattagatattaatacctgaaagagtgccagtttcttatgaaataggcttttaaatgtaaagtcattcagttttataaagtaaatttatattaaactaattttaatcttaatatataatcttgtatataat

SEQ ID NO: 552222 - DNA, 1238 bp, Homo sapiens
tacgtaggaatattaaaatgtcattatttcactaaacataggacattttgactccaaaaagataggatgaacataactttagattaaatttagaaacagtttataattttatactaacatgtatacaacgctatattcaattttcttcatttcattccagactcctgaaaattatcacaagtgaaatctacctgtagtatagtattagaaatcactgttgtactcagcacagcattcaccccactccgtcttgtatggataatttttttaatcaattttgttttacttatcaaactttttctgctttgtatcactcacaacaggggttcccaacccctaagccacagacctgtaccagtctgtgtcctgttaggaaatgggccgcacaggaggaggtgagtggcaggtgagcgagcattacagcctgagctccgccttgccagatcggtggcggcattagagtctcrtaggagcgcgaaccctatgagaactgaagatgcaaaggatctaggttgcacatatcttgtgagaatctactaatgcctgatgatctgagatggaagaatttcatctcaaaaccatcccctccccgccgccccaccgtccatgggaaaattgtcttccacgaaaccagtctcaatgacaaaaggttgggaactgctgtcccgcaacacttttgtcaaataattcgcccatttgtatataccaacacaaaataccagaataaaatgactagtgggttatgccaattagacttttgtatacttttctttcttactaagatgagtaaatcaaatttattcttaagtaagaattttctaaataaagctaaaagattttagtacattattaccaaaaaggaagtttggtataaagaaattatattgtatgaagcaagagtgttcatttttaaaaaagttcttatcaatttaattgcttactgaagtcccccatcatgtctaataaaggaatttgcctacttaaagttacttaattatattctgtgtgactgtagagcttctcttttgattgtttgttgtgttaaaaagcaattaatgactaacgctaacctgttaagtaactcacctcatttgtctaccatctgtatattagatattaatacctgaaagagtgccagtttcttatgaaataggcttttaaatgtaaagtcattcagttttataaagtaaatttatattaaactaattttaatcttaatatataatcttgtatataat

SEQ ID NO: 552223 - DNA, 570 bp, Homo sapiens
tttgccaagaggttttgtcatgaaaggacattaaatttttttcaaatttttttttcttcatctcttgaaatggttatacaatttgtctcctgtccccccaccttgtgttgaattatattgattgatttttttggtgttaaactaaccttgcattttggaataaatgcaacttgattatgatatattatcctccttacatatcactgggtttgatttgctaatattttaagacttttatgtctgtaattacaaaaggtattgatctgtaatttttgtttgtttttagggatctttgtcaggtttgggtataatgttatgcaggtctcataaaacaagttggcagttgctctccgtttttttctrttgtatggtagagtttgtgtaaggttgttaattatttcttaaatgtttgggaagataatgaagccatctggggtctggatattttttctgataacactgataattacatatgtttatcctaagaatgttttcaattcatttttattgcattattaatatatgaataaccttcttgtaagaactcaaatattacaagtgaactgaagt

SEQ ID NO: 552224 - DNA, 1088 bp, Homo sapiens
ttactatcaggggaagtaatgtggtatattgaaaaggttaactgcttggaacttaggagctgtgtgttttggaactatcttaccactaattaactggatgactttggtcaagtcacttggtttgttatttcattcaacaaatatttattgagattctgccgtgtgccacgcactgggtatatacgaatgaaaaaaaaatagaggttcctgtccttatatatctgacagaccaataagacagggcagacattaatcgaagaaacctacaaatacatacataattttacttggtgtggctaggctttggagaataaaaaatagatcactggttcatattttaaaaagaatttctacttaagatcccaaatttcctgtcccaaccttcccacacataatataattatatgttttaagtccactcattaataaaacacaaaaacacaaacttaaaagctactatgaattcaataactcttttaaataaattagcattttatcattataatgtatgtatagaattagaaaaatagtagcacatatgatgtaagatatattatttactcagagtagcttgccaaaagcacttgctgcatatacagatttgtttacctcttgcaatgactttgtggcctcccagggatccaccacccagaggttaaaaacctacagaccacattaatgaagactaaaacatggtacttgagtagatatggcccttctcttccacaacagatatcactatcagtgaccacattttcccctcccctctgagcttagattcatcctcagaatccttcttaacatgccaattggttggagctggcatacagatgaaaagttatatgtactccttgggctgaatgagctcctaaggtcttgcccagcttaaaaattctatgaatttatatattcarttctgttctgctgccttgagaaacacaaatgccttctcccatgttcatataaaagtaccccaaatattagaagatatttatgtggcctcattttcttttctttgggataaacagctctagatcccttatcggttcagcatatgttttgcctcctgactccctccagcctttgat

SEQ ID NO: 552225 - DNA, 474 bp, Homo sapiens
agtgagcatgagtcaatctgatcagtgagataggctgaaattcccttaaaaatgtagattgtcctaaatggattatccaaccctctagcctgtcttcttttcacactgctatatactttttattcgctctgaataatttttactctacaaagaaataaaatattctatatttttatatcattgtatagtttgcaaagcatttcatgttcattatttcatgtgatcattgcattaactttgtaatattatattgtattctgatttttttgtttttccaaagaggaaagggagrtgcagaaaggagaaatgacttagagcaagtctccgcatgacccaaatgctagcaaatatacaattgcccctgatttcgttccaggtatcttggtagttaaactgtgcttcttgctatattttaaacctcttcatgcctcataacactagcatatgttcatttggctgcatcctcttgtcagt

SEQ ID NO: 552226 - DNA, 543 bp, Homo sapiens
aggaagctgattatattttgaatgacctatattgagctacctagttgcccacagtgtcataaccccactgcaggaaagttcatggtgtcaagagaatttaattgcctcttttgaatggattggcttgcagtttccaaacagaaataaagtgggaggaaaakgtgaatataggagctaaaacctgattattaatttcaaactgctaaattcctgttaagtgtcttttcttctttcaactgattttataatggttcacaattttcctgtgtatgactagtaattctgctttgctctcctaatttaaacagtatcatttgacattttggggttatctaataatggagtcagccaggcaatcagctttagtattatggatttcatgagtgaaaggaaaaaaaaatcttaaaagacaggctggcttggtttaatttcattggatattagcatttctcaaaagcaaagaagtattagtgatggaaagtaggttaaaacattgctggcttgctaataaggaaaatatatatatatttttcaaaaatgaca

SEQ ID NO: 552227 - DNA, 552 bp, Homo sapiens
ctcattcaaaataaaaataatataaaagaactacattgaaaattcaaattagagaatatgagaggacttcaaaaagtttgtaaaaaaatagaattaaaagataaaaattaaaaaaaacactttatttctgaacatttcatgaaggtcaagaaacttttgtaagtggtgatacatgccttttagtacactcctaaagaactccgggtcctggtaatttaaccatgtcaatgcagtcttttttacattattaactgaagaaaagtgatgcccttaaacattttttaagattagaaaactacaagtcagaaggagccaaatcaggactgcaacgtggatgcctaatgatttcccagagaaactcctgcaaaattacccttgtttgatgagaggaatgagcaggatattcttgtggttgagaactctctgatgaagctttcccaggcatttttctgctaaagcttttgctaaatttctsaaaacactttcataataaacagatgctattgttctttggccctctagaaagtcagtaagcaaaatgccttgggcatc

SEQ ID NO: 552228 - DNA, 552 bp, Homo sapiens
tggagaaagactggctaggagcctactatggtatcaaagtaatcgcagtgggaatgaaggaaggaatacaagagatacatcagacacaaaactgacatgacttgtcaccacagagatcaaatcaaaggtgagtctcagaattccagcttgggtaattggaagaattcatccattccttcagattacattttcagagtaactgccatgtgctaggtgttgatataaaggcagagtcccagaacattagagaagaagtacagaaaccgtcttgataagaggttctgagaccccacctcaaaaaaaaaaaaaagaagaagaagaataggggtttcacttcagacactctgagctccaagtgtctaccaggtatctaagtagaaatgtttagtgatcagcggggacaagaagcaggacagggctctagagagagcagagccagagagggagaagaggcctctgaaacgacaaggctgaagtaaccaagtatgaaaataataaagyagactaaaaagtagaatgaaataagagggaaaaaagctaagaatgaatctt

SEQ ID NO: 552229 - DNA, 1314 bp, Homo sapiens
atgctcttgctcccctagactgtgaactttttattatctcatttgtctttgtctcccccaacatgtcagaaaaataatctttgttgaattaattcattaaatcatgaatgaacttattgttcttgaagcaataggctcaggagatgaacaagcatagccaaaataaaagcagaatgaagaactgagcagtaaccaagactggagagagtactatttattgtatggtcctaacgcactaagtttatcatagccttatccagccctgggaaatgaaccatctccagagcattgttaagtcttttggaattctggggaactgggagtttcacattttacaatatggaaaagaggccaaacacagtctcagaacccaggaaactaaagcacctaaaaaactgcgtgattcctacccatgtacacacatctaaaagggcaaggtcagctcacaaaataataatcattctacagccacctcatacttagcagccttcctccttccttggtaagggtgcagtaaacagacattgctttgaaaaggaaaaaaaaatgtgtcaaaatctactttctcttctacatttcttgcctttcactcattattttaaaatcctgacatttattattaatcagttttatccagtataagatccacatgactaagctcttatccaagccaacttgaattaatttggcaagtattacttcaccaagcatgtgctgagcaaaatctaaatatatcagccaagaagataagtatccatggctctttatctataaaagacgtgcaactatgatttcatttgggagtgaggagactcttaataaagctgtattcaggtttctattgctgtttgaagactgaagcattttggattgtcatttttttccaaagcccgacactgccatgtttttcagatgagcagttcccaaaagctccttcttacttgcttataaatgtaatactgtctttattttaccctccatctgctgccttcytgagtttctttctgctgcattcgttctctgtgagttcctgagaataacatacatgatttatatacttaccattcagtgtctggacaaggtatatgatgatggatgtttctatgacttccttaactctccttaatagttcttactttacaccagattttatgcagtcttgtggcatttgcactgtggggatggtgagaatatacatatttgctatggaaagctcctcccacagatgtcctctgagaatccactaagtagaagctcatgttctctctcagaaaaaccatctcatatgccagggaggcactgtgaaatatttgt

SEQ ID NO: 552230 - DNA, 1014 bp, Homo sapiens
tttagattatgataaaaagctagggagatagatatggcagaaagagggcagatgctgatttccacttagaaaatggaaatcamcccgctcataaaaagcagaaactgaggctcttatgagcaattggatatgacctcaggcaagccaggggtcctctctgcatgcaacagtgtaaaaagacacagatgtcataaaggcagacgaaatgatgtagagcagtgatggaatatgcatgctcttccattttaaatttgattaggttcccacagacaccagaaagtcacttgactattatcagactctgggagtgtagcactgcaaggatcacagagcgttgtcgttatctcagtgactgaaaagagaatacacttggaagagaatactaaagccttccttgtgtacaaagtgtggtctgaagacagcatggtatcacctgggagcacaggccccacccaggcccactgagacagagcctgcattttaacaagatctccaggtgatttgtaagcacactgaagtttcacaagcactttactagaacgctaacagtgctctgacaaaaggggccatggaaatttcaggtgttatcaactctacacagacacatgtgcagagggcttctaagtcagtctggcccttgcctggtacttctgatcaaccacaggttaaacagttgagaagtaaaccttttttaattacaggtaacagtaccaatcaagtgagccttatttagttacctctttgtgcgatgaaagataacagaaaaaaaaataaataaataaagctagacatgtgaaaaaaaaaaaaaaagctttaggaatctgtctggataatgccaaaaacctcaaccacactaaatgattataagtgagcctgagtcattacattttcataattataatcattaaaacccaagcatgggtattgatttactgattggcaacaacttatttttttttaaaaaacctcatttcaactttcattttcagaagagatgattttctcagaaggcgt

SEQ ID NO: 552231 - DNA, 1014 bp, Homo sapiens
tttagattatgataaaaagctagggagatagatatggcagaaagagggcagatgctgatttccacttagaaaatggaaatcaccccgctcataaaaagcagaaactgaggctcttatgagcaattggatatgacctcaggcaagccaggggtcctctctgcatgcaacagtgtaaaaagacacagatgtcataaaggcagacgaaatgatgtagagcagtgatggaatatgcatgctcttccattttaaatttgattaggttcccacagacaccagaaagtcacttgactattatcagactctgggagtgtagcactgcaaggatcacagagcgttgtcgttatctcagtgactgaaaagagaatacacttggaagagaatactaaagccttccttgtgtacaaagtgtggtctgaagacagcatggtatcacctgggagcacaggccccacccaggcccactgagacagagcctgcattttaacaagatctccaggtgatttgtaagcacactgaagtttcacaagcactttactagaacgctaacagtgctctgacaaaaggggccatggaaatttcaggtgttatcaactctacacagacacatgtgcagagggcttctaagtcagtctggcccttgcctggtacttctgatcaaccacaggttaaacagttgagaagtaaaccttttttaattacaggtaacagtaccaatcaagtgagccttatttagttacctctttgtgcgatgaaagataacagaaaaaaaaataaataaataaagctagacatgtgaaaaaaaaaaaaaaagctttaggaatctgtctggataatgccaaaaacctcaaccacactaaatgattataagtgagcctgagtcattacattttcataattataatcattaaaacccaagcatgggtattgatttactgattggcaacaacttattttttttwaaaaaacctcatttcaactttcattttcagaagagatgattttctcagaaggcgt

SEQ ID NO: 552232 - DNA, 1250 bp, Homo sapiens
ttttggatggctgttacttatcaggtcttatacttgttagtaatttcattaatataacccagtaaattaggtacaggtagtattattaactctattttgtgttacagaaatcaaaggttttgagtgacgagataaattagcttcttttcattgcttattactaaaagtaaattcaaactcaaatttgtctagactctaagaccaaaccctaacacattatttatttgcatttagttgtttatgtactgggtagagaggcaaagacagtattaattgggatgggagtaggtctttctatttttacctgttttagtccatttgtgttgctatgaaagaatacctgaggctgggatttttatttaaaaaaataaataaaacagatatattgtgttcacagatctacaagccctgcaactgatgtggacttcagactgcttccactcaggtgaaaggcaaaggaaagccacatgcacagaaatcacatgacaagagaagaactgagagagaaagacagagagaagaggaggaggagaggagggaggtgccaggctgtttttaacagacaggaactaatagggggagaattcactcgttactgcaaggttggcagcaacacattcatgagagatatgcttccatgacccaacacctcctattaggccttacctccaacattggggattaaattacaatatgaggtttggagggccaaatatccaaactctagaactgtacaagtactaatcattaaataattgttaaatttgaactaaagacctattaatccacccctaaaatgtagaaataatatgaaatctgtgtgatgtaatgtttgctatcttcttcaggaattgacagataatttttgcaaaactaatcaaatttattgcataaagtcaagtctttgtctttcttttgataagaaaactttttatttctgaaaatattcatataatcttacctatttgatgaaatcaaagccattcctgtttgatcaacacctaaaaattaaactyatttctgccaatttagtagaaattgttgctaattaacaacttttttaagagcaatgatcttgattacattgcactgaaacaactatgtacacctaaatgaaaaattttaagaaaggatatgtcttcttagaaaacatgaaaatttcacacgaattcaacataactgttctgatcctagaaggaaagtgaagtttccacataaatgcctattatatttttcaaaaaagatggcta

SEQ ID NO: 552233 - DNA, 1013 bp, Homo sapiens
gaagtaaaagtgaatttctcacctctgatctaaatatactcattctcttgctacagtactcccttagataatagtacaagtctattttccttggctgagaaaaacttaataactagaattaggattagaaaattgatgggttctaatgcatttcttattcagagccctagagtcagggttatttgtatggttgtaacgcaagaatcttacggagtagagatgtagattaaacaaacagaaggagctgtcttcccaggagaaatttataatctggtgaagtagctagaattaagtatcctcacctctgagctttgagtttttaaatgcccaaaatgcaaataataattacctcttttagcttcctcrgaagcctgatttatgtgtgtagcatgtcctcagagaaacagactaaagagttaaggactcttaggctggaaaataaaggctgagaagggaatacaagtactgtttctaaaatggcaaagggactagcttgagggaatacagccttgaccactgaatcctggaagactaattaacaagcctaggctttcttgaaattcaaacaatttaagtttaaggcattacaaataagtcttattacacaaaggatgagtaaacacacggcattcagtaagcaaaaatcattgcagtctgaaaagagaaaacttacaaatttagatcatatgttcataataaagttctaggggactaaaatatctaaaacacatccttggtctttgcatttaagtcaagaagtaaaacctatggaccatcccataaggcagcaataaaattctgggatattaataacactggatttattcagtttattttcatgttttccttgaaattgcagaaatggtctgctgagagataacgctaaagcaatacaatagatatcttcaatgtgtgcccatgatgggaaaaggtgaaaaataaaacaggtggtggacatgctaagcagtgatgattaacacccctgccttcatgctcacaggttctttaattaa

SEQ ID NO: 552234 - DNA, 547 bp, Homo sapiens
caagggtggaaatgaactatcaaatggctcctccataagaccacttcagatattgaacttagggttatttcagagctgtcaaataaactctggcttgatcctaaaccaaatgcccttgaggttacccaaccaaatgccagggtcccccatagcactgtgatatgaccccattttggactcttccaatgcatgttctgctcctgctttgccgacagtctttctgccatgggaaatcttgcctamtggtcctaaaagcctgggtgaagtttccccacaatggaattagccccctattctgaatccccttggagagaggataatcgagttggacagttgaaacataacaggaaagcagttcctctaggttcctgtaccaggaaatagctcctagtgccaagataactccagtgccaagaccccaatcatatggaggttgacatgctgtgtttcatctcactgctactgaaggaataatactttgcaaaaatcatgatgtcgaaagtgcatcctgttcggcatagagccttgagcaaacacagaaaccttt

SEQ ID NO: 552235 - DNA, 1342 bp, Homo sapiens
cgcttctcttccacacacagtccactatgagttagtcacatctacctgcatggtctgtcaaaggcattctctatgaaagggaaaacatctttcagtgggcatagaattatctccacatataaaaaaacatttctgtattttataggagtcaaataatcaaaatgtgttaacttttcattcaacctcagagctggtttactgaaaattaaaacgactggtgagtgatgaggcaaaactaaattttttaaaggataactttaatcagtatatttattcctcctgctacattctctacaaggaattgtaattgaaataaaagaaaatatttgctgacaacaattattaagtcctcattccagaaatcaaatctagtaaaatttcaccttgattctagaagaagtaaagaagtaaaacgggggaactgaacaccctcccacaccattttttttttaaccttttccattattcagccaaggactcacattaaatctctggcaagtttgagaaggtggtaaatatcctgacttcactgtactcattagcaatatttttaaagactaccttaaattttaataagttaattcaattcatgctcagggagttgctggatgtcaatgtgctaaacaaatacccctgactcaggcagcatctttttctacattactaatgcattacacataagctttcctaatattggtgccactgtgcaaacagtactgtcacttagagccacgttcaccttttgtaaacaaatgattcaattaataaacctcaccagggaatagtacttttgacttaaaggttgcctttctaagattgctttataaaacagtcttcacattcctggagcttatgacctacgtgcatttcaggatttgctaatgaactgctcagctgctgagttgagtaaatataaaaggccatttctctttgctcttttcacaccttttaattggaacaagtatgtttttggtctgattcataccactttcatgtgctagaaacttgygtgcataaaaatttggttgaaattctacaggcagtaggggtcacattttttaacgtggttgcttgaattctacaggacaaggattaatagatcatgagtggcatgatggatttgtttgaaaattacattccaacctaagtgagttttagctcccataatgtgtctgttcatgtttctaaagcaattatttcccaagtagaatgcacgaggtggcccaagggggttaagagagattgtattagtcaagactctttctggttgcaagtgatagaaacacttcacaaaatggattaaacaaaaaatggaatgtatatgctcacgtatatgaaatgt

SEQ ID NO: 552236 - DNA, 1342 bp, Homo sapiens
cgcttctcttccacacacagtccactatgagttagtcacatctacctgcatggtctgtcaaaggcattctctatgaaagggaaaacatctttcagtgggcatagaattatctccacatataaaaaaacatttctgtattttataggagtcaaataatcaaaatgtgttaacttttcattcaacctcagagctggtttactgaaaattaaaacgactggtgagtgatgaggcaaaactaaattttttaaaggataactttaatcagtatatttattcctcctgctacattctctacaaggaattgtaattgaaataaaagaaaatatttgctgacaacaattattaagtcctcattccagaaatcaaatctagtaaaatttcaccttgattctagaagaagtaaagaagtaaaacgggggaactgaacaccctcccacaccattttttttttaaccttttccattattcagccaaggactcacattaaatctctggcaagtttgagaaggtggtaaatatcctgacttcactgtactcattagcaatatttttaaagactaccttaaattttaataagttaattcaattcatgctcagggagttgctggatgtcaatgtgctaaacaaatacccctgactcaggcagcatctttttctacattactaatgcattacacataagctttcctaatattggtgccactgtgcaaacagtactgtcacttagagccacgttcaccttttgtaaacaaatgattcaattaataaacctcaccagggaatagtacttttgacttaaaggttgcctttctaagattgctttataaaacagtcttcacattcctggagcttatgacctacgtgcatttcaggatttgctaatgaactgctcagctgctgagttgagtaaatataaaaggccatttctctttgctcttttcacaccttttaattggaacaagtatgtttttggtctgattcataccactttcatgtgctagaaacttgtgtgcataaaaatttggttgaaattctacaggcagtaggggtcacattttttaacgtggttgcttkaattctacaggacaaggattaatagatcatgagtggcatgatggatttgtttgaaaattacattccaacctaagtgagttttagctcccataatgtgtctgttcatgtttctaaagcaattatttcccaagtagaatgcacgaggtggcccaagggggttaagagagattgtattagtcaagactctttctggttgcaagtgatagaaacacttcacaaaatggattaaacaaaaaatggaatgtatatgctcacgtatatgaaatgt

SEQ ID NO: 552237 - DNA, 543 bp, Homo sapiens
gatcaaggggactttaatgggatggggagaagaccccgctcccagtcctgtcatctgtgaatttgttattaataagtatttattgacagtgcatctgcacgcactcctgtctctcagagctgtggaggggaagagctccctgcagggtgaggcagggtgcggggtgagaagtgctgggttaggacaggggctgcacctgccaggcctggccctgtgtgcatggaargggtgggagagcccccagagtggggaaggctcataggctgccccctagagcagagaacagcaaggtcaggtgtccacacgtaggatgctccctccagcagcctgcagaaggggctgcggaccccagggtgggggtgactggggttggcaggaggaccggggtagggaatacggttctgctgtgcaacacgcctctgcagcagtggcagccaagacccaccttcatagatggtgtctgttcagtaaatgtttgatgaaagcaaagacaggaacagaggaggggagggaaggaagggtgggacaaagagccacactaat

SEQ ID NO: 552238 - DNA, 543 bp, Homo sapiens
gatcaaggggactttaatgggatggggagaagaccccgctcccagtcctgtcatctgtgaatttgttattaataagtatttattgacagtgcatctgcacgcactcctgtctctcagagctgtggaggggaagagctccctgcagggtgaggcagggtgcggggtgagaagtgctgggttaggacaggggctgcacctgccaggcctggccctgtgtgcatggaaggggtgggagagcccccagagtggggaaggctcataggctgccccctagagcagrgaacagcaaggtcaggtgtccacacgtaggatgctccctccagcagcctgcagaaggggctgcggaccccagggtgggggtgactggggttggcaggaggaccggggtagggaatacggttctgctgtgcaacacgcctctgcagcagtggcagccaagacccaccttcatagatggtgtctgttcagtaaatgtttgatgaaagcaaagacaggaacagaggaggggagggaaggaagggtgggacaaagagccacactaat

SEQ ID NO: 552239 - DNA, 1383 bp, Homo sapiens
ctcctaaataacaaaggcaaataggaataccaggagtgcatgctttgtgtgttttcatcaagaacatagtcaccaaaatccaagyggatgggcacagccatttgcatgtaactttacagtataagagacattgtcatatgcccacagtctgctatgaagacacagatccagactggctaagagcacagaggtgcatggaaatgctcgggtgtgtggtgtgcgtggtgccctgcgcatttgtgctggctttgcacccccctcctgccacgtcccgtgcaaacgctcaggtgtgtggcatgcctggggccctttgcattggtgctggctttgcacccacctcctgccacgccccaaaccccaaggagtccaggagccaggagagcccaaaatccccatccatgctcctagaaaggaagtttcttgacaaaggtctgagtcaaccatgggtaaagccagaataaaccctgctagttcttttgaggtgtgaacagtctcagctactctgagccccgcataactcactttggtcaccagaggagcaggatttacagggtcaaaagccatttctccttccagaggctcccagctcaaagcccagccatcgtctcccagacattttgggtcgcatggaaatctgcctcttaagagacctggcctcctgtctagggttagagaacactgtgttcccagaagggacagtcaggcctcaggatcctctcctgagaagccctgaactcaagtcaaactgagcctgtgttaacagggtcctttgccgctaagaacccaactgtctcaggagtggctctgcctttttttttttttttcctttctattttcagacaaatcgtcactcagcatagtaaacccaagatataaaaaccaacaattgagtaactggtcttttccgtctgtcttgggaaagtagcttatcaaaagtaagatgaaaaaagagtattttattgttaaactctataatgaagcaactgtctttgactacacaatgtgggaacttgccagtgaatgtagaagtactgcggggccatgcgtcagaggtgtgtgggtctaggagacgcagatcaggagtctggcctggctcagatgtccacagccaggaagccgcgggcagagcagcggggtcgaggctgcggctgagtttgtgagctgtggcagccatacttactctgcagggcatgttgagttctgaaggagacagcactgctgaagtgagcacagcagcaggacagacggctgatccctccttgtgctcccacacacagcagcgagacacaaacggctcgtccctcctggtgctccacacacagcagccggacagacggctgatccctcctcgtgctcccacatgcagcagccagacacagacgg

SEQ ID NO: 552240 - DNA, 1457 bp, Homo sapiens
ggggctatctagcccctagccacagctgcagtgtttgggagcaactttttaatgactcaaactcattccttgtgaaaaatggcaattggaacacatcatatttgagaggagagcaaatgtgcaaaaataagataaggacctgaactggaagcagaaagaattcttctcttttttccccttccagaattaccagtataaacgatcccattttacattacaagctagcttagacactaagcaacttaattgcatgtttgtttttacaaaatgatgtccatgactggtggaactgcagaatttaattggggagggagaatcaaacagcacctgtgtcaagccaaatgaacatcagctacaagtgcccacccatgcctagagcagctgcattgccagcacttagcccagggctgggtcattctgtggccgagcagagagctctcctccctggctcacagctggaccggggtctgccagctatcccatgggatgcagggtgggtgggcctctgttcaggtcccagccctgatacggtgtgtccccctcttattcttttgcaaaatcatctttgttatacttgggccattaagtttctacataaatattagaatcagctggcaaatttcagggaaaactctgctgggatttagattagaatgacattgaatttgtagatgagttttgggagagctgacattttaagctgttggatcttggcagacattaggctgatggagttcttcatttgttcagctttttgctgtgcctttcaatcaagttatcattgatatacacagaagtcctgcctgtgtttatttggaattattttatatgatttattttctgtgctatcatgactggaatcttctattttattgcctattcttagtggttattgctaatcaatggaaatgtttttaatttttgcatatccatctgataatcaaccatttatactaagtagtttcaccattagttctaccatgtttaaccatttattctaattagttctaatggttctaataaatttcctaaattttctaagtaagcaatcataatgtctctgacttctttgtcttgttttgttttagctgacttagtgtggttatcgtgacttctgtgttaaagaaaatgtttttaatgactcattattaagtgtttgttgtagatgttctttatcatttaggaaattctatttcttrctcactgaaattgcctatttttaaaccatgaataataggtggtaaacttgatttaagcctttttagtatctattgatacaacccaaatatttttccgtgttaaaacatgagtaatgtatttcattttccaatggcttgttttaattactgtttatcatctatctaagacatgcatatcaatatttccaaaatagggatttaccttaaaatcaatagtctgttataggtttggagaagattttttttttcaaatggaaa

SEQ ID NO: 552241 - DNA, 1457 bp, Homo sapiens
ggggctatctagcccctagccacagctgcagtgtttgggagcaactttttaatgactcaaactcattccttgtgaaaaatggcaattggaacacatcatatttgagaggagagcaaatgtgcaaaaataagataaggacctgaactggaagcagaaagaattcttctcttttttccccttccagaattaccagtataaacgatcccattttacattacaagctagcttagacactaagcaacttaattgcatgtttgtttttacaaaatgatgtccatgactggtggaactgcagaatttaattggggagggagaatcaaacagcacctgtgtcaagccaaatgaacatcagctacaagtgcccacccatgcctagagcagctgcattgccagcacttagcccagggctgggtcattctgtggccgagcagagagctctcctccctggctcacagctggaccggggtctgccagctatcccatgggatgcagggtgggtgggcctctgttcaggtcccagccctgatacggtgtgtccccctcttattcttttgcaaaatcatctttgttatacttgggccattaagtttctacataaatattagaatcagctggcaaatttcagggaaaactctgctgggatttagattagaatgacattgaatttgtagatgagttttgggagagctgacattttaagctgttggatcttggcagacattaggctgatggagttcttcatttgttcagctttttgctgtgcctttcaatcaagttatcattgatatacacagaagtcctgcctgtgtttatttggaattattttatatgatttattttctgtgctatcatgactggaatcttctattttattgcctattcttagtggttattgctaatcaatggaaatgtttttaatttttgcatatccatctgataatcaaccatttatactaagtagtttcaccattagttctaccatgtttaaccatttattctaattagttctaatggttctaataaatttcctaaattttctaagtaagcaatcataatgtctctgacttctttgtcttgttttgttttagctgacttagtgtggttatcgtgacttctgtgttaaagaaaatgtttttaatgactcattattaagtgtttgttgtagatgttctttatcatttaggaaattctatttcttgctcactgaaattgcctatttttaaaccatgaataataggtggtaaacttgatttaagcctttttagtatctattgatacaacccaaatatttttccgtgttaaarcatgagtaatgtatttcattttccaatggcttgttttaattactgtttatcatctatctaagacatgcatatcaatatttccaaaatagggatttaccttaaaatcaatagtctgttataggtttggagaagattttttttttcaaatggaaa

SEQ ID NO: 552242 - DNA, 909 bp, Homo sapiens
catggacttgtgaagaatactctccatcttacaccaacaagatgagctccagacaggtagagctagtcccagtatagaaggttagccaaattcagaggggggtgagagagagaggagagagagagagagcgagcyggtgggggggtggtggggtggggagggggttgcggggagagagagagagagagacagagagactttaagaaagattgtgtctgagtgtggtggctcacacctgcaatcccaggaggccaaggtgggcggatcacttgaatcacttgagtccaggagttcaagaccagcctggaccacaaagtgagaccccatctctacaaaaagataaaaaattacctgagcatgatgctgtgctcctgtagtcccagccaccccagaggctgagttgggatgattgcttgagcccaggaggttggggctgcagtgagctatgatcatgccactaccattgcacgctggcctggtgacagtgagacgctgtctcaaaaaaaaaaaaaaaaaaagaaagaatgattgtgtctttctcacctttaagtccttacgttccttcaatgctggattatgggatgggccagccaggccgctgcatgcaatgttcgcttataaaggacattaaaatatgtctatgatgctaaaaagttccggaaatgtgatgagaggagaacattttacccatgggaacactctgggagactaccaaatgcagctggaaagaatccaactctcacatctttgggacagggaatgggaacctctcctttctttgcagaagggggtatgatcttagtagaatcacaggtggctgctaattggccttgtaaggggccttattgattttggggctttggttttgctgactggggcatgcagtcggatcagagaggaattgctgag

SEQ ID NO: 552243 - DNA, 675 bp, Homo sapiens
tgggcaccagataaaagtattcaacatcataatcatcagggaaattcaaatcagaccacaatgagacatcatgtcatcccagttagaatggctgttataaaaaaggcamatataacagatgctggtgaggatgtagagaaaggggaactctttttaatgatatttttgttttcttttattgcttgcaaatattgtatatagttctatcatcatatatagataattttgtatcttatatatgctttttattatacgttaagttcttgaatacatgtacagaatgtgcaggtttgtaacataggtatacacttgctatggtggtttcctgcacccatcaactcatcatctacattaggtatttctcctaatgctatcgctcccctagcacccaacccccctccccaagcccggacaggtcccagtgtgtgatgttcccctccccgtgtccgtgtgttctcattgttcaacttccacttacgagtgagaacctgtggtgtttggttttctgttcctgtgttagtttgctgagagtgatggtttccagcttcatccatgtccctgcaaaggacatgaactcatccttttttacggctgcatagtattccatggggtatatgtgccacattttctgtatccagtctatcattgatgggcatttgagctagttccaagtct

SEQ ID NO: 552244 - DNA, 976 bp, Homo sapiens
aggaggagcttgcagtgagctgagattgcgccactgcactccagcctgggtgacagagtgagctccgtctccaaaaaaaaaaaaaaaaaaaaagagtgtgtagtagacatcatggtaacatcgccttacactgacatcctaacaaacagaggacttccaaaaatgcaaagcctccctctaaccatgagaaaacatcagaaaaactcaaaatgagggacactgcacaggtcacaatgccgcagccagtctggaagatcttcccaagaccaaccaatggcaagacttaaaccatctgggccacagagtaaaataaaaataaaaattaaaaatagctaaggatagtactgggttataacccaccacggaaggcaatctccagctagctcaagacatcagctctgtaccttcctgtttgttaacagatagccatgagtttacactagtatatatttactatactaatttagatgactttacactgatgagtttctactaacatatttatattataaaaatactgagtttatactagtatatataggagtttatactattaatatataatacaaattctaatgagtttatactagtatatgtgtttatgagtttataatatatactaatatacagatactgagtttatactagtatatatgagtttatactaatgaatttataccaatttttattggtatatttggtatattaattwatcatattaatatattatacaaatactaatgagtttatactactatatatgtttatactaatgagtttataacaatgtatatttattatactaatattattatacaaatactactgggtttattctactatatacatgagtttatactaatgagtttacagtaatatatatttatgatactaatatatattatacaaatactaatgagtttatactagtacatatattagtttctactagagtttatgttgatatttataatac

SEQ ID NO: 552245 - DNA, 862 bp, Homo sapiens
gaatcagcttttggtttccctgattttctctattgcttttgttatctatttttttgaattccactctgatacttattatctgccttcttatattcactttgggtttcatttcctcttacttttctagtttccttttttttttttttgtgacagagtctcagctcactgcaatctccacctcccgggttcaagcaattmtcttgcctcaggctcccaagtagccggaactacaggcgtgcacaggcatgcactgctacacccagctaatttttgtatttttagtagagatggggtttcaccatgttggccagggtggtcttaaacttccgacctcaagtgatctgcccacctcagcctgccaaagtgagctaccgtgcccagccaacttttctagtttcataaggtgattgctgaggtcactgatttgagacttaacatttaatactgttttagctgcatcccaccagttttaaatgctgcattttcattttcattctgttcaaaatactttctaatttcctttttgatttcttctttgacccatgagttatttaaaagtgagttgaaaaaatatacaaaaaacaaaagtgagttattcagtttccaaatattgaaaggattttccaatctgttactgatttctactttaatattcaatatcattctggtcagataacatacttgtttaatagaacagaatatgatcaggcttaatgttttaatgcacttgaaaaattgtgtattctgctgttattgtggggagtgttccataaacattcattaggtcaagttggctgacagtcatgttcaagtcgcctatatcctcagtgattttctgggtatctatcctatcgtttattga

SEQ ID NO: 552246 - DNA, 534 bp, Homo sapiens
gctctagatcatgacaattataaatagaacatacacacacacacacacacacacamaaaaaaaaaaatatatatataataaatatttatgtatcatataaatatagataaaatatatatgaaatttatataaagttggtgtgtgtgtttgtgtgtataaagtactacctactaatctacctacctgcatctctacctatatacatagaaatgggataaacagtcattagttgttggtccataagtatggcttggaaacatgtctagagagggtttttgccatagaaattatatcattatggtgcatcatatgccttagtatagaaaagtataattgcgcctgtagaatgatgcttttttcctgtgtcatccagcatatcaaaaacaattaaatttgatcattttattatcttaaaatatcatatcaattttagtctttcccttttgtataacttttaaaaggaaaatcaaaatgttgttcaagttatataattaacacataagataattttgcacacgttgacactcagtattc

SEQ ID NO: 552247 - DNA, 534 bp, Homo sapiens
gctctagatcatgacaattataaatagaacatacacacacacacacacacacacaaamaaaaaaaaatatatatataataaatatttatgtatcatataaatatagataaaatatatatgaaatttatataaagttggtgtgtgtgtttgtgtgtataaagtactacctactaatctacctacctgcatctctacctatatacatagaaatgggataaacagtcattagttgttggtccataagtatggcttggaaacatgtctagagagggtttttgccatagaaattatatcattatggtgcatcatatgccttagtatagaaaagtataattgcgcctgtagaatgatgcttttttcctgtgtcatccagcatatcaaaaacaattaaatttgatcattttattatcttaaaatatcatatcaattttagtctttcccttttgtataacttttaaaaggaaaatcaaaatgttgttcaagttatataattaacacataagataattttgcacacgttgacactcagtattc

SEQ ID NO: 552248 - DNA, 534 bp, Homo sapiens
gctctagatcatgacaattataaatagaacatacacacacacacacacacacacaaaaaaaaaaaaawatatatataataaatatttatgtatcatataaatatagataaaatatatatgaaatttatataaagttggtgtgtgtgtttgtgtgtataaagtactacctactaatctacctacctgcatctctacctatatacatagaaatgggataaacagtcattagttgttggtccataagtatggcttggaaacatgtctagagagggtttttgccatagaaattatatcattatggtgcatcatatgccttagtatagaaaagtataattgcgcctgtagaatgatgcttttttcctgtgtcatccagcatatcaaaaacaattaaatttgatcattttattatcttaaaatatcatatcaattttagtctttcccttttgtataacttttaaaaggaaaatcaaaatgttgttcaagttatataattaacacataagataattttgcacacgttgacactcagtattc

SEQ ID NO: 552249 - DNA, 534 bp, Homo sapiens
gctctagatcatgacaattataaatagaacatacacacacacacacacacacacaaaaaaaaaaaaatatatatataataaatatttatgtatcatataaatatagataaaatatatatgaaatttatataaagttggtgtgtgtgtttgtgtgtataaagtactacctactaatctacctacctgcatctctacctatatacatagaaatgggataaacagtcattagttgttggtccataagtatggcttggaaacatgtctagagagggtttttgccatagaaattatatcattatggtgcatcatatgccttagtatagaaaagtataattgygcctgtagaatgatgcttttttcctgtgtcatccagcatatcaaaaacaattaaatttgatcattttattatcttaaaatatcatatcaattttagtctttcccttttgtataacttttaaaaggaaaatcaaaatgttgttcaagttatataattaacacataagataattttgcacacgttgacactcagtattc

SEQ ID NO: 552250 - DNA, 509 bp, Homo sapiens
cacacacacacrcacacacacacacacactctcatagtcacaaaaggatattctacttataatcagaaatcctcttgaaacaagaattaacattcaaaatgtgaaaacctacaaaaataaaattattaaaaataattacagcctttttttaaactttattctgacaagagcattctaaaaccttcagcaaatagatatgtcagcaagtaaacagttttaaaaatggaactaggccaggtgtggtggctcacacctgtgatccaagcacgttgggaggccaaggcaggaggatcactcaagcccaggagtttgagaccagcctgggcaacatggtaaaaccttgtctctacagaaaatataaaacttagctgggcatggtgtcacatgcctgtagtttcagctacttgaaggctgaggtgagaggatcgattgagcccagaaggttgaggctgcagtgaactaggattgtatctctgcattctagcccgagagacagagcaagaacctca

SEQ ID NO: 552251 - DNA, 501 bp, Homo sapiens
gaaaacagattaggtgttgaattttgttaaatgattttttggtatctgtggagaagaatgtgtaatttcaaattagatctattaagatgatgaattatattaatgcatttcctgatattctgtaattcttccattcttgtaataaacctcacttggttatacatattatttttaaatgttcaatgaackttacttttagtacctttgccctggtgggtatagtaaggtaaatttttaggaatggacaatcaatatcaggttttaaatcagtgttatgttcattccaacatagaaagatggaaatgttctttcatttccaatgctcagtaacagtttgcagtattggacttactagctcttagagttgtggtagaactcttttgcaaaaccctctgtgcctatgcttttatgcatcgtagctcattggtaacttttccccatttcttttatggaaaattatgtgtttaaactctctataggggtcattttttatttaaaaat

SEQ ID NO: 552252 - DNA, 583 bp, Homo sapiens
cactccagcctggcgacagagcaagactccgtctcaaaaaaagaaagaaagaaaagaagataagagtgagagcgctgttgactggaggcagtcatgagctgtgttccattggcagagaatgactaatggcctctaggaactgagcatggccctcatctgacatctaccaaatcctgacccacagaaactatgagataataaacatgkgttgttttaagccactaagtttgtgggaatttattacgtagcaatagaacattaatacattaagaactgcttagaaaattttgaaaaatgtcaagaagggacttattatactagatattaaaactcactttaaaatgttgatcatcaaaatggtgtcattttttacacccaaaggttgtatacagaaatcaccagaaaagaacacgtattcctataaccaactgtgcgtatgcatatataaatattgtgtctaacataaaggaatggctttcaacagcattattggaaaaattggctaaatatctggtggtaaaattaaaattataacctcaccttacagctatgggagaaatactagagttaaatctaaaagata

SEQ ID NO: 552253 - DNA, 940 bp, Homo sapiens
ctaggacaatcccaatttttgtaccttctggtctgggtctctttggcctatttctatactctcttctttgtatctaacctggctctttcctcttataacttatttaatttattcttgtgctattattggcaatggtggagaataacatgtcacaacccttcctataaatatcttctcatatgcttgcagttcgtaaacctattctcaatcctgctatgaaccaagyagtatgattcaacaaccttctcccaccagtcctatgtactgagcctttaacaaggttttctgaaaagagaggtgtcaatttcactgtgttcccagaagtgacaggggtctattttttctccattcagagtggaaataataaaaagaggaagaatcacagtgaattgatttgggggttgatcaccaacccttccttaaaaatgtgtacatgtgaatgtcctttcacacaaatgcaatcacagaatttccccggagcacattagacctggtgatatgttagactctcagcataccagattggtggggaaaaggctaaagtcataacaaaaaggaaccagagcaaggccagggacagctcctaccccagttaaccagttatgaagcataacaatatccggaaatagttatatgtgctggaccttatgccaagtgttatatatgaatgatctcatctaattctcttacccacttttgctttagagttatttttcttacctacagatgaagaaactagggttcataaggtgaagaaatgcattcaggattacacttgtaggaagtatcagagccagaattgacaccaggtcatctggttccaaggcttaggctggaaatcaccatattctcaagggccatgatacccgatgttggagctggagagggagtgcccagtctggtaggcagctgcctaggggatctggaggaaggtggaaga

SEQ ID NO: 552254 - DNA, 940 bp, Homo sapiens
ctaggacaatcccaatttttgtaccttctggtctgggtctctttggcctatttctatactctcttctttgtatctaacctggctctttcctcttataacttatttaatttattcttgtgctattattggcaatggtggagaataacatgtcacaacccttcctataaatatcttctcatatgcttgcagttcgtaaacctattctcaatcctgctatgaaccaagtagyatgattcaacaaccttctcccaccagtcctatgtactgagcctttaacaaggttttctgaaaagagaggtgtcaatttcactgtgttcccagaagtgacaggggtctattttttctccattcagagtggaaataataaaaagaggaagaatcacagtgaattgatttgggggttgatcaccaacccttccttaaaaatgtgtacatgtgaatgtcctttcacacaaatgcaatcacagaatttccccggagcacattagacctggtgatatgttagactctcagcataccagattggtggggaaaaggctaaagtcataacaaaaaggaaccagagcaaggccagggacagctcctaccccagttaaccagttatgaagcataacaatatccggaaatagttatatgtgctggaccttatgccaagtgttatatatgaatgatctcatctaattctcttacccacttttgctttagagttatttttcttacctacagatgaagaaactagggttcataaggtgaagaaatgcattcaggattacacttgtaggaagtatcagagccagaattgacaccaggtcatctggttccaaggcttaggctggaaatcaccatattctcaagggccatgatacccgatgttggagctggagagggagtgcccagtctggtaggcagctgcctaggggatctggaggaaggtggaaga

SEQ ID NO: 552255 - DNA, 644 bp, Homo sapiens
caacctggtagactgttttttgtagcaataggccttgatgctaggctgtaatggatgccatggggtacctcctacaacccctgtacaggtctaaaaccctcatttccctacttctgggagttttagcagccagcagttttcagctgaattcttttttggaacttgccttcaactaaacagagctgactctcacaatttttgyctcttccctggatttagaggcacatttgatgaccggtcaacataggggtataaatgcctggtccccctgttcaactttagacaactctgaagggccaactcagcttcataactttacatagaattgaccaatgtcaatattgctatagcatcactctgcccaatcttgctacctttattcctccacaggtgtggattctgaaagcattcctacaataaatattctgctcgtaaattcccatctcactgtctgcttcccagggaacccaacctatgacaggcagtgccaggagtctaagagacaaaattctaaaatgagattactggaactcagttagataacttgcagactggcaggcaataaggaccccaaaaatggtgattggtggagcatggacattccttggcatataacagtggagtaattattaaaattctcccca

SEQ ID NO: 552256 - DNA, 2337 bp, Homo sapiens
atggcagccttggcaaactaaaacagtcaattctaactctaacagtgtttcattctagtactatgaacataaaatgtctttatgtataaagatcaaaatttattaaagtgaatgtaaaataatattgtacaagtgataagcaaatttttaaaaaattctacaaagtaatcatcagctctcagaagtttaatcaaatatcagtgacaacttctagagggacttaatagtttatatagtgttttcacataaattattttatctcatcaactaacgaattagaaaatgttgtaggtcagaggattaaccccaggtcccaggcctctataacacagagattagctcccttttcttcataaaagaacagagaaggccgggcacggtggctcacgcctgtaatcccagcactttgggaggccgaagcaggcggatcacgaggtcaggagatcgagaccatcctggctaacacrgtgaaaccctgtgtctactaaatatacaaaaaattagccgggcgtggtggcaggcgcctgtagtcccagctactcgggagactgaggcaggagaacggcatgaacccaggaggcagaggttgcagtgagccgagatcgtgccactgcactccaacctgggcgacagggcgagactccatctcaaaaaaaaaaaaaaaaaaaaaaagaacagaggaaaaaagttttccaagtaagttttactgaaaatgggaaggtgggaatgaggagccaccagaaaaggcatttgaaggtaatggctggttctcaccgtattgtccctcatccctttagtaagtgctgtctgcggggtactgtgtcagcatgactggaaaaaatgcaaagttccaagtcttcatttctgccctcagaaagattattatcaattaagaaaataagatatgaacaggagatataaataaggatagaaaataagtcacaaacacgtgtcatctaaaagaagtgaatgaaaactattgtggaggaaaacgagagtttcagactttttgctgtgatacctgggaaaaaagatgaaatctgagttttaaaaaaacccagagcctatggataaggggaggaggattgacaggtaacttgttacttccagtggctggaaaattagtaacctaaccaatggcctgcttaaagttatttgaaataacttccttaaccccagtgattataactttatttttgccatgtttctgtcatgtttattatttaaaatatttttaatgcgtctgttttgggacagcttaacctgggaatctgggctttatccaattacctaaatttagctcattggtcagagatggttccattattccaacatcgtgatttcctcaagatgaccttgcaggggtgataatcacctacttggagcaaaaaagccatctatggtaacaaggggacatttgtcaaagttacggccatctcatatcagtacctgttcgcaatatattacctatatttggatcctgaaccaccttcactctcagtctgggaatctgaatgttttcctccacatgtggctttttggtctcctacttggcttcatccatcaaatgtaacttctgccttctctgttgagcatgtattactgacctcactgctgaaaccatttgtataaactttacaaagttaatcagagaagaagggatagggagaaaggaaaaaaaaccgagtttgcagcacactcaccttgatcaccaggtcagctgctctccgacctgcttcctcagagttgtttcatgcctcttgcctcagaatcgcatagaccctgttacaggattatagttccccttaattgctctacagataacaacttgaacaatatgaaatgttaagcttttcatttctttcaagtcctgcttaacggtgaaactactgacgtcagctggtctgaaggacccaaagaagctgactcactaaagaatgcagtttccacatcctgatgatttttttttattattttatttttatttttgagacggagtctcgctctgttgcccaggctggagtgcagtggcacgatctcggctcactgcaagctctgcctcccaggttcacgccattctcctgcctcagcctcccgaggagctgggactacaggcgcccctaccacgcccagctaattttttgtattttttagtagagacggggtttcaccgtgttagtcaggatggtctcgatctcctgacctcatgatctgcccgccgcagcctcccaaagtgctgggagtacacgcgtgagcaccgcgcccggcgcacatgctgatgatggtatcccgcttatcctgatgctatcaagaggcccaatctgtcaagccctcacc

SEQ ID NO: 552257 - DNA, 2337 bp, Homo sapiens
atggcagccttggcaaactaaaacagtcaattctaactctaacagtgtttcattctagtactatgaacataaaatgtctttatgtataaagatcaaaatttattaaagtgaatgtaaaataatattgtacaagtgataagcaaatttttaaaaaattctacaaagtaatcatcagctctcagaagtttaatcaaatatcagtgacaacttctagagggacttaatagtttatatagtgttttcacataaattattttatctcatcaactaacgaattagaaaatgttgtaggtcagaggattaaccccaggtcccaggcctctataacacagagattagctcccttttcttcataaaagaacagagaaggccgggcacggtggctcacgcctgtaatcccagcactttgggaggccgaagcaggcggatcacgaggtcaggagatcgagaccatcctggctaacacagtgaaaccctgtgtctactaaatatacaaaaaattagccgggcgtggtggcaggcgcctgtagtcccagctactcgggagactgaggcaggagaacggcatgaacccaggaggcagaggttgcagtgagccgagatcgygccactgcactccaacctgggcgacagggcgagactccatctcaaaaaaaaaaaaaaaaaaaaaaagaacagaggaaaaaagttttccaagtaagttttactgaaaatgggaaggtgggaatgaggagccaccagaaaaggcatttgaaggtaatggctggttctcaccgtattgtccctcatccctttagtaagtgctgtctgcggggtactgtgtcagcatgactggaaaaaatgcaaagttccaagtcttcatttctgccctcagaaagattattatcaattaagaaaataagatatgaacaggagatataaataaggatagaaaataagtcacaaacacgtgtcatctaaaagaagtgaatgaaaactattgtggaggaaaacgagagtttcagactttttgctgtgatacctgggaaaaaagatgaaatctgagttttaaaaaaacccagagcctatggataaggggaggaggattgacaggtaacttgttacttccagtggctggaaaattagtaacctaaccaatggcctgcttaaagttatttgaaataacttccttaaccccagtgattataactttatttttgccatgtttctgtcatgtttattatttaaaatatttttaatgcgtctgttttgggacagcttaacctgggaatctgggctttatccaattacctaaatttagctcattggtcagagatggttccattattccaacatcgtgatttcctcaagatgaccttgcaggggtgataatcacctacttggagcaaaaaagccatctatggtaacaaggggacatttgtcaaagttacggccatctcatatcagtacctgttcgcaatatattacctatatttggatcctgaaccaccttcactctcagtctgggaatctgaatgttttcctccacatgtggctttttggtctcctacttggcttcatccatcaaatgtaacttctgccttctctgttgagcatgtattactgacctcactgctgaaaccatttgtataaactttacaaagttaatcagagaagaagggatagggagaaaggaaaaaaaaccgagtttgcagcacactcaccttgatcaccaggtcagctgctctccgacctgcttcctcagagttgtttcatgcctcttgcctcagaatcgcatagaccctgttacaggattatagttccccttaattgctctacagataacaacttgaacaatatgaaatgttaagcttttcatttctttcaagtcctgcttaacggtgaaactactgacgtcagctggtctgaaggacccaaagaagctgactcactaaagaatgcagtttccacatcctgatgatttttttttattattttatttttatttttgagacggagtctcgctctgttgcccaggctggagtgcagtggcacgatctcggctcactgcaagctctgcctcccaggttcacgccattctcctgcctcagcctcccgaggagctgggactacaggcgcccctaccacgcccagctaattttttgtattttttagtagagacggggtttcaccgtgttagtcaggatggtctcgatctcctgacctcatgatctgcccgccgcagcctcccaaagtgctgggagtacacgcgtgagcaccgcgcccggcgcacatgctgatgatggtatcccgcttatcctgatgctatcaagaggcccaatctgtcaagccctcacc

SEQ ID NO: 552258 - DNA, 1144 bp, Homo sapiens
tgtgagatgtgtgacattgagcaaatttttttgagattgctttcccttttgacaaagagaaaaaataatttctatctctgatttttaagaattagatgctacattagaggtgctaaccttggagcagatatagaaagagctcctaaaatggcaagatgctcataaatcaatgaggcaaactcctcaagggtgacaaactggggaaggaacagtgaaaagttactccagggctgtacgcagcagatctttggggcatggaggtgagaaagacttggggtaggagggatctgggaaaacttccagcagatgctatgcctgagttaagttttgaaggatgtgctggagttagcctcataaacagaaataaaagtacattctaaagtccagaggtatgaaaccatatgcctccctaacagagctctagacacagaactctaagtggtggtggagtatgatgatggaacagacatatttgtttatggtgaaggggcaggaaasgaggctgggtgttacagattgttggtagctttgtggcttaaactggtgtttaatgttatgaaaagttaagacaatgtgggggcctttgacttagagacaactgtagcccagttattagacatgggatgaaaaggatgaggaggaactggggaaggcgggcataaaacgacttggccttgttaccgtatctggcacacacgatcaaaatgggctagatagcaaaatgcttgcgctgaacctcgagagttgggcttgtgaaagctcaaacttttagacataggacaaacattttcctagggatggtggtgaaatacacttacagtgtgcatcaattggctttaaaatcctaatggtggtgggagataagacacttagacctgtgatatgcagaaatgaaatgtaacatgttctttccacctgcagctattcctttcaaaacgtagggtgtgtccagagcttccaggtggaagcacctttcagacaagtattcctcagcattagggagcagagctgaatgtgcctatggtgtcaggttgtcttcataaggaatcagctccgaactataaaagcagagagcctggagcagagtttctattactccatgaattcttgttggatgaatattgaattttattcaaaaaatttc

SEQ ID NO: 552259 - DNA, 550 bp, Homo sapiens
attggattggagcacatctattctctttctattattgtattcatcatgctttactgtaattattactaaagtaagagacctgtcttaaaaccatctctgtgtcccttaacacaatcacaaatgttttcagtaaaatgtgttgcattagtttaaaagtaaatacaattttgtattcatatgatttttatttgagaraaaaggaaagactgggcatctcaatcactgagcaagtgggcaggactctctggcaacaacatcagaaatacagccatctttttctttttccaagagcaagatccagaatcttgggactgtggtttccatttaacacgtggggaacatcccttgaggttattcagtgagtttggttttacatcaaggaattacttacagtctggcttcagccaatcctggatttaattattcatggcaattattgcttgcctattaacatctttgtttatattgactctgatgattctagtctttgattgcatgtggcttctctacctttaacatcatgcatcactcagttctccaaggtgagctg

SEQ ID NO: 552260 - DNA, 562 bp, Homo sapiens
cgtcacccgcgttcgctcacattaaatgcgcttaccccgaccctgccaggtggagcttggccgattatctcctcttagtctcctcttgttcgtagtgaagctttgcgattagacaggattagccattggtcgaggctccacagttaacgaagagctgaatgcacaggcgtcccccccttaccagggggacacttcgaaggtcctcagcacatgcttgaaaccagagagtaccaaaccgttgatgtataattttttttccatacgtktggactggtgattaagtttaatctataaattaggcacagtatgagattcacaacctctctttcgcatcttaggcttctctttagcatttccaaattgtcagcatccctactcttgcactttggggccattatttttatttttgagaccaggtctcgctctgttgtccaggctggagtgtagtggtgtgatcatagctcactacagcctcaaactcctgggctcaagtgattctcctgcctcaggctcctaagtagctgggactacagatgcacaccaccaggctcggctaattttt

SEQ ID NO: 552261 - DNA, 557 bp, Homo sapiens
ggattaataccgtctacagcgttgccttttttagaataccatcaagtctccagctatgaacacgtgagctctcacaccagctctgggcaaggacttttcaagtccaatgtacaaaagaatagataagtaaaacaatacaggacttagagaaaatgtycattttacttgaaacaaaggtttgtctaaagcctagtacattttcattcacctaaatctttccaggttggaaaaaaaggaccagggattaatttttcaacccatatctgtacctcctataaaatcagatttattttactttccatttgggaaagatattccttttaatggccatgtctacttaagaagccttcagctgaggtttaaattagattgaaatatgacctggattgtgaatgtatcactctgtctttaataccataatcgtttcatttcctagcatggttcaataaatgagagagaattcatgcaaaaatgtaagtctgtgaaaagggtgacttggaattatgctcatgattggtggagagattcatatccatgatgtcatagtcatttgaccc

SEQ ID NO: 552262 - DNA, 557 bp, Homo sapiens
ggattaataccgtctacagcgttgccttttttagaataccatcaagtctccagctatgaacacgtgagctctcacaccagctctgggcaaggacttttcaagtccaatgtacaaaagaatagataagtaaaacaatacaggacttagagaaaatgttcattttacttgaaacaaaggtttrtctaaagcctagtacattttcattcacctaaatctttccaggttggaaaaaaaggaccagggattaatttttcaacccatatctgtacctcctataaaatcagatttattttactttccatttgggaaagatattccttttaatggccatgtctacttaagaagccttcagctgaggtttaaattagattgaaatatgacctggattgtgaatgtatcactctgtctttaataccataatcgtttcatttcctagcatggttcaataaatgagagagaattcatgcaaaaatgtaagtctgtgaaaagggtgacttggaattatgctcatgattggtggagagattcatatccatgatgtcatagtcatttgaccc

SEQ ID NO: 552263 - DNA, 561 bp, Homo sapiens
gctcagaacgctcaatttgtttatctagcaaaaaaaaaaaaaaaaaaaaaaatcatttcaatgctttctatttaacaaacagagtgtgaaagagcttgcagcaaactctaaraagttgaacatgtgcatcatgacatctacatatgttatatacagattacacatatctatattatgtgtttacaaactatgaaataaacgtgacctctctctccccataccacctctttcctgttctcattttgaacctaaactcctccccctgccatcatcatcagcctatcagcttctctcttgtaattgaaaagcggcataccaggccaggtgtggtggctcacgcctgtaatccccgtaccttgggaggccgtggcaggcagaccacttgaggtcaggagtttgtgacaagcctggccaacacggcaaaaccccgcctctactaaaaatacaaaaattagcatggtggcggccgcttgtaatcccagctactcgggaggctgagactggagaatcacttgaacccgggaggcggagattgcagtgagcagagatcgcgccattgca

SEQ ID NO: 552264 - DNA, 1833 bp, Homo sapiens
gcaaaagtcagtgtgggcttttcatatgtcctttgacctcccactcaatggtacaaataatttataagcagaatttaactaaaatcctacatgatccagtgtttgaagactgttaagtcaaaagcacaaaataccaacagataaaagatagaactgaaagaaatttcaagttttcttcagttttaagaaaacataaatggggacagggtaccttttaatgtacaacaaaacatctaaaatattctttctcggtatctctttcattttttactcaaactaccactctctctgaaactcacaaccatttgctttgagactcttaactcctcctacttcttaattcatccaacaaataattatttagcacccactcaatyccaagtactattctatgccttaaagatgcagtggtaaaagaattagatgtaaatttctatctttctggatcttatgccttgtaaaaagaggcattggataggggaaaatggaggggagcagttaggccatgtattttactgagaataggatgaggaccattgcaagttttgaaggtaatctggcttacacctttaaatgatcactctggcctgggttcaggacacacaattagaggcaatggaagaagacagttaggagactgatttggtcccagatggtagcagtagacgtggtgtgtaattataagattttgaatatgtcttgaaggtagagctgataggattttgtatgaataaagaatgggatgttaaaaaaagaaaaaaaagagacgtcagaacgaccccaaaagtttggccagaacaactgggaagatgacacattggcactgactgggatggggaagaccatagaaggagcaggctgggaggctgggagtctggctgtgggtgccttttccacagcagcagagcgagcagttcagcgggaggcccaggcagtgatgttgctttgggcagaactggttcaggactgtcgcataagatttctgtgagcaacaagattataaggtttatgtggaaattcttccacaactgccagtatcaggaatgattattctgtttattttgtacttatgctctgtttctgaagaagcagggaggagcttgtttagatagacaagagcgtaatcatagcgtcttcccaagcatgaggccaagttttcataaatatcaacaaggtggtctaaaaagcttgcactgcttttctaagaatggttctctcaggaagagacgatgcatttacttttatgctaatgaagaaagaattcaatatgtgcctgaagcacagaggtcagaacactcagctggctaataaagtgagcagccttattcacacggtggggaaagagtcataaatactttcttacctgcggtgggaagctaagacaaatcttaaaatttatttaggctttgtttactctttggcccttagtcattatcaaaattgccttatccttcgacaacagaaagccagttaattattgctagtgtttggctgtagctttggtccaagttccttgctttctttctgaactactatgaaaagagcaatcaagtttgagtcagaaaatctgggtttatgtcttggttctgtgtaagcgttcagcctagtggcatttaaagaattaaataatgatacacatgtctgaaaccattctaaaaacaaatgtagttctgttatttttttctctcctgcttccttgttcttctccctttttctcaagtttcaaaacccccagggctaaaatcatgctgtaggtaaatacaagactgagtgattgattgaaaagagtcttttaatgaattgtactttttgaaaacttccccattgctcttt

SEQ ID NO: 552265 - DNA, 1833 bp, Homo sapiens
gcaaaagtcagtgtgggcttttcatatgtcctttgacctcccactcaatggtacaaataatttataagcagaatttaactaaaatcctacatgatccagtgtttgaagactgttaagtcaaaagcacaaaataccaacagataaaagatagaactgaaagaaatttcaagttttcttcagttttaagaaaacataaatggggacagggtaccttttaatgtacaacaaaacatctaaaatattctttctcggtatctctttcattttttactcaaactaccactctctctgaaactcacaaccatttgctttgagactcttaactcctcctacttcttaattcatccaacaaataattatttagcacccactcaatcccaagtactattctatgccttaaagatgcagtggtaaaagaattagatgyaaatttctatctttctggatcttatgccttgtaaaaagaggcattggataggggaaaatggaggggagcagttaggccatgtattttactgagaataggatgaggaccattgcaagttttgaaggtaatctggcttacacctttaaatgatcactctggcctgggttcaggacacacaattagaggcaatggaagaagacagttaggagactgatttggtcccagatggtagcagtagacgtggtgtgtaattataagattttgaatatgtcttgaaggtagagctgataggattttgtatgaataaagaatgggatgttaaaaaaagaaaaaaaagagacgtcagaacgaccccaaaagtttggccagaacaactgggaagatgacacattggcactgactgggatggggaagaccatagaaggagcaggctgggaggctgggagtctggctgtgggtgccttttccacagcagcagagcgagcagttcagcgggaggcccaggcagtgatgttgctttgggcagaactggttcaggactgtcgcataagatttctgtgagcaacaagattataaggtttatgtggaaattcttccacaactgccagtatcaggaatgattattctgtttattttgtacttatgctctgtttctgaagaagcagggaggagcttgtttagatagacaagagcgtaatcatagcgtcttcccaagcatgaggccaagttttcataaatatcaacaaggtggtctaaaaagcttgcactgcttttctaagaatggttctctcaggaagagacgatgcatttacttttatgctaatgaagaaagaattcaatatgtgcctgaagcacagaggtcagaacactcagctggctaataaagtgagcagccttattcacacggtggggaaagagtcataaatactttcttacctgcggtgggaagctaagacaaatcttaaaatttatttaggctttgtttactctttggcccttagtcattatcaaaattgccttatccttcgacaacagaaagccagttaattattgctagtgtttggctgtagctttggtccaagttccttgctttctttctgaactactatgaaaagagcaatcaagtttgagtcagaaaatctgggtttatgtcttggttctgtgtaagcgttcagcctagtggcatttaaagaattaaataatgatacacatgtctgaaaccattctaaaaacaaatgtagttctgttatttttttctctcctgcttccttgttcttctccctttttctcaagtttcaaaacccccagggctaaaatcatgctgtaggtaaatacaagactgagtgattgattgaaaagagtcttttaatgaattgtactttttgaaaacttccccattgctcttt

SEQ ID NO: 552266 - DNA, 1833 bp, Homo sapiens
gcaaaagtcagtgtgggcttttcatatgtcctttgacctcccactcaatggtacaaataatttataagcagaatttaactaaaatcctacatgatccagtgtttgaagactgttaagtcaaaagcacaaaataccaacagataaaagatagaactgaaagaaatttcaagttttcttcagttttaagaaaacataaatggggacagggtaccttttaatgtacaacaaaacatctaaaatattctttctcggtatctctttcattttttactcaaactaccactctctctgaaactcacaaccatttgctttgagactcttaactcctcctacttcttaattcatccaacaaataattatttagcacccactcaatcccaagtactattctatgccttaaagatgcagtggtaaaagaattagatgtaaatttctatctttctggatcttatgccttgtaaaaagaggcattggataggggaaaatggaggggagcagttaggccatgtattttactgagaataggatgaggaccattgcaagttttgaaggtaatctggcttacacctttaaatgatcactctggcctgggttcaggacacacaattagaggcaatggaagaagacagttaggagactgatttggtcccagatggtagcagtagacgtggtgtgtaattataagattttgaatatgtcttgaaggtagwgctgataggattttgtatgaataaagaatgggatgttaaaaaaagaaaaaaaagagacgtcagaacgaccccaaaagtttggccagaacaactgggaagatgacacattggcactgactgggatggggaagaccatagaaggagcaggctgggaggctgggagtctggctgtgggtgccttttccacagcagcagagcgagcagttcagcgggaggcccaggcagtgatgttgctttgggcagaactggttcaggactgtcgcataagatttctgtgagcaacaagattataaggtttatgtggaaattcttccacaactgccagtatcaggaatgattattctgtttattttgtacttatgctctgtttctgaagaagcagggaggagcttgtttagatagacaagagcgtaatcatagcgtcttcccaagcatgaggccaagttttcataaatatcaacaaggtggtctaaaaagcttgcactgcttttctaagaatggttctctcaggaagagacgatgcatttacttttatgctaatgaagaaagaattcaatatgtgcctgaagcacagaggtcagaacactcagctggctaataaagtgagcagccttattcacacggtggggaaagagtcataaatactttcttacctgcggtgggaagctaagacaaatcttaaaatttatttaggctttgtttactctttggcccttagtcattatcaaaattgccttatccttcgacaacagaaagccagttaattattgctagtgtttggctgtagctttggtccaagttccttgctttctttctgaactactatgaaaagagcaatcaagtttgagtcagaaaatctgggtttatgtcttggttctgtgtaagcgttcagcctagtggcatttaaagaattaaataatgatacacatgtctgaaaccattctaaaaacaaatgtagttctgttatttttttctctcctgcttccttgttcttctccctttttctcaagtttcaaaacccccagggctaaaatcatgctgtaggtaaatacaagactgagtgattgattgaaaagagtcttttaatgaattgtactttttgaaaacttccccattgctcttt

SEQ ID NO: 552267 - DNA, 427 bp, Homo sapiens
tgcactccagcctgagctacagagtaaaactctatctcaaaaaaaaaaaaaaaacactttcctttttcatcccctcacttaagagtattacacatagttggccagggcgcagtggctcactcctgtaatcccagcactttgggaggccaaggcgggtggatcacgaggtcaggagattgagagcatcctggctaacacggtgaaaccccgtctctactaaaaaatacaaaaaattaaccaggcggtggcatgcacctgtagtcccagctactccggaggctgaggcaggagaatggcgtgaacccgggaggcagagcttgcagtgagccgagatcgcgccactgcactccagcctgggtgacacagagagactctgtgtcaaaaaaacacacacacacacamaaaaaaaaaccagagtattactcta

SEQ ID NO: 552268 - DNA, 970 bp, Homo sapiens
ctttttatgtagctttcctgtcgtaagcccgaatttcatttcttgataattatcataggtatacataggtctaattctctccctttcctctccaaatttgctcctttcattgtgctttggccaggaaaccagataacaaagcttctgagaatgatgtataaagggagaggaaatcagttctgagggctggctcatttttctcatctacaaaatgacggagctgtaatagatcatcaccaaggtccagtccagcttgcacattttatgattcctctgaataaagtatgtgagcttttatgtgccattttcagaacatctatttgtcccatttccttattcccagccatgttctcaagaaatgagtttgctccatttgtgacctcttaaaaagtgacattatttaacttggtatttgttaactcaattcacaattcattcattcattctcaaaaaattttgagcaccttctgcatactgtgtggttgaattacgaagattcgtgcatgatctctccgtcaaggagttcacagacyagggcactgactttcaatctttcctgcagttgtgaatgaagcctgttgggactctatgacagcctgttatattagaggccagtatttactaagcacatactagatgccaggttctgttccaagtgcttcaaaagtagcttattttatcctcaaatatctacgaagtagttgtcattattatctgcatatacatgaagaaagtgagactcaggcatgggaacacacggttaataaacatttggaaccagaattcactcttcaagcaatacaaatctagagcccacattctgcttcctggggctatggtgcttgtgaaatcaatagcgacaagaacaagcacagtaaccacacagtaacaacagcagccgttttggctattctatgccacttgccatgcactgtgctaagctttcagtattaattatctaatttaagac

SEQ ID NO: 552269 - DNA, 1819 bp, Homo sapiens
gacactcttcggaagcccaatggaagttgcattcttacacaacaggaaaataaaactttccgggaatggagacatgtttctttagcctataatttgaacacaacactgactgggttgggctttgtgggaagatgcaatgagagattagacagagtctctgctctcaaggaacttaagatttggctagagagacaaaacgtggaaacaaaaaagatgacttggttagaggaacttacagggcaaatgtttgtgggaggtacaagttggaagggaggtggatgcggtggagtgttcgctgaacacttcattaagaaggtggggctgaaaggccctcattttatgggaggggaagtgggaagctgcccgcagggggcacactgctcacctttccacagtggaatttgttaagctttggtttgcttgttggaaaaagtcaatggcttgctgccagcaggcacaggtgtgcctgagcattcacaaatggcatttctttgtggagctttggaagatcatctttttgcagagcctagatatgtcctagagaaggtggaatattagttgtaggcagtgacttgttgcactggaaacagcaacaattttcagacagataagtagaacttgcttaggggtcagcaatattaaaaaaagaaatagggtactccagcctaattagcaacttttgatttagagtgagtctctatttgtgaattggatgtggcccaaattgtggtccatggactggcagcatcagcattagctgggagcttacagaattgaagaatctctgacctcactgaatttaaatctacattttaatgatatcaccagtaggcacattaaagataatcagttactgggaactcagagcatgtctttgagttcctacagggtcaaaaaatgttatttaacccatgatggttctagtcattgcatggtaaacataaacattaatttataaaattattcctatgcacaaatatattcttaggtacaacttacagccctaagaatagccactctccctctcaccaccctcaacatggccacagggcatggcaacccagtcttttgccctttgggttagtttatggggaaggtctcatgaatcctgctgagctgggaatgaacatcaggtacggtgaggaaaaagcatgggctttgtagacagatgtggctccagattgaactcacttctcagacaatatatccttctttataaaacaaagctataaaaatagagatgttacctaccctataggtttttgaagttttaaaaatatatattattaattacatctagaaaagtgactgacatattgagactattctccaaaagcaaaagcaatattaatttytacccctattccccacaagtagcttgttgtctagcttaagtcaaccattcacctctttgagactcagctttcacttctgtctaatgagaatcagggactggatgatccctaagatccttcctggggtgtacaaggagagcacacatggggatggctgctgcctcactctgctcatctttgtctcacccttgtgcttcttgggccacccttcacagcctctgccacctgtctctgaaacggaggctggcagcctagaggaattctagtattttccttgaaggacctatttctgccaggcaagttgatagcctgggtgaattgcatagtggttagaagtactaacacaaccaggatgcctgatctgagaagatggctccactgggcatccttggctgccaatgtggaaacccagatgagctccacccctctcctgagacatttgaatcctactgagagactctgta

SEQ ID NO: 552270 - DNA, 517 bp, Homo sapiens
gcctttgtgcacgcttcattaacccagatgtgattaaatccaatgttatgattcccacggaaactgcaatcttggcaaacccatacacatgtatttcatattacttcagatggtagtgacgttaaaagaatcttagaaagaataaggcacattttaattgccacatcttattacaaagaaaaccttccagaaagatgagagattagaaaactgccttcctccagggatagtggagctctttctttgagacaattaacaaagactagaccaagccctgaagaatgtcctggaagagactatccttatctggcctgaaacacacagcccagacaacttagggtttcctataaastctatttctaatatgcaagacaaccagctgcttgatgcttaaaacttcatttaaactatttaatacttccataaagtaccataaatgttaatcagatgcagacctaactttaactccaactaaaagcaacagatgaaatatctgaagtcatcacaaaatggatca

SEQ ID NO: 552271 - DNA, 602 bp, Homo sapiens
gatgaaatttgcatcatacatttgcactcaccgtaagtaaaactgtagactcattttttagccaatatagtctgtactggtctyacaactatcttgtagatgaagaaactcatttctcaccagttatgaattgtgtcaaagcaggttggtaggaatggcagtaggtatttaccacttatttgctagacaggttaagcacttaccttggctaatctcatttaatgttcacagcgaatttaaatttgtagttactgttgagattctaatcccagagctcctgttcttaaccaccattatactgcctgccatgagaaatgggccctaaagagttatttgggtcaactaaacataggtagttagggagtataaaacactccctgacaccactttaacgaatgctggagtaaatcaactttaggatgcaactttttttttgagacaagagtctcgctttgtcgcccaagctagagtgcagtggggcgttggcttcctgcaacctccggctcccaggttcaaacgattctcctgcctcagcctcccccgagtagctgggattacaggcgcccgccacccgccaccacgtcccgctaaattttgtattt

SEQ ID NO: 552272 - DNA, 661 bp, Homo sapiens
tcacttctggagttactagagcctccaccatcaggaaaactggctgtcagcatggaaattaaaggtaattaagtagcccacacactggctcttaaacttacccactcaaaaatgataaacagaatgcagtcatattacattggccacaggtagattagcctgtgcctaccatgtgtcaaaagataagctgtgaaagtwacagagatctctctaataaagtaacattaataaacccagatctgatttcttattggaggctgaaaactcaactattctaaaatatgaattagatcccagatctatgtgatctatcaaaaattaatacattgctctacttcaaattgttgttgcattgaaagagatagttcacgtaaagcacttagcaaagtgtctggaaactagttcaaaattattatccatcattactatcattatcactaccctttaaaatccctttgaattaaattataagtctcccttaaacaatgaaatataaaaacatatctaaagtgagtaaaccaatattaagtaattttttttcattcaaatgccattcatcagtgtaggaccatctcgtcagaagtaatttttgaatcatgtttggttgaagcagtggctactcactgattggcatgtaagtgatgctctaaatcagagcaat

SEQ ID NO: 552273 - DNA, 661 bp, Homo sapiens
tcacttctggagttactagagcctccaccatcaggaaaactggctgtcagcatggaaattaaaggtaattaagtagcccacacactggctcttaaacttacccactcaaaaatgataaacagaatgcagtcatattacattggccacaggtagattagcctgtgcctaccatgtgtcaaaagataagctgtgaaagttacagagatctctctaataaagtaacattaataaacccagatctgatttcttattggaggctgaaaactcaactattctaaaatatgaattagatcccagatctatgtgatctatcaaaaattaatacattgctctacttcaaattgttgttgcattgaaagagatagttcacgtaaagcacttagcaaagtgtctggaaactagttcaaaattattatccatcattactatcattatcactaccctttaaratccctttgaattaaattataagtctcccttaaacaatgaaatataaaaacatatctaaagtgagtaaaccaatattaagtaattttttttcattcaaatgccattcatcagtgtaggaccatctcgtcagaagtaatttttgaatcatgtttggttgaagcagtggctactcactgattggcatgtaagtgatgctctaaatcagagcaat

SEQ ID NO: 552274 - DNA, 982 bp, Homo sapiens
ccccattttaaagataataaaactgattatcagatcatttataaattatttgttcatcaacacagtaaaaccttggcaggaacaagtttcagacccatgcatgctattttagaactttgctcttacctagagaacaagacacagttgtcaaaagatggctctaggccagacgcagtggctcacgctcactttgggaggctgaggcaggtggatcgcctgaagtcaggagttcaagaccagcctggtcaacatggtgaaacctggtctctaccaaaaatatgaaaattagccgtgcatggtggcgggtgcctgtaatcccagctactcgggagattgaggcaggagaatcgcttgaacccaggagaagaaggttgcagtgagccaaggttgggccactgcactccagcctggcgacaagagcaaaactccggctcaaaaaaaaaaaaaaagatggctctagaagaatataacataaaaaatataaaaaacgatcagctttggtagagaaaatgtctgcttgggtaataattacgtagaataaaacagtaggattttgtcaggaaagaaacttgaatattccagacagataaagcaccaaggcaccaacaatgtgcaaaggccacasgaaattaaccgggcttgaaaagggaaggtagggaattgtatgggaagagtagtgtggctgacgttgagaggatgtgtgcatgagaaagccaggactcgatcatttgtgtgagaatgtcgttgtgaccatctgggccatgtctttctcctacattaaacttgaagtgccatgaaggcagagaatatttctatattatttacatttttttctcaacatcaatttcattgccttttgtgttgaatgaatgaatgaatgaatgaatgatttaattatggcttgatgggtgggttggagttagattctgtagggccattaaggttctttggatgtttatggaggaaagtgacagacggcaca

SEQ ID NO: 552275 - DNA, 982 bp, Homo sapiens
ccccattttaaagataataaaactgattatcagatcatttataaattatttgttcatcaacacagtaaaaccttggcaggaacaagtttcagacccatgcatgctattttagaactttgctcttacctagagaacaagacacagttgtcaaaagatggctctaggccagacgcagtggctcacgctcactttgggaggctgaggcaggtggatcgcctgaagtcaggagttcaagaccagcctggtcaacatggtgaaacctggtctctaccaaaaatatgaaaattagccgtgcatggtggcgggtgcctgtaatcccagctactcgggagattgaggcaggagaatcgcttgaacccaggagaagaaggttgcagtgagccaaggttgggccactgcactccagcctggcgacaagagcaaaactccggctcaaaaaaaaaaaaaaagatggctctagaagaatataacataaaaaatataaaaaacgatcagctttggtagagaaaatgtctgcttgggtaataattacgtagaataaaacagtaggattttgtcaggaaagaaacttgaatattccagacagataaagcaccaaggcaccaacaatgtgcaaaggccacagraaattaaccgggcttgaaaagggaaggtagggaattgtatgggaagagtagtgtggctgacgttgagaggatgtgtgcatgagaaagccaggactcgatcatttgtgtgagaatgtcgttgtgaccatctgggccatgtctttctcctacattaaacttgaagtgccatgaaggcagagaatatttctatattatttacatttttttctcaacatcaatttcattgccttttgtgttgaatgaatgaatgaatgaatgaatgatttaattatggcttgatgggtgggttggagttagattctgtagggccattaaggttctttggatgtttatggaggaaagtgacagacggcaca

SEQ ID NO: 552276 - DNA, 982 bp, Homo sapiens
ccccattttaaagataataaaactgattatcagatcatttataaattatttgttcatcaacacagtaaaaccttggcaggaacaagtttcagacccatgcatgctattttagaactttgctcttacctagagaacaagacacagttgtcaaaagatggctctaggccagacgcagtggctcacgctcactttgggaggctgaggcaggtggatcgcctgaagtcaggagttcaagaccagcctggtcaacatggtgaaacctggtctctaccaaaaatatgaaaattagccgtgcatggtggcgggtgcctgtaatcccagctactcgggagattgaggcaggagaatcgcttgaacccaggagaagaaggttgcagtgagccaaggttgggccactgcactccagcctggcgacaagagcaaaactccggctcaaaaaaaaaaaaaaagatggctctagaagaatataacataaaaaatataaaaaacgatcagctttggtagagaaaatgtctgcttgggtaataattacgtagaataaaacagtaggattttgtcaggaaagaaacttgaatattccagacagataaagcaccaaggcaccaacaatgtgcaaaggccacaggaarttaaccgggcttgaaaagggaaggtagggaattgtatgggaagagtagtgtggctgacgttgagaggatgtgtgcatgagaaagccaggactcgatcatttgtgtgagaatgtcgttgtgaccatctgggccatgtctttctcctacattaaacttgaagtgccatgaaggcagagaatatttctatattatttacatttttttctcaacatcaatttcattgccttttgtgttgaatgaatgaatgaatgaatgaatgatttaattatggcttgatgggtgggttggagttagattctgtagggccattaaggttctttggatgtttatggaggaaagtgacagacggcaca

SEQ ID NO: 552277 - DNA, 982 bp, Homo sapiens
ccccattttaaagataataaaactgattatcagatcatttataaattatttgttcatcaacacagtaaaaccttggcaggaacaagtttcagacccatgcatgctattttagaactttgctcttacctagagaacaagacacagttgtcaaaagatggctctaggccagacgcagtggctcacgctcactttgggaggctgaggcaggtggatcgcctgaagtcaggagttcaagaccagcctggtcaacatggtgaaacctggtctctaccaaaaatatgaaaattagccgtgcatggtggcgggtgcctgtaatcccagctactcgggagattgaggcaggagaatcgcttgaacccaggagaagaaggttgcagtgagccaaggttgggccactgcactccagcctggcgacaagagcaaaactccggctcaaaaaaaaaaaaaaagatggctctagaagaatataacataaaaaatataaaaaacgatcagctttggtagagaaaatgtctgcttgggtaataattacgtagaataaaacagtaggattttgtcaggaaagaaacttgaatattccagacagataaagcaccaaggcaccaacaatgtgcaaaggccacaggaaaktaaccgggcttgaaaagggaaggtagggaattgtatgggaagagtagtgtggctgacgttgagaggatgtgtgcatgagaaagccaggactcgatcatttgtgtgagaatgtcgttgtgaccatctgggccatgtctttctcctacattaaacttgaagtgccatgaaggcagagaatatttctatattatttacatttttttctcaacatcaatttcattgccttttgtgttgaatgaatgaatgaatgaatgaatgatttaattatggcttgatgggtgggttggagttagattctgtagggccattaaggttctttggatgtttatggaggaaagtgacagacggcaca

SEQ ID NO: 552278 - DNA, 982 bp, Homo sapiens
ccccattttaaagataataaaactgattatcagatcatttataaattatttgttcatcaacacagtaaaaccttggcaggaacaagtttcagacccatgcatgctattttagaactttgctcttacctagagaacaagacacagttgtcaaaagatggctctaggccagacgcagtggctcacgctcactttgggaggctgaggcaggtggatcgcctgaagtcaggagttcaagaccagcctggtcaacatggtgaaacctggtctctaccaaaaatatgaaaattagccgtgcatggtggcgggtgcctgtaatcccagctactcgggagattgaggcaggagaatcgcttgaacccaggagaagaaggttgcagtgagccaaggttgggccactgcactccagcctggcgacaagagcaaaactccggctcaaaaaaaaaaaaaaagatggctctagaagaatataacataaaaaatataaaaaacgatcagctttggtagagaaaatgtctgcttgggtaataattacgtagaataaaacagtaggattttgtcaggaaagaaacttgaatattccagacagataaagcaccaaggcaccaacaatgtgcaaaggccacaggaaatyaaccgggcttgaaaagggaaggtagggaattgtatgggaagagtagtgtggctgacgttgagaggatgtgtgcatgagaaagccaggactcgatcatttgtgtgagaatgtcgttgtgaccatctgggccatgtctttctcctacattaaacttgaagtgccatgaaggcagagaatatttctatattatttacatttttttctcaacatcaatttcattgccttttgtgttgaatgaatgaatgaatgaatgaatgatttaattatggcttgatgggtgggttggagttagattctgtagggccattaaggttctttggatgtttatggaggaaagtgacagacggcaca

SEQ ID NO: 552279 - DNA, 982 bp, Homo sapiens
ccccattttaaagataataaaactgattatcagatcatttataaattatttgttcatcaacacagtaaaaccttggcaggaacaagtttcagacccatgcatgctattttagaactttgctcttacctagagaacaagacacagttgtcaaaagatggctctaggccagacgcagtggctcacgctcactttgggaggctgaggcaggtggatcgcctgaagtcaggagttcaagaccagcctggtcaacatggtgaaacctggtctctaccaaaaatatgaaaattagccgtgcatggtggcgggtgcctgtaatcccagctactcgggagattgaggcaggagaatcgcttgaacccaggagaagaaggttgcagtgagccaaggttgggccactgcactccagcctggcgacaagagcaaaactccggctcaaaaaaaaaaaaaaagatggctctagaagaatataacataaaaaatataaaaaacgatcagctttggtagagaaaatgtctgcttgggtaataattacgtagaataaaacagtaggattttgtcaggaaagaaacttgaatattccagacagataaagcaccaaggcaccaacaatgtgcaaaggccacaggaaattmaccgggcttgaaaagggaaggtagggaattgtatgggaagagtagtgtggctgacgttgagaggatgtgtgcatgagaaagccaggactcgatcatttgtgtgagaatgtcgttgtgaccatctgggccatgtctttctcctacattaaacttgaagtgccatgaaggcagagaatatttctatattatttacatttttttctcaacatcaatttcattgccttttgtgttgaatgaatgaatgaatgaatgaatgatttaattatggcttgatgggtgggttggagttagattctgtagggccattaaggttctttggatgtttatggaggaaagtgacagacggcaca

SEQ ID NO: 552280 - DNA, 531 bp, Homo sapiens
agaaagcaatctatttcaccatgagtctggaacagctttaacaagtctgagatacacaatagcagcaatttcaactttgctagcactctattatgctgaagtatctcatggtgstttgtgatagcattaagagttcatctatcctagaggttcaatagttaaaaatcagttccgtatcactttcattacatttggtctaaaagcaggttagtaaagtagtggtacctgtttattttttagacaccattataaaataagaaccgacaacacggaaagaagtatcattatggtaggtatatactggactgcctttcctccaaaagctggagcctatcttccccttttaacattcaaccttcaacacttcagcattgtctcttcagcatgacatgttctaagacattcttcccactcacatgtgtcatgaatatgcactcacttgatttcatctgggtacgtctacctagctaagccccatccatcagaaatatacatcatcatcaggtagttaaggacacttgcactctggcg

SEQ ID NO: 552281 - DNA, 1409 bp, Homo sapiens
aaggaagagggtcaattgtttgagattattagagtgtaaataattcacagagaaagggagatatttgcaataattatgaaagaagaagccagatttggcaatttcttggataaaaagtataacctcacccactccaggaaaacctcccagaaaatagtatgcttgagggtgctagctatctattgctgcaaaaggaatgaccacaaacctagcggcttaaaacaactcccttgctatttcccagtttctgtaggtcaggaatctgggtatggatcccctgcttcaggatctcttaccaggctgcaattgatttgtcagctggggctgtggtcttatcctaaggttggactggggaagaatctacttctaagttcatgtgattgttggtaggattcagttacttgctggctgttgtccagatgccacctttccttgctacatgggcctctcagtatagcagctcacaacatggtggcttgcttcatcgaaccaagcaagagagccagtctgctagtgagatgaaagttacagccttatgcaatgtaatctcagaagtgggatgctgtcatctttgccataatctactggttagacacaagtcccaggtcttgcctacacttagagggaaaggataaaacaggggcaaaaatagcaggaggggggatcatggaagcccacttagaataaccatcatattggaaagcctggaattcttccaaatacttaagaaaacttgtagaaagaggcagttaaggagaatgatgaaactatatcaaactacttagtttgccaaaaagacagacaaaatagacctaaaggcaccttgagacagagtatttggcagagaatattcagagaagtcaagatgaactgaccacatatggctcatagaaaaatataaaatgtctcccaaaataagcatcatcagtgaaaaatggagatacaaatgtaagaagaaacaagggagtaattgattttaaaatgaacaaaataagctaaactacttctatgaaagtaaaggcagttaatctggatagaagtaacacttctttaagtctcaaatatagaagttaaaggaaacttaggacagaaaaaaggcattttacaactttatgtaaatagactcctttaagcaaraggagtggaaataagactggagagatttaggggctagcaattacagggagtgagaataaactacctggtttagtatgtaagtgacagaaagaggagggaagggaaaaaactagcagaagcagtgggatccaaagagatagagaaaggtcagcccaagcctgggcaacatggcgagaccccgtctctacaaaaaaattaaaaaaatattcaggcatggtggcaagcacctgtagtcacagctacttgggatgctgagacaggaggattgcttg

SEQ ID NO: 552282 - DNA, 631 bp, Homo sapiens
tgcagcttgagctaaagaaaaagggctgggcgcacggctcatgcctacaatcctagcattttgggaggccgaggcrggtggatcacaggaggtcaggagttcgagaccagcctggccaacatggcgaaacccagtctctactaaaaatacaaaaaaattagccgggtgtggtagtgggcacctgtaatccctgctactcgggcagctgaggcaggagaattgctggaacccaggaggcggaagttgcagtgagctgagctcgtgccactgcattccagccagggcaacagattgagattccatctcaaaaaaaaaaaaaaaaaaaaaaaagaaacattggttttatttatttaatagtacttctcaatatttaatttgtagggtaaagaaaaaaacccgaaaatacaagacaagaaaagcttaaaagtcataaaagagaatgactagaattaaaacattctaaagtcatagcactattccataaaagggtaaagatactcattaattttggcctttcctatgtttaggtataaaatgtatgattttgaaagtcacctctgaaaaaacaggaagagtgaaaaaattttaaaccaggagaaaggaaaaacatgtagaaacaattactgatagg

SEQ ID NO: 552283 - DNA, 631 bp, Homo sapiens
tgcagcttgagctaaagaaaaagggctgggcgcacggctcatgcctacaatcctagcattttgggaggccgaggcgggtggatcacaggaggtcaggagttcgagaccagcctggccaacatggcgaaacccagtctctactaaaaatacaaaaaaattagcygggtgtggtagtgggcacctgtaatccctgctactcgggcagctgaggcaggagaattgctggaacccaggaggcggaagttgcagtgagctgagctcgtgccactgcattccagccagggcaacagattgagattccatctcaaaaaaaaaaaaaaaaaaaaaaaagaaacattggttttatttatttaatagtacttctcaatatttaatttgtagggtaaagaaaaaaacccgaaaatacaagacaagaaaagcttaaaagtcataaaagagaatgactagaattaaaacattctaaagtcatagcactattccataaaagggtaaagatactcattaattttggcctttcctatgtttaggtataaaatgtatgattttgaaagtcacctctgaaaaaacaggaagagtgaaaaaattttaaaccaggagaaaggaaaaacatgtagaaacaattactgatagg

SEQ ID NO: 552284 - DNA, 631 bp, Homo sapiens
tgcagcttgagctaaagaaaaagggctgggcgcacggctcatgcctacaatcctagcattttgggaggccgaggcgggtggatcacaggaggtcaggagttcgagaccagcctggccaacatggcgaaacccagtctctactaaaaatacaaaaaaattagccgggtgtggtagtgggcacctgtaatccctgctactcgggcagctgaggcaggagaattgctggaacccaggaggcggaagttgcagtgagctgagctcgtgccactgyattccagccagggcaacagattgagattccatctcaaaaaaaaaaaaaaaaaaaaaaaagaaacattggttttatttatttaatagtacttctcaatatttaatttgtagggtaaagaaaaaaacccgaaaatacaagacaagaaaagcttaaaagtcataaaagagaatgactagaattaaaacattctaaagtcatagcactattccataaaagggtaaagatactcattaattttggcctttcctatgtttaggtataaaatgtatgattttgaaagtcacctctgaaaaaacaggaagagtgaaaaaattttaaaccaggagaaaggaaaaacatgtagaaacaattactgatagg

SEQ ID NO: 552285 - DNA, 1502 bp, Homo sapiens
tgtgcaaattacatgccatgttaaaacaaaatgatggaaaataaataagattaggacaaattttaaataaatagctatctaaatcaattagaaccttaggcaaaagtaccaaacactacaggttctaataagccacacaaaaaattccaacacctgatacaaatgccttacccagtcgagttaacaaagtaaagttcttggttcaggctactgactatgttggaactgggtatgtctgagacatatgggtctatagctggatattcatattaatagttaacatttaatgtacattattggatctaacactagttaataactaacatttaatgtgcattattgcatttaacgcaaaccattaaaccagtcttatgaagtggtttcttaggctaccaattattaagtaacttgaggatcagagaggttaagtagcttctctaaggttacacagtactaactagcagaatttgaatccacgtctatccaaatccaggttcccctcctatgtgctgtactcctctgcctctcatggtaggaagtgagcatttctagaatctggctggactactacaaaactgtacaacctgtctgatacctgtctccagactaagaagttttccccatcagaaagttgttggtacctaaactcctcaaaacatcttttaaaagtaatttgctgtctctaaggaagggctgcgttagaagatacaactctcccaggaaaaaagacgggcatctcatatgcttagtagtacaaaaccttacttttatcttcaaagcttaattctaacctcttgagaaattaaacaaagtaagaataataaagggaaaacttgagatgcaagaaacagctattctctgtacatacaagtttaagctgtgtttaagctggatactagtatataaaacttcctggttacagctaaaagtttatcagtaaagaaacatggaggttgggtgtggtagctcacatgtgtaatgccagcactttaggaggccaagatgggggcactccttgagcccaggagtttgaggccagcctgggcagcatagcaagaccccatctctacaaagaaataaaaaataaaaccattagccaggcgtggtggcgtgtacctatagtcccagctactcgggaggctgaggtgggaggattgcttgagcctgggagggtgaggccccagggagctgtgactgcaccactgcattccagcctgggtgacagagcgagaccctgttttcaggaaaaaaaaaaaaaaaaaaraaaaaaaaattcttacacttataattaatgtagccatgtgaagtattttaatacttgtatatattaagcactgtgtcagtgtgtgtgcactgctgagaagtgagccctggtggaggcttcgaagagcatcctggaaccccctaggctccgagaagtcctgaggtcagggagtttgcagagagcagccttggctcaatgctacagaagccagaggaggtggaatctgcaaatctccaaa

SEQ ID NO: 552286 - DNA, 1502 bp, Homo sapiens
tgtgcaaattacatgccatgttaaaacaaaatgatggaaaataaataagattaggacaaattttaaataaatagctatctaaatcaattagaaccttaggcaaaagtaccaaacactacaggttctaataagccacacaaaaaattccaacacctgatacaaatgccttacccagtcgagttaacaaagtaaagttcttggttcaggctactgactatgttggaactgggtatgtctgagacatatgggtctatagctggatattcatattaatagttaacatttaatgtacattattggatctaacactagttaataactaacatttaatgtgcattattgcatttaacgcaaaccattaaaccagtcttatgaagtggtttcttaggctaccaattattaagtaacttgaggatcagagaggttaagtagcttctctaaggttacacagtactaactagcagaatttgaatccacgtctatccaaatccaggttcccctcctatgtgctgtactcctctgcctctcatggtaggaagtgagcatttctagaatctggctggactactacaaaactgtacaacctgtctgatacctgtctccagactaagaagttttccccatcagaaagttgttggtacctaaactcctcaaaacatcttttaaaagtaatttgctgtctctaaggaagggctgcgttagaagatacaactctcccaggaaaaaagacgggcatctcatatgcttagtagtacaaaaccttacttttatcttcaaagcttaattctaacctcttgagaaattaaacaaagtaagaataataaagggaaaacttgagatgcaagaaacagctattctctgtacatacaagtttaagctgtgtttaagctggatactagtatataaaacttcctggttacagctaaaagtttatcagtaaagaaacatggaggttgggtgtggtagctcacatgtgtaatgccagcactttaggaggccaagatgggggcactccttgagcccaggagtttgaggccagcctgggcagcatagcaagaccccatctctacaaagaaataaaaaataaaaccattagccaggcgtggtggcgtgtacctatagtcccagctactcgggaggctgaggtgggaggattgcttgagcctgggagggtgaggccccagggagctgtgactgcaccactgcattccagcctgggtgacagagcgagaccctgttttcaggaaaaaaaaaaaaaaaaaagraaaaaaaattcttacacttataattaatgtagccatgtgaagtattttaatacttgtatatattaagcactgtgtcagtgtgtgtgcactgctgagaagtgagccctggtggaggcttcgaagagcatcctggaaccccctaggctccgagaagtcctgaggtcagggagtttgcagagagcagccttggctcaatgctacagaagccagaggaggtggaatctgcaaatctccaaa

SEQ ID NO: 552287 - DNA, 544 bp, Homo sapiens
gtctataaatgtatttgcctgactaagcaaaaatatctcccgaaagatactcaagaaaatggccccactggttttctccaggaaagagtcactagacgcaggagcaggaaaggagatttttaccagatgctttttggttcattttaaattttgtactaatatacaactattgccaactcaaaaatatttaatttttaaaaratcgttgcaggagtgaaaatacaccagccgttgaagcgtgtatgcggccctggagaccgtgggttggagcggatgccttaggtatctgcttcgctgtagggactaacaccggacttcagggctcgcagggggctggagtcctgggtcttaccttgagtgagtcactgacccctctggcctcccctctgccctcaggttcctcatctgtggccaccctgcgacaggaatagacgtagcctatgcatctacagatctaggcgtgaggtgggcctctcctcctaggcaaggcaggggctcaggtgctcactgcagcatagtgcagttctgcttccgaagccaacac

SEQ ID NO: 552288 - DNA, 544 bp, Homo sapiens
gtctataaatgtatttgcctgactaagcaaaaatatctcccgaaagatactcaagaaaatggccccactggttttctccaggaaagagtcactagacgcaggagcaggaaaggagatttttaccagatgctttttggttcattttaaattttgtactaatatacaactattgccaactcaaaaatatttaatttttaaaagatcgttgcaggagtgaaaatacaccagccgttgaagcrtgtatgcggccctggagaccgtgggttggagcggatgccttaggtatctgcttcgctgtagggactaacaccggacttcagggctcgcagggggctggagtcctgggtcttaccttgagtgagtcactgacccctctggcctcccctctgccctcaggttcctcatctgtggccaccctgcgacaggaatagacgtagcctatgcatctacagatctaggcgtgaggtgggcctctcctcctaggcaaggcaggggctcaggtgctcactgcagcatagtgcagttctgcttccgaagccaacac

SEQ ID NO: 552289 - DNA, 544 bp, Homo sapiens
gtctataaatgtatttgcctgactaagcaaaaatatctcccgaaagatactcaagaaaatggccccactggttttctccaggaaagagtcactagacgcaggagcaggaaaggagatttttaccagatgctttttggttcattttaaattttgtactaatatacaactattgccaactcaaaaatatttaatttttaaaagatcgttgcaggagtgaaaatacaccagccgttgaagcgtgtatgcggccctggagaccgtgggttggagcrgatgccttaggtatctgcttcgctgtagggactaacaccggacttcagggctcgcagggggctggagtcctgggtcttaccttgagtgagtcactgacccctctggcctcccctctgccctcaggttcctcatctgtggccaccctgcgacaggaatagacgtagcctatgcatctacagatctaggcgtgaggtgggcctctcctcctaggcaaggcaggggctcaggtgctcactgcagcatagtgcagttctgcttccgaagccaacac

SEQ ID NO: 552290 - DNA, 648 bp, Homo sapiens
atatctaattttagctgttattttcctttggcaaacccagctgagaggctagaacagaagtgaaggggaactaatcttggctgcacaccataacctaccagaccccagggggggccacaaagctgggtgtgcatgggcttggccagcctggtggggcagcaggcacccagtagatcaagacacagtccccagctgggagtgagatccaatcatggcaggtggaaaggggcccgggctgagggttgggggaggcacggctaaaaccctgcctaacatgcccagagagaaggtcacattgcccccgaatcaggaagtgcgcccagggcagtgagggccgggcattccaggcacaggaagccccgggggaaaagcgtggcttccaagaagtgattgcctggcttcctcttcaggaggaggagggagtgactggggggctgtggtgatggggcgggggctgtggagaacagatgaagtcagaaatacaggcgatgccgrtcaagaagagcctcagcccagttaagccgggaagcctgggcctgaaccggttcagtctaagcaggagagcccagataagatttgtttttcttttttatttaaggaagaggctggactggaggagcaggaaatgggcagggcatgccctgtaaa

SEQ ID NO: 552291 - DNA, 586 bp, Homo sapiens
ttcacttcaccaagggtatatgaacagcctactagaaatgttaatgagatttaagtacaatgtatgtgcaatctcttggtatttaagtggaaaagaataaaacataataatgccactaggtaaatataatctcatttatagttgcaaaaaccagttctcagaaaggttaaacacctgtccaaggtcaaggagttagttagtgggaatacactaacccataactgagtgactgcaggttacaccatggtacttcatgtgaaaataatgaaagagaacaaaaaataatacagaatattatatatcaaagagtgaaaaccacaaatacaaactgctatcagatttcatcaaatctaagacaccacaaaaygtaggacacagattattttatgaagactgattaaccaaattaaacttatacaatgcttccttacaattagaatttatatttcatactgactgtaaaaagtgttttggatttaaacatagttttgctcatatatatttctgtgctttcctaaaaagtcatagttcaaatctcttaaatggctttgactctaagctttcaatattttgtttattccttaca

SEQ ID NO: 552292 - DNA, 1311 bp, Homo sapiens
tggctgtataactgcaaagtgggataaacgtttcatcttgattaaacgtaaggtgactcctgacaaagaactgtggttggctgactctgtggagaggcttgcaagatgctgtcatgactacatgtgggagtttgagaaaactgcaagatgcatgttgcaaaaagacatattaagctttctgctgttttccaggcactgtatcaggagctggttgggggagtgatgaacgagatagcatcctgttaacaagcagtagcagacttcccatgttacattctctcaaacagagaggaggtcaggccagatctgtttctcctcaaaaatataatctcaagaaaaatcaactggtcggatcatcactacctaaccacagatctccctccttattcttcacaacaagaatccgtcaaataagtaacgtcatggttaatgctcctccacattcaacctggaccctaaatccctctaaataacttgactctgttcatacacagaccacccactttaccagtctcaaaggatggaccagaacaactatttccttgagttaatgagtgaacctacatctaactgtaaataaaacactaaaaataggtaactattacttactaaatgaaacccaagtgtaactttccattaaactcaacctgaataaagtttttaaacagtgaaccttttaaaacagaaaccagtctgtaagcatcctaaagctagtcaaccaagacagaagttaaaacacaagtattttccaatcaaactcagcaccattccaactgaagcttccacttggggctgtgaaaccctctttggacgtaagctatgctgaacctgtggtttcaggcaggttatattgtaatgataggggaaaccaatgccacatccacttgcagtgtctgtagagaactacatcttgccacacatccaagatctcattcctcagtctccctgaaaaattctgttggtaagagagaagtgagacagtgctgtttccgaggaatcttatgcctctctttattctacaacaaatggagacagatggaaatagaagaagaggcagcaacargacaggagaaaggaaagaaaggggaaaggaaggtaacagaagggcaacgggggaaggggaaaatagacaaatcatagcagaatgcccagacacgacacaggtcaggtgacagaaaggacaaaaaagatgggagaagaaaaccaagaatgaggccagaagaagggagaggagacaccatggtgatgggagcagtagagagtgtaacagaagtaggatggagaaataaagcaagcaaacaaattgctccc

SEQ ID NO: 552293 - DNA, 641 bp, Homo sapiens
agaagtttaaaattagacagcataaatgctctcttatctggtactaaaaaatccatacaaaaaactttaattccaaaatagtttgcaaggtaaggaaaattaattatatttctgcttaaaacctgtttaaagccatttcaaaaatgttatcataaggcataggatccccaagaatgccaaaactcttaaaaaaaaataacattaagaggccaggygcgttggctcacgcctgtaatcccagcactttgggaggccgaggcgggcggatcacaaggtcaggagatcgagaccatcctggctaacatggtgaaacaccgtctctactaaaaatacaaaaaaattagccgggcatggtggtgggcgcctgcagtcccagctactcgggaggccgaggcgggagaatggcgtaaacccgggagacggagctcagccgagtttgcagtgagccgagatcagcctgggcgacagagggagactccgtcaaaaataaaaacgaaaaacaaaacacacacacacacacacacacaaaattaagattattgtaaatttggggaatgacagtagcctcagattcaaagctagattcagtcacaatgtaataaacaaaaatatatgcagccaaattgggctcccccaactct

SEQ ID NO: 552294 - DNA, 536 bp, Homo sapiens
atctgtacaaaacatctgatttcacttttcaaaatctttaggtagtaaagttaaaatctaaaggtcaaagattgctgggtatggtagctcacgcctgtaattccaacactctaggaggccgaggcgggcrtatcgcttgagcccaggggtttgagaccagctagggcaacaaggcaaaaccccatctctacaaaataaaaatacaataatgagctgggcatggtggcacgcacctgtggtcccagctacttgggaggctgaggcaggaggatggcttgagcccaggatgttggggctgcagtgagctgtgactgtactactgcactccacctaggtgacagaataagaccctgtctcaaaaataaacaaataaaaataaaggtcaaagatgttacatacatcaccaaatagctgctctcttcaaaaatttcatttatcacatttcttagaaaacaaactaaaactaaatgaaacaagtctcttaatgctaaaatttcattattctgtccatttatttggaaatccttaagaatcaa

SEQ ID NO: 552295 - DNA, 536 bp, Homo sapiens
atctgtacaaaacatctgatttcacttttcaaaatctttaggtagtaaagttaaaatctaaaggtcaaagattgctgggtatggtagctcacgcctgtaattccaacactctaggaggccgaggcgggcgtatcgcttgagcccaggggtttgagaccagctagggcaacaaggcaaaaccccatctctacaaaataaaaatacaataatgagctgggcatggtggcacgcacctgtggtcccagctacttgggaggctgaggcaggaggatggcttgagcccaggakgttggggctgcagtgagctgtgactgtactactgcactccacctaggtgacagaataagaccctgtctcaaaaataaacaaataaaaataaaggtcaaagatgttacatacatcaccaaatagctgctctcttcaaaaatttcatttatcacatttcttagaaaacaaactaaaactaaatgaaacaagtctcttaatgctaaaatttcattattctgtccatttatttggaaatccttaagaatcaa

SEQ ID NO: 552296 - DNA, 635 bp, Homo sapiens
aacagcactctactgctgaggtgatgtcaagataattcagttgctaggggtcatcttggatgtttgggggaattctgttctttgagtagcattccagtctccagtgtcaactcttgtgcagttcttgttcttgtccttatttctatgtgaatcttatacaacacttttctgacttttctgctaaatgaaagaaaagaaaagaaggtgctagtactactagcagtctggggcatagcccaagaggcttatcacgagcttagcatttctttgccatctcatgttgttttcatcttcaaaattccatctacattttcctccttgagagattggtattattttttattaaaaatgttgtattcatttaaaatggataatttagagagacatggcatattttttgtttcagttacttctcataatttttggctaatgccatgtaatcccttgagatatggctacctcggtttgagacatatgatcttacaataaacttatattactttaggttatctgggtgactgttccctgaagatcctaactaatgcagtggttttagggagatayaagtgtgtgtctgtgtgtgtgtgtgtcccattccagaatgttatctgaattacaaaagtcagaaaacagga

SEQ ID NO: 552297 - DNA, 1773 bp, Homo sapiens
tgcttttgatttcatataacttagttgggtagtgaaagctaagtatatataacttaaatttttcttggagtttttcttacatttctgattgatttcttatgaaaagtgaccttaaagggcacccacattctccccaaggtggagtttgttattaatacattattagggctcagtcagaagaactccaagagttgttccctttattttgttaagttctctgtattagcttccatgtgcacctttatgtaaggactcactgtgcaggccaaacgttcctttctctagatagcttataagcatctggataaatttgcattagaaattcaattaactttatattaaaaggtcaattaacttggccatgatagagattgtttttaattactttttcttgtaggccttcttttcttgtccaagcacaagtgacactatcaaatgatagtctcattgcctgttggttgcctgaaactcatatccaaaacacacaggaaataactgtcttggttaaatgaattaataagacattctttagacaattcataactattataattttggggacttaaagtataaccaataataaagtattttagcttaaataccctctatggtattgttcatgacaattcccttcattgtctgtctttgttggtttctattttcttggtgaaagatgataataaagtaaaatgattttaatgattagttcttattacactatatcacagtgtatttcatgaaaaattaacaaataatgacattaaaaattagtgatctctgtcgggcatggtggctcatgcctgtaatctcagcactttgggaggccgaggcagacaaatcacctgaggtaaggagttcgagactagcctggccaacatggtgaaacccttctctactaaaaaatacaaaaattagacgggtgtggtggcagtttcctgtaatcccagctactcgggagactgaggcagggagaattgcttgaacccaggaggcagaggttgcagtgagccaagatcatgccactgtactctagcctgggcaacagagcgagactccatctcaaaaaacaaacaaaaaacaaaaacaaaaaatcagtgatctcatttcattagagagctcttagttatctttgtgttaatatgagccacagttcaactcattcatggggcactagaacacttatacttaagaggttcaagggattaccacttggcattaagttacaagtgacaatagtgtccacttgatatcgagttgtaaccattactgaactatcactcagacaaaagaaaataactaaagataaatatataaataatatatctacatattttatatattaatgcattaacccaaacttccagatgacttaaaaaaaggcaaacactgttcaggagttgatattaggaaaagtcttgagatgaaacttattttacttttgcagaagggaatagccttcactctccaggagcaataagaatgtcctaagcactttgtaaatgttacctatatcactcttactacaaccttatgagataaaattcattgttcccattttactgatgttttagccaagatcataaatttcactggaggctgagttacctgtgtccatctacctttccagactttaaattttyccctagaatgaaagcactggatctaaaagtaatgacactataaaatgcctataaaagtatgcttagggctgggcatgtgactcatgcctgtaatcccagcactttgggaggccaaggtgagtggatcacaagg

SEQ ID NO: 552298 - DNA, 1249 bp, Homo sapiens
gacaggaagctcattagcctcacaaggcagccctttctattttgaatctctctaatcgttttttaaaagtttctccttatatagaggctgaattctttctccccattacttgcatccattgatcttagttccatgttctggagctacatagatcaaatctaattctcttcctacatagcaaaccattaccttttcaagaggagctgtggcattccccctcctcaactctcctctttctctagcaaaatatcctcagcttcctcgcctccttttcacttgrcatggtttctggggccttctttcccctggtactaccctcttgctgccctgccacctgatgagagtgatcatttcagaatggaagccaaccttattggatggcatcagttcagagcataactatgtctccctggactcagagaacatacatacatttaatgcaacctagaatttcaagagcacacggcttcaaacttcaaggaaaacaaaactgcttatgagacaggttttcctgccttaaatgcaagactttacagctaggcccagcaaatcttgctactgctaacctacaggagagtggttcttgaacttttggagagtcatgggccgcactgagaatctgagaaaagctttggaccttctttcctgaaaaagacacatacccacaaaattctgcatacagttttctagcattctcagaactctggaaatccatttttatgtaaacctccagtttaaaaattcagcattatcaatgtcacagaacccttgttctgtcatctaagaaatgtatatctgcattatctctatattttattatggtattgtacgggaggttaaagaacgcccacttgaaaatccctgcaagtcactataaaattgttaatgggagaggaaagttacaaaaagtcttcaagtaccattggtggatacatttgcttatgtaccttatttaacccctacaacccttttctgaactaggcaatattagccttatcttatgaataagaggaaacgtaaagctattaataaagaaaaatagaaagacctgggtgaaggcagtggctgccgagtgcaaatttttacaactcttgcaatagaaccatggttggtggccctctcgacttttaagtgctgaggccatggccacctggagcacagcatacatgcttacgagcaggattggtttcctgggaaatgtgtccttatatcggcgcttcagtagtgatatccctggaaagtggtcacc

SEQ ID NO: 552299 - DNA, 1778 bp, Homo sapiens
ccctcaccccaccctacccctggcccccaagttgtgacaaccaaaactatctccagatgttgccaaatgtccagttggtgattggggaacaaaacatctgaggttgagaaccactgctttagatcaatccaagttctagcagatgagaataactccattcttcttttgatgtatttattaatatttttaagccttgaaatgaaaaattgctttttaagcattagaaaatgcatactcttcttttgaaagcctagcaataaatcccataactatcagggtcttcgtttcctcatcttgagccttatttcaaggctccctctgttctaaattctgaccttgaaaactctattcctacctctttctttttttggacagggtctcactctgtcgcccaggctggagttcagtggcgcaatcacagctaactgtaccctcgacctcctggactcaagagatccttccacctcagcctcctaagtagctgggaccacacttgactaatttttgtatctatatstttcatttcaccaaagatttaaaacaatttctcactatgaagaaacttatacaagcaatatacattcaacaggaaaaatgaggaaattcagataagcaaaaaaagaaagaaaggaaaagaagtatcagttgtgtttccattagttagaactacctagggctaacatgatgatgagtgggttttcagatgtttttggaatgcatgtttgtgtgtacatacacaaatatacatgcagtcacacaatacacacattttatttcttgtgtgcttatcattttttcatggtatatcattttttcatggtcattagttctagctatctccagacttgatgctagactatacattttttctcatgtatgacattcctcaagaagtggttcgactcatatgtctttctttacctaccacctagataagccccaaattcacactgttactcctttatttctccacagaaaaataactttcattacatgtacaaatgacaattaagccaattagagtaaacaacttttggtcaattcagctctcactttgccaggaaccaatggccatcctcagttttttttaagtatggaggtttggaagtcaaatttgacgcctttcttcctttcctgtccccacccctgcccacagtcacttccacaatctcttgctttttctttggacctatttccagggtcacacgcagtcaggtcctaattattttgttccaggtatgctgtttcctagcatctctcctgccaatcactttgatcgagatagtactctcctcttttcagaaacctacaatgactacccattgcttcttgtatcacaagctgaatctctctaatgagctttgaggggcttccacactcccctgggtcctcctccctgagctgtgtcttcctcaggttgcactttttgttccttattaacccttcgcaacccagtttccctactcccctttctgatcaacagtccattaaaaataaggtaaaacaatgcacagtgctgacgtctttttaaaaagaagaaaaccctaggacactaatacaattatccttttgcttatgcttcagttatcggttgtaactacttgttacattaattgggtgtatctttgttacagaggattaataaatgttttatttatttattttagtttcaaaaacatgccttgaaatttcaccagattgggtgaaacgtgtttacaatactaggaagtgaacagcaggcactaattttttgtagcagtatttctcatcaaggcaca

SEQ ID NO: 552300 - DNA, 530 bp, Homo sapiens
caagtggaactttctcaagagataaaacccaactaacacaggggattagaaaagaggactcaggggaagaataagaagatatattggcccctgagtctggttggatttccccacctcatcattgaatttccctaatccatgcaagtcattagagcccaacagactccagcagggagggctcccaagtaatgtgggagcagggaggagggggctagagtcagggcacaagcctgccaggctctctctgtgcagggcacatcaagggaccacactaattgtctctgcaggctctccatgcccgcctggctgtggggagggaccagcctgtaccaaggcttatgggcggcggcarccacagcccagactagtgagctaatgagtggtttggatgtcttgcctggtcccgttagagcctcactcctcccctgtgctggagaacaagtagctgcctcctgtgctggaaggtagggcacaagggccccagccttggctctgccattaatttgctatgtgacctgcagctggtcaca

SEQ ID NO: 552301 - DNA, 1540 bp, Homo sapiens
attatcatcacagtttaaaaaagagataaagttacttagtaaaagatctatttgctagtgaggccttgaagtcctgtcttttgacatcaagtcttcttactttacaccacatcacaaccacttcaagaaatagatgataataaagaaaaatatgtagcacgtgactctaagtaaactaattcctctcactgaactgtgttaaggctgtagtgattcttatcaaactctacttaaggattctaaaatcccattcaaagcatctgggttggtaccaataaagctcaccacattagtaaggcataattatatgattcaacatcggaataaaagagtaagaacatgagaagactgagaaaaaaaagaaaagcaataccagaaagtaatttcatttaaaagaattaagcacaaataagccaaaagaaatcactccaagggactcccccaataagccttcacgccccacactatgaaaacatagccactataaaatcaggttgacctgggtagcagaaaatcacatactcaacagctatgtttgagtaattacctttaatttgtccccaataataaccgaaatcaatttttacttacccaataacttgatgttcataatactgcagtgtcctcttgagagtctgctgtatcgtctgaggctacagaataataataataataaaaacatattatcagcaaatcagtaccattcccactgtgagtatcgtaggcagacaggtgaagcttctgatttatctcttgagagttttccttctacagtattaacccattttgcatcatgccatgtattttccccacagaaactaatatgaggcactcggcaattacccagaacttcccaatttcaattatgatagtatttcctaggaatgttttcttcaattcttttgtaacagctattaagttcaataaaatacacattggctgcctacaataaacccaggccctggggatagcagggagggtgccctgcagaaacatgagtcacggtttttcctttccagcatatgtaatctgcatgaggtaatgagcaactgaaatcaaatggcacgtcttcatattttcttctacattttaacaaggttttcaaggatggtctagcaagcagtgataaattgagttaaaagagtcaactttataataaaagatatttttaaacttaaatgatatttttttccccgttctttgaggagactaacaaaaaggcagagtaggatgggaagcaggtgatccagggccccacagccatgactgtcacagcagtcagcctgacttcctccatgtcccaagagaattcaagcaaaggttctttctggagcatactggatgggccacaagtgcttcaggcaaaatatggagtctgcaacaaatatctaagcagctcatgaccacatttcataatctcttctccacgatggcttaagacagaggttcttaatccyagatcaagaaattaagcaacagagactgaacttggagtttcagacttagagagccatgaatgggacaccaagatcctagaacc

SEQ ID NO: 552302 - DNA, 607 bp, Homo sapiens
atctccaatttttgaggttcccgagagacttagagaattcattctgagacatacaacctagtgactttatttttgacttattttttttccaagaaaagactccattctcaaaagtttagtttagggtacatgtatcataatcagcaggcatggcatcaaaccttctcaagagtctgaaaacactagtcatatttccttggcatcaatctactgcaaagaggaggagacrgggcattgaggtcctaatatgtgccagcacgcacattaggcaacatgcttgtattttttattttctggtcctttcaaccacctgtggtgaatcttctcaaccccactaaacagatgaggaggccaaggtttgcaaggtgagcttgcctgtttgggttccatgactgtccagtggccaaagcaaatggcagagaaatgtctagctgcttctctcccacaccttctcactattctatgctctgcccttgttattacagcagatttcctgaagatgcatttgctgcttggctatgtcaacacttggagctaggaaccctacttaacgtcaccatttgacagctgagcagctgaggaaagcttcattcacaaggagatatta

SEQ ID NO: 552303 - DNA, 607 bp, Homo sapiens
atctccaatttttgaggttcccgagagacttagagaattcattctgagacatacaacctagtgactttatttttgacttattttttttccaagaaaagactccattctcaaaagtttagtttagggtacatgtatcataatcagcaggcatggcatcaaaccttctcaagagtctgaaaacactagtcatatttccttggcatcaatctactgcaaagaggaggagacggggcattgaggtcytaatatgtgccagcacgcacattaggcaacatgcttgtattttttattttctggtcctttcaaccacctgtggtgaatcttctcaaccccactaaacagatgaggaggccaaggtttgcaaggtgagcttgcctgtttgggttccatgactgtccagtggccaaagcaaatggcagagaaatgtctagctgcttctctcccacaccttctcactattctatgctctgcccttgttattacagcagatttcctgaagatgcatttgctgcttggctatgtcaacacttggagctaggaaccctacttaacgtcaccatttgacagctgagcagctgaggaaagcttcattcacaaggagatatta

SEQ ID NO: 552304 - DNA, 607 bp, Homo sapiens
atctccaatttttgaggttcccgagagacttagagaattcattctgagacatacaacctagtgactttatttttgacttattttttttccaagaaaagactccattctcaaaagtttagtttagggtacatgtatcataatcagcaggcatggcatcaaaccttctcaagagtctgaaaacactagtcatatttccttggcatcaatctactgcaaagaggaggagacggggcattgaggtcctaatatgtgccagcaygcacattaggcaacatgcttgtattttttattttctggtcctttcaaccacctgtggtgaatcttctcaaccccactaaacagatgaggaggccaaggtttgcaaggtgagcttgcctgtttgggttccatgactgtccagtggccaaagcaaatggcagagaaatgtctagctgcttctctcccacaccttctcactattctatgctctgcccttgttattacagcagatttcctgaagatgcatttgctgcttggctatgtcaacacttggagctaggaaccctacttaacgtcaccatttgacagctgagcagctgaggaaagcttcattcacaaggagatatta

SEQ ID NO: 552305 - DNA, 607 bp, Homo sapiens
atctccaatttttgaggttcccgagagacttagagaattcattctgagacatacaacctagtgactttatttttgacttattttttttccaagaaaagactccattctcaaaagtttagtttagggtacatgtatcataatcagcaggcatggcatcaaaccttctcaagagtctgaaaacactagtcatatttccttggcatcaatctactgcaaagaggaggagacggggcattgaggtcctaatatgtgccagcacgcacatyaggcaacatgcttgtattttttattttctggtcctttcaaccacctgtggtgaatcttctcaaccccactaaacagatgaggaggccaaggtttgcaaggtgagcttgcctgtttgggttccatgactgtccagtggccaaagcaaatggcagagaaatgtctagctgcttctctcccacaccttctcactattctatgctctgcccttgttattacagcagatttcctgaagatgcatttgctgcttggctatgtcaacacttggagctaggaaccctacttaacgtcaccatttgacagctgagcagctgaggaaagcttcattcacaaggagatatta

SEQ ID NO: 552306 - DNA, 635 bp, Homo sapiens
aggatgacccaacattgaagatgaggtctgaaggtattctgctagcagaattcccttgtgcttggggagagctgtcttttcatctatacaggccttcagctgattggatgaggcccacccayattatggagggcaatctgctttcctcaaagtcatccaatttaaatgtaaatttcatccaagaacaatgttacagaaacatctgaaatagcggttagcctcagatatctgggcactgtggtccagctacgttgacacataaggtgagccaccacaagtaggaactgccctacgggaactgtagtcttggagaggcacagcttgcaagatccctgacagtgaagtgaggaagcaatgatccagcctcagttaccactgaatagttagggcaagactacaaagcataggggctaggcctgctgcagagctctgtttcactctgggttctactcaatactttgagccatacaagtaacttgtagatggggtagtggtgagttcagcacatggaaaggacctggcagaaaggtctgctccttgaggtgcagttatttgtctttaatttcagacaagattatacatcatgatgcagaacaccagcccttgtgtgacagaaactacatggcaggctctga

SEQ ID NO: 552307 - DNA, 660 bp, Homo sapiens
ttcaaagttgggtttaaattaagattgagaaaaatattttttaaactcttgtaatttctaattatttttaatcatgtctttgacatttttcttatctatatttaaaaaaaaaactcaattcatccacctaacaaaaaactacttgtacccmaaagctattgaaataaaattttcttaaaaaatctcaaaaaagacattaacgatagcagaaagggactcttgaatcaccaacagaaggaaaacttacattttcaaaggaggctacaagtaaaactgatatagtcatctttttccaaaacatagtagagaataaattgcaaataattaaattgggtttctaggctgaatgataacttttgagagctgacatctgatcactgagctcacctattcaaataaacgtagtattagttggtctgtttttctttcattatatttaaagctaggaaaatctagatggaataaccagtctctctcactgacaactttgtatttttctgctgcaaaggagctcaattttctttactcattttttctgtgtttaaacaaactctaaataagctttatattttgaaacatttatgtacacacagccttatacacctaacccaaaagaagataaagttaaattttagtaacctgaagttcttcactgaagcc

SEQ ID NO: 552308 - DNA, 645 bp, Homo sapiens
caattaggctgcatcttcattatcattgcagtatgtgaaaacacatgttatataccaaagaacatacagcagcttagtgacacatatggagtttgcacttctcctgaaatcattttcagttctgacagctgttaaagtgtgaacaatgcactgcctataataaggacctatatacatctgctattctgtcaacatcatgactgccttcattttcaaagctcatttgccaagctgcatttcctaccatttgctcatccacccattcatccacccactcactctttcattcaggcctatctctttcawaaagagattgaatgtacacatttcaggttacctatcaacatcttctatctgccaatccatttctgttctatctaatgcaattaatgaattgcaggaatgtccaagtccattaaactgaacaatttcaattccatattatttcttgagagtagagactttatcttcattgtatatcaaaaaagttctcttcactagaactttctaaagtcaaaaagcaacctaatattttgtgtcctgatattgtatgatataacatcatgaaaagtaaattctatatctgagtatgtcataccactaatcctcctattcattatgtttgtcaaaatgaatcctcatgga

SEQ ID NO: 552309 - DNA, 645 bp, Homo sapiens
caattaggctgcatcttcattatcattgcagtatgtgaaaacacatgttatataccaaagaacatacagcagcttagtgacacatatggagtttgcacttctcctgaaatcattttcagttctgacagctgttaaagtgtgaacaatgcactgcctataataaggacctatatacatctgctattctgtcaacatcatgactgccttcattttcaaagctcatttgccaagctgcatttcctaccatttgctcatccacccattcatccacccactcactctttcattcaggcctatctctttcaaaaagagattgaatgtacacatttcagkttacctatcaacatcttctatctgccaatccatttctgttctatctaatgcaattaatgaattgcaggaatgtccaagtccattaaactgaacaatttcaattccatattatttcttgagagtagagactttatcttcattgtatatcaaaaaagttctcttcactagaactttctaaagtcaaaaagcaacctaatattttgtgtcctgatattgtatgatataacatcatgaaaagtaaattctatatctgagtatgtcataccactaatcctcctattcattatgtttgtcaaaatgaatcctcatgga

SEQ ID NO: 552310 - DNA, 824 bp, Homo sapiens
gttgccatttaatgagacggaggaacactcagaagaacaggctaattgagaaacagaagttcagaaagtttttttactagatgtttaattttgagaagccttagatgtctaaaaaggctaygctggtctgtatttaagtgatgttggatatactggtctgtgtttaagtgaagaagtctaggaaaaagatataaaattgagaattgccagacagagatgtcattgaaggaattagtctttgttatttgaataaataaaatttcatttctgaagtgtcagaggattttgcaactatcttatgctatgaatttctatccaactccatttaaacctttttctcctcaattccttccatttaaattcctttcgttataataacggtagccacaattacatagcaatagctatatgtcaaggatagagaagttgagaaaattatgaaaagatatgcaggaagtcaatattgtttggctgtgggaggtagtaatggagaagcagaaatcaattatcagtgactacccaggatatttgaaacccagagtcaatcattttttgacctcattctcctctatctgaccagattatcttatgtcataattagaataatcagtaattatcattattttcttgattcattctttagctgtaaaacaaaatttaacaattaaaaagaattaatttcaaatttaagatgttaaattcaataaatattttgtgtgtaaactaacatttgcttttaccaaacaaagttacatgttacagttaattttcttttgctgttttgaattttacatacacacatgtgtactaatacatgcattcac

SEQ ID NO: 552311 - DNA, 824 bp, Homo sapiens
gttgccatttaatgagacggaggaacactcagaagaacaggctaattgagaaacagaagttcagaaagtttttttactagatgtttaattttgagaagccttagatgtctaaaaaggctatgctggtctgtatttaagtgatgttggatatactggtctgygtttaagtgaagaagtctaggaaaaagatataaaattgagaattgccagacagagatgtcattgaaggaattagtctttgttatttgaataaataaaatttcatttctgaagtgtcagaggattttgcaactatcttatgctatgaatttctatccaactccatttaaacctttttctcctcaattccttccatttaaattcctttcgttataataacggtagccacaattacatagcaatagctatatgtcaaggatagagaagttgagaaaattatgaaaagatatgcaggaagtcaatattgtttggctgtgggaggtagtaatggagaagcagaaatcaattatcagtgactacccaggatatttgaaacccagagtcaatcattttttgacctcattctcctctatctgaccagattatcttatgtcataattagaataatcagtaattatcattattttcttgattcattctttagctgtaaaacaaaatttaacaattaaaaagaattaatttcaaatttaagatgttaaattcaataaatattttgtgtgtaaactaacatttgcttttaccaaacaaagttacatgttacagttaattttcttttgctgttttgaattttacatacacacatgtgtactaatacatgcattcac

SEQ ID NO: 552312 - DNA, 824 bp, Homo sapiens
gttgccatttaatgagacggaggaacactcagaagaacaggctaattgagaaacagaagttcagaaagtttttttactagatgtttaattttgagaagccttagatgtctaaaaaggctatgctggtctgtatttaagtgatgttggatatactggtctgtgtttaagtgaagaagtctaggaaaaagatataaaattgagaattgccagacagagatgtcattgaaggaattagtctttgttatttgaataaataaaatttcatttctgaagtgtcagaggattttgcaactatcttatgctatgaatttctatccaactccatttaaacctttttctcctcaattccttccatttaaattcctttcgttataataacggtagccacaattacatagcaatagctatatgtcaaggatagagaagttgagaaaattatgaaaagatatgcaggaagtcaatattgtttggctgtgggaggtagtaatggagaagcagaaatcaattatcagtgactacccaggatatttgaaacccagagtcaatcattttttgacctcattctcctctatctgaccagattatcttatgtcataattagaataatcagtaattatcattattttcttgattcattctttagctgtaaaacaaaatttaacaattaaaaagaattaatttcaaatttaagatgttaaattcaataaatattttgtgtgtaaactaacatttgcttttaccaaacaaagttacatgttamagttaattttcttttgctgttttgaattttacatacacacatgtgtactaatacatgcattcac

SEQ ID NO: 552313 - DNA, 1062 bp, Homo sapiens
gtgctggcctatgtatcatccyatctttgagaaagaatactggaagtctccattatctaattaatataaaaatgaaggcaaattcttgaccttaggttgtcatttataaatgtagggaaatatttttaatatagagtttgaaagtcttttgtagtctcaagtaaaaatacaaaaagacaaaagatcatgatatttcagagtaggtatgacctgaggagatgaattttaaaataattttgaaacaaaaaaagaaaattaaaaaaaatttaatatcgatcacagctttgctttgaactagtacatcactggggaaaggcgaaatcaatgggtgtgtgtccaacaactgaagggaaagtggaagtaaatcacaggaatgtcagttcttagataatgtaaaattgagtaactaaaaatattcaatttgtccaatgatcaaaccctttctagaatgagcaggctaagtcagatttttttgaattctataaagactggacttccaggagtggtttgcctggttctttaaactgccttatcacactttgtcaaactgcaagacaattaggttgtcttttttttttttcccaaaagtttagattgatagaaattgtttgtaattaaaatattaagttaaattagactaatccaatttttataacatcatacaaacataagcatctcaaagtggaaagtcatgtttccattagatattggtttcagctaagcatgaacaactaaaatgaatttaaaaagctcactgtcatttgttcagtttgctaggattcatttttatccactgcaaataaagttgaaattcatacaattacctaaaatattttcaaatgatgtggtattgtctagattggggcaagagagtcctggaaataagccacagctatgacccttggaagccttattttttgacaatttttaaaccgcattataacttagttccctaatataaatgtgaatgatagtacttaccttctagagttattttacaaattcttaagtaatttatttcattcattaactacattttgggcatttaacaagcactgtccc

SEQ ID NO: 552314 - DNA, 1062 bp, Homo sapiens
gtgctggcctatgtatcatcctatctttgagaaagaatactggaagtctccattatctaattaatataaaaatgaaggcaaattcttgaccttaggttgtcatttataaatgtagggaaatatttttaatatagagtttgaaagtcttttgtagtctcaagtaaaaatacaaaaagacaaaagatcatgatatttcagagtaggtatgacctgaggagatgaattttaaaataattttgaaacaaaaaaagaaaattaaaaaaaatttaatatcgatcacagctttgctttgaactagtacatcactggggaaaggcgaaatcaatgggtgtgtgtccaacaactgaagggaaagtggaagtaaatcacaggaatgtcagttcttagataatgtaaaattgagtaactaaaaatattcaatttgtccaatgatcaaaccctttctagaatgagcaggctaagtcagatttttttgaattctataaagactggacttccaggagtggtttgcctggttctttaaactgccttatcacactttgtcaaactgcaagacaattaggttgtcttttttttttttcccaaaagtttagattgatagaaattgtttgtaattaaaatattaagttaaattagactaatccaatttttataacatcatacaaacataagcatctcaaagtggaaagtcatgtttccattagatattggtttcagctaagcatgaacaactaaaatgaatttaaaaagctcactgtcatttgttcagtttgctaggattcatttttatccactgcaaataaagttgaaattcatacaattacctaaaatattttcaartgatgtggtattgtctagattggggcaagagagtcctggaaataagccacagctatgacccttggaagccttattttttgacaatttttaaaccgcattataacttagttccctaatataaatgtgaatgatagtacttaccttctagagttattttacaaattcttaagtaatttatttcattcattaactacattttgggcatttaacaagcactgtccc

SEQ ID NO: 552315 - DNA, 1227 bp, Homo sapiens
ttttgttttgttttcttgtttttttttagcagcattttaggaactttgtgcatgttttttaacatgccttcacagaattggttgctttgattttcctttggagtatattttcagaaatactccattagaaaaaaaaaagaaaagaaattaaagggttcctttcattgagcacttctactttcactataaaatacaactccaactgaaactcagataaaaggaagaagcatttaggaaacactttatttattagaattacctggacagattggtaagacacagattgctgaaccctacttccagagtttctgattcaggaggactggtggtgagttccaagaatttgcatctctaacaagttcccaggtgatgctgataatgctcatcctggaaccactttggaaaaagttctgttttaataattgctggaatcagtaagtgaacataattgtttaaatctttaaatcttttgtataacacagataagcctctggggcttatgatgcaatggaattgcatcgtttgcataatcctttaaattctgtttctgaaaaattgaattcacctggccatgctaaacatcctgaagatgatatgaactcctgggccctcagcttgacagaaacttctcataaaaatgtaatcaatttctggaatgggctacaatttggacacgttctccagtagaggagagaaactcttgggtccttcaggaatccatgccatcctgcgatccctgggaatgctggcctctggtgtgagttttctaaaacaaacaaaaccaaatgaacaaacaaacaaaaaggaaaaaaaaaaacacgatcgaactgtcatattaccttatgaagtgcaaaacatattttaactggtccattataagtacagaaagtaaaaaataacactcagaaaagtgatagattaagagattgcactgtgatgtgtaagcaagcatttaactttcttkgaacatattgtatttattgatggttaaattggcatttcatatttctcaaggattggtataatgtttcagcatgtcagtttaattagatgaaaaaaggtatcatgcttacaagctggccagataaaatccatcagtcttaccaatataagcaaccacattaagagggaaaagaaatcactgttatggactgaattttgtcccttcaaatttataggtttaactctttacccacaacatgactatatttggagagagggctttta

SEQ ID NO: 552316 - DNA, 547 bp, Homo sapiens
taactgtgaaaaagtactgagaacccacctgacccaggcttgccccaagcagaggctagagaagaggctcctcttctcagtgtttcccaaaggggcggctcttgtggtttcaaaatctctggcaccatcttgacctcttggctctctctgcactttgccccctgtctcaaaaatgtccctcatgtccatttcctgtccaggagactcatgaggactgtgtgacctgcacaagcccacacctgggcaggctgttggtgtctccttggtccttaggcagatactcccctgagtccccgatctagggccagctgcagagggctctctctaggcagagcgttcctggccagagctctacctctttgcctcctgctgacccctgacagcgtcccgtrgcatttctttcatgtctgcatattgcatagccttgtcctcctgtgtgcctgagctcctcccttttcaataagattattagtcgtgcatgtctgtgagctgcctttcatcaccatttttcctgagtagggcttagttttattctggaaagacatct

SEQ ID NO: 552317 - DNA, 527 bp, Homo sapiens
cacttgaacccgggaggtggaaggtgcagtgagccgagatcatgccagtgcactccagcctgagcaacagggcgagactctatctcaaraattaaaaaagaaaaaaaaaacaattcaggcaaaacaacaattatgattatttatattttattttagagacaaagtctcactttgtcactcaggctgaagtccagtggcacaaacatggctcactgcactctgacctccaggcttaggcaatcctcctgcctcagcctcttgagtagctgggactacaggttcatgccaccacacccggctaatttttgtattttttgtagagatggggtttcgccatgttgcccaggctgatcttgttgcccagggtgctcaagtgatccacccgcctcaacctcccgaaatgctggggttacaggcatgagccactgcacccagcctatttatacaaattaaaacaaggagagaggtatagaatcagctgaaggttgtaacatatttgagttggctccagttctattctggaactg

SEQ ID NO: 552318 - DNA, 826 bp, Homo sapiens
ggatttaattacatgtgtgatatattccacctagtacagtgattctcaaacttgagcatgcatcagaatcacccggagggctgctgaaaacactgactgggctggagccgtctgcctggctctcccctcccagatggtccaagcacacctcctccctacccccagccacccctcagtgccgcagctcctgctatccacacccgcatgaaactactgcagtgcagaccgaggctctgactatgtgagagagagagggccagccagcaggtcacctagactgtgacagcagaagggagaatgaccccctgtcacaagatttaagggagaagagtagccctggtgaccactaaggcagctctggtggtgccactgacaccaggattctcgggccaccttgaattcgtaggaaatgctcctgtgccatcttttgttgccactgccgtttktcaggggcagatctcttagactccttttatcttcatgttgggttggattgatgacattatacatttttaggccgtgtctatttatactggctgagttttaaattactgtgttcctcctggatggttgtcatggttcttcttttggttctttttgctcttatttcttttggactgtcttcctttatctaacttttctacccatctgaaggacctataattatatttcccatttatgttctttataaatgcttttcaacctctaaaactccccaatgacttcattttctaggggtatataccctattttttaaaatctaggcagaatcttaaaatgctctgagtttttgtccttttctgtctcattaaagttaacaatacaa

SEQ ID NO: 552319 - DNA, 826 bp, Homo sapiens
ggatttaattacatgtgtgatatattccacctagtacagtgattctcaaacttgagcatgcatcagaatcacccggagggctgctgaaaacactgactgggctggagccgtctgcctggctctcccctcccagatggtccaagcacacctcctccctacccccagccacccctcagtgccgcagctcctgctatccacacccgcatgaaactactgcagtgcagaccgaggctctgactatgtgagagagagagggccagccagcaggtcacctagactgtgacagcagaagggagaatgaccccctgtcacaagatttaagggagaagagtagccctggtgaccactaaggcagctctggtggtgccactgacaccaggattctcgggccaccttgaattcgtaggaaatgctcctgtgccatcttttgttgccactgccgtttttcaggggcagatctcttagactccttttatcttcatgttgggttggattgatgacattatacatttttaggccgtgtctatttatactggctgagttttaaattactgtgttcctcctggatggttgtcatggttcttcttttggttctttttgctcttatttctttyggactgtcttcctttatctaacttttctacccatctgaaggacctataattatatttcccatttatgttctttataaatgcttttcaacctctaaaactccccaatgacttcattttctaggggtatataccctattttttaaaatctaggcagaatcttaaaatgctctgagtttttgtccttttctgtctcattaaagttaacaatacaa

SEQ ID NO: 552320 - DNA, 826 bp, Homo sapiens
ggatttaattacatgtgtgatatattccacctagtacagtgattctcaaacttgagcatgcatcagaatcacccggagggctgctgaaaacactgactgggctggagccgtctgcctggctctcccctcccagatggtccaagcacacctcctccctacccccagccacccctcagtgccgcagctcctgctatccacacccgcatgaaactactgcagtgcagaccgaggctctgactatgtgagagagagagggccagccagcaggtcacctagactgtgacagcagaagggagaatgaccccctgtcacaagatttaagggagaagagtagccctggtgaccactaaggcagctctggtggtgccactgacaccaggattctcgggccaccttgaattcgtaggaaatgctcctgtgccatcttttgttgccactgccgtttttcaggggcagatctcttagactccttttatcttcatgttgggttggattgatgacattatacatttttaggccgtgtctatttatactggctgagttttaaattactgtgttcctcctggatggttgtcatggttcttcttttggttctttttgctcttatttcttttggactgtcttcctttatctaacttttctacccatctgaaggacctataattatatttcccatttatgttctttataaatgcttttcaacctctaaaactccccaatgacttcattttctaggggtatataccctattttttaaaatctaggcagaatcttaaaatgctctgagtttttgtccttttctgtctcattaargttaacaatacaa

SEQ ID NO: 552321 - DNA, 555 bp, Homo sapiens
atggccccaatgatgcaaagaaaggaatactgggtgagtcctatggtgtcatgtgcccctaggctttaaaactgaagttttatctcatttttatttacttcttttcctcactgcaaatgttcccgtcacagcataaagtaggtgactaaacaaagagggcttctggcatagcccactcaccagtaccagaggcactactttcatcctgacttttggccaggcagatgtgtctttaaaatagaagggacttgcattattttgtgcatcctttgatcttctacctacggtgcttcacagtgtgaaaagccttaaggctttcctttaaagaacgccttgctcatatgttcagtgttcgctttggtccagcctcccacaaatcctaaaataaagcccccatctgagccacatatgctgtgttttctttcaggcagtagcaggacactgcttttccctttatcagccatattagagtccaaccttatagtcacttttwaaaaaattcctttaatgttatgggatttatttccttaacaaaacagcaggccctacatactt

SEQ ID NO: 552322 - DNA, 1345 bp, Homo sapiens
ccctgctggaacctttcctacttgcscacatgtcttgtggagagctggtggcagtcttagagaaaggtgcactaggacaggaaatgcccagagagacccttcaggccgtgtagagaggaccagagaaggaaggtggctttcctgagatcacacagctggtttgggtggcagcaccacaataagcatgagagtcactgactcttctgtgctatctcaccctccagtgccatccggatttctcctgtgcacctactttgagcaaggttgcttttattctctgagcctctgacagaaactttaaaatcataaaagcagtaacaccattaacgatagcagtcatcatagattcagctcctattctgtgtgagagactaggctgaggtcgctttttatgcacgttgctgaccctcgtaacaatcttgcagctacgaggctattagcagtagccgcattgtacagctgaatcaactaagattttgagagattgtcaattgcctcaagccaccctcctagggattggaagccatgagctcggttcttgttccctgagtcgatttcctgggcttcagtgggctaagggttgtgaggctgcccctacctgagtactcacacctcatctcatagggtttaaaacacaaggcacagttctgcttggcagaatggagtggggggcatggtatttgagaaggagacagtggtggtaggagttcaataagtatacttgataccccaaacttaatcctgagggggtgaaacctaagaatgaagtgagtgaactttaggattatagctggagtgtgcattccgctaatttagttataagcagggctctggttctggctttaattacttttgcatatgacttgtatcgcagaaaacttctctcagcctgttcccatcaaatcccaaataaagcaagaattccagcaggaagaaaacaactccaggagaccaggccttgctccttcacactgtgcgtgaggttaggtgtgtggatttgattagatctgtgtgcctgtgtctgtgtgtgtgttgttgttgtcgttgtccccttttaagaaaatttaaaaataactttctgccaaagatgtgggcaccagggttgtgttgctgagcagaaatgctcctcccacccgtggtctgctgctctgctgatgtggcccagctgatgtgggcagcttgtctgcctgcagaagctcagcccctcctttaatgtgtcttccaagaggaaaggcccaggaagccatggggagggagaggctgcctggtggctcagggaagaactcagctgttgggacaagagtgggctggctttgcctgctttcatgtgggaacccagggacct

SEQ ID NO: 552323 - DNA, 1352 bp, Homo sapiens
agctggagggccttcccggatgtctcctccattccttctccaggcaagctctccttagtctagacgaggagcttctcttccccaaacctcaggaagtgggtcccagcagattcagccctataggatccaggtaggactgagcggtcctatcctttgagtctcaggccctctctgaatttctggatgaagcaggatcaactagggagtctctgggcccatatcccctattccctcgctgaacccaccagggtagcattccacccagttcctgatcaggagagggctggacactgacccttgaggaaagagtgcgagcatggtcactgcagaaagtcctcctgccttggggctttaggatgttgggttcctgaactctagtttaaaagcctggtggtgagcctcccactggccagtacatctctccagcctggttctggccaagatggagctagaaggcacgtctcccctatcctccctaccatccctggactcagaccaggtgtttggcaacgtctttgagacagggtggtttccaacctgtcttccatcctgagctgtatctgacccttctaattttggccagctgggaccagctctgtcacctccgccccatctgacacaggaggaaactggtccagccctagaatgaatcaggttgaagtgagaaaagggggacagactaccccaagggactgccaacgtcaggcctggagatttcccccatattcctcctgcacacagccctttttggactgagagmagcagctcccagctcccctgcctgggcgctgcctaaaactctctaacgtcttctccaagaaacagccccaggagtattaaccactaacagagccatgattcacaactctagccacagcaaagtcctggcctatgtgggtaagcatccgttgatccagatcatgggcactgggcaggctgggaggtaccccaagtgggtaggtcacacccaagtccagccacaggttctggagtctctgccccgtgtgccctgactgcactagattggaaggacaagtcgcttccaggcagaagaaagcaacaacacttcctttccagttcagctttattttgcaaaaatttacaaggcctcctttgcacagagatgcttgtggggaccacatgaatcaatgtgccctcacagtccagacttggtggcggagacaggacacaagtgccatggtagacagtgccatggtctttcttcctgtgccctggataattggataaaaaaaattggatttagtgccgtggtagacaggaggtgcaaatggaccccaaaaaggaagagatcaagaagtcttcccagagtagaagattcttgccaatatgtc

SEQ ID NO: 552324 - DNA, 1352 bp, Homo sapiens
agctggagggccttcccggatgtctcctccattccttctccaggcaagctctccttagtctagacgaggagcttctcttccccaaacctcaggaagtgggtcccagcagattcagccctataggatccaggtaggactgagcggtcctatcctttgagtctcaggccctctctgaatttctggatgaagcaggatcaactagggagtctctgggcccatatcccctattccctcgctgaacccaccagggtagcattccacccagttcctgatcaggagagggctggacactgacccttgaggaaagagtgcgagcatggtcactgcagaaagtcctcctgccttggggctttaggatgttgggttcctgaactctagtttaaaagcctggtggtgagcctcccactggccagtacatctctccagcctggttctggccaagatggagctagaaggcacgtctcccctatcctccctaccatccctggactcagaccaggtgtttggcaacgtctttgagacagggtggtttccaacctgtcttccatcctgagctgtatctgacccttctaattttggccagctgggaccagctctgtcacctccgccccatctgacacaggaggaaactggtccagccctagaatgaatcaggttgaagtgagaaaagggggacagactaccccaagggactgccaacgtcaggcctggagatttcccccatattcctcctgcacacagccctttttggactgagagaagcagctcccagctcccctgcctgggcgctgcctaaaactctctaacgtcttctccaagaaacagccccaggagtattamccactaacagagccatgattcacaactctagccacagcaaagtcctggcctatgtgggtaagcatccgttgatccagatcatgggcactgggcaggctgggaggtaccccaagtgggtaggtcacacccaagtccagccacaggttctggagtctctgccccgtgtgccctgactgcactagattggaaggacaagtcgcttccaggcagaagaaagcaacaacacttcctttccagttcagctttattttgcaaaaatttacaaggcctcctttgcacagagatgcttgtggggaccacatgaatcaatgtgccctcacagtccagacttggtggcggagacaggacacaagtgccatggtagacagtgccatggtctttcttcctgtgccctggataattggataaaaaaaattggatttagtgccgtggtagacaggaggtgcaaatggaccccaaaaaggaagagatcaagaagtcttcccagagtagaagattcttgccaatatgtc

SEQ ID NO: 552325 - DNA, 553 bp, Homo sapiens
tcttttaaatgtattgttctgagtatattaattagacctaacactatacttatcactgagattaaaatacaaaaattttggcttttgcaatttctaatctttgctccataattgtatcaaacagattgggctaagttaaggataagttatcctacagcaacaattcctaaatctcagaagcttaaaaacaacaaagtttttttgttgtttgtttttgtccatgctgtatgtgcattgtatttgacaaaagggccgtgttcatggtagtcattcaggaatttgggctgatgaaggctctaccttgacatgggcttccatgattgaagaatcagggaagacagaatatgacaagccccatgctgtctcatgaagcttctgcctggaactgacacatgcccctgctkctcacaattcattgaccaaaacaagccacatggcagcctgagttcattcttctgcatggaggggcactaaatatttataaagtcgatcacaataagcagacagaatagttgattaaataataattaagccagcgagatttaaactccag

SEQ ID NO: 552326 - DNA, 549 bp, Homo sapiens
agactgttcgaatagtgaagcactatacaccaaagtattaatagaaaatgtagaatgaggccaagttgcctgaggactccaatatctgtagatagatgtgacccaccaattaaagaacaccaactggtgactggtgtgcattcaacataatggagagactccagcctaggggaycaggcaggaggaaattccatgaggctaaacaggaagggctggtagaaatagaatttaagagaactgttggcttatgggatgtagaaaacatcagaagaggagtcaagaaccactggccaccaatcttgctctcttcctctagacagtccttatctgttcaggaattctccactgatagacagtaaatgccaggactcaggaagtcaatctaaacatgaaaccacctaaataagacttcagagcttttcactcagggccttgccttactgagaagatgtaccatagacaggttacaaacatcagtcactgtccctgcaatagaagttgcagccaggtagaagctctcaggcctctcaccagtcctcatgtttctgt

SEQ ID NO: 552327 - DNA, 549 bp, Homo sapiens
agactgttcgaatagtgaagcactatacaccaaagtattaatagaaaatgtagaatgaggccaagttgcctgaggactccaatatctgtagatagatgtgacccaccaattaaagaacaccaactggtgactggtgtgcattcaacataatggagagactccagcctaggggaccaggcaggaggaaattccatgaggctaaacaggaagggctggtagaaatagaatttaagagaactgttggcttatgggatgtagaaaacatcagaagaggagtcaagaaccactggccaccaatcttgctctcttcctctagacagtccttatctgttcaggaattctccactgatagacagtaaatgccaggactcaggaagtcaatctaaacatgaaaccacctaaataagacttcagagcttttcactcagggccttgccttactgagaagatgtaccatagacaggttacaaacatcagtcactgtccctgcaatagaagttgcagccaggtagaagctctcaggcctctcascagtcctcatgtttctgt

SEQ ID NO: 552328 - DNA, 526 bp, Homo sapiens
  misc_feature 414: n = A,T,C or G
tgaacactgtgtctgcaaataagactaataaccatagttgttcaaatgattaccatatcatagatcttaatagtctaccagaaatgcttctgatggtactgctttttttawtttttttcatgatcagctaaccttacacagggcagttatccatacaattggattagccactttcttgtctcttggccatttgcctactcgcctcttttctgaatctaatttctccacctataaaatgtggaaattggactagatgacctctgaggttcttgaaagatctgaccttctgggtttgggataatgaaaacatcctctttcagatactcaatatgtattgaaggtctgtgacctgccaaggttacccagcttgtaagaggtagagctggtattctgagtctccaaagcccttagttntaaccagtatgcttctgtgtccaaaggaaaaatagagagcagagccactcactgggagaaccacccaaaggtttagagaaatatgtgcacatcctgctgttaattggccaag

SEQ ID NO: 552329 - DNA, 1150 bp, Homo sapiens
gggccctctcccctgggctgggcggcctctgctggccctggggagggcggggctggttgccaaggcctcaggtggtgtggagccggaagcaggaagcagcctgtgctccccaggacctgcctggttgggggaattggaggcttctaggaggtaggtgggggcctgggggctgggctgccagggggagagagaggggagatgacagtggctggggagaaggttgtcagggtarggaccacagggctgggcaaggagagaagctgggcctggggccgagggagaagtggagtgggagggggtggggaagctggcgctgggccaggagcgggcagtggctgggctgtgggaagcctggatgtggtccccgctgagctgagcccaggatcctgatgcagcctctgggggaccggggcaggtggcacggtgcacgccaagatggctgtgtccacagaggagctggaggccacggttcaggaagtcctggggagactgaagagccaccagtttttccagtccacatgggacactgttgccttcattgttttcctcaccttcatgggtaagtgtggctgtggcctctgggtcctcccagccccctgccctgggctccaggttggggccacacctggacgcctgtcctgtccccaggcaccgtgctgctcctgctgctgctggtcgtcgcccactgctgctgctgcagctcccccgggccccgcagggaaagccccaggaaggtgagcccctggaaggtgagccctgccggcctctgggacctgcacggaactgtactgggggtggaggcggaaggtgaggggagtggcgggaagggtgctcatccccctagggaacaacgagcgaacctgcttggtcccgctgtgcttctcgtgcaggaaagacccaagggagtggataacttggccctggaaccctgaccctgtgtctcctgcccggtggcagtaacaaagccttctgtctgcccagagcctgagtctgcagtgtcttccagtccccgtctgggtgggtgacgcgggactcgccgccccactcaggtggccacctggcctctccaagccttcagtcagcacgactgtgccaggtcatcctcagtcacctagctgggaggggagctggtctcaggccgggcgcggtg

SEQ ID NO: 552330 - DNA, 454 bp, Homo sapiens
ccactaccccaccaaaccagccttccttcctcctggcacttccagtgtccattcccggcagtgcaaatgtgttaggtggggtagggggtgggatagggagataaatagcagcctggcgttggcactggctggtgctctgtggtgggtatgagtaggggacggggccgccttcctggagacaagctcctgggtgctgtgatcagaagggtctgtagctccagtagctggagaacacggagatctgcaaggggagagggtgctgyaggttgctgaagggggatggggtagcccaggggagatgtcaaggtcacccaaggacaatatgtcaggacagggcattgctgcctcgcagtgctgtggggtacaccagaccccaaggttggggcgctctgagggtgtggcaaggacccttagaagtccttcccctaatgaaggcgctcggcccgggcccacc

SEQ ID NO: 552331 - DNA, 701 bp, Homo sapiens
tgtttgcttttaagaaacaggatgggttttgctatgtagccctcaaactcctgggttcaggtgatcttcccaactcagcctcctgagtagctgggcctataggtacaagtcaccacacccagtatattttgtttttttaaaataggaatgtcataggttcacagtgagaattaaataagatactgtaatggcaagttcttacattgtctggcacatactaaatcctaataaataataattaattatyattaataattttaatagttataaagacagtacatgctcattgtaaaaaaaatgcttaaaaagccctcctataatatgaaaatccagagatgaccactaaaataaagtactttatggtctttttcctacacatagatatttcttaacaaatttggaatgtaattgatataaaattttgtagttatgatccattcttttctgccttacttataaatacaaaaacttctcacaacatcatccagaaataaaaagcctttgttcaaggaaaggataaaaagttgtgtgaaacttgagaaaagaacaaggagatcaggttgagcaactggagacaaccgcctccagagccagaatggagatttagccaaatcctccaccacctgctcgtctctgcctccaagttggcccagaaagcaagaactctgggggtctggccagacaggccatcagggagcacc

SEQ ID NO: 552332 - DNA, 656 bp, Homo sapiens
aacctataaatgttaccttaattggaaaaagggggtttgcagatgtgactaagtaaggatcttgagatgagatcatcctggattatttggtaggccctaagtgccatcacagatattcttataagagagaagcagagagagatttgacacagaagagaaggcagtgtgccaagaggagagggcatatgtcaagatggaggcagaggtcggaatgatgtggccacaagccagggaatgccaagccaccagaagctggaagcggcgacaaacgagttctcccctacggcttctagagggagcatggcattgcctgtttatttyagacttctgaccttcagaattaatacatttcctgttttaagccttccagtgataattatggcagcctcaggaaactcatatactagtctgtgccctgtccaagacacttctgctgtttatgtgcttggctctctctttctcatattgctagaaaagcttctgagcacttactcccaatttctgtacttatctggtcatgacccagcagcagagttggcactggtttgcagaactcctgttgagtaccactgatctagtctctatcattttatgaatgaagaaactgaggcctagtgagagaaagtgctataggtctgggacgagcagcaggtgcc

SEQ ID NO: 552333 - DNA, 1159 bp, Homo sapiens
attacccagtctcaggcattctgttatagcagcacaacatgaactaagacacctgtcaataattttttgattgcaagtgacaaaaaatccaaattggtacaaaaagggactttttgactttgtttttaaattcagagatatctttgcttcagacacgagtgaatccaggaggcctgaataacatcaggacccagcttctatctcccttctactttgatgttagtctcaaactagctgtgccctcatggtggcaagatagctgccaacagctccaaattttggtaaacaagagctcctccagtcaaccacaaagccagcagggaacattaactctagctagacctgattagcttggtttgagtcacatgctcatcctggatccaatccatgtgggcaggagtctgcgcagtattctgattggccaaacttggaccacatgcttcctcctggagcatgkggtgaagtcagctccacccaagcagggagatagaatgggccagggatgagcaaaagtgggagtggagggtagaagtagatgtgtccatgagcgagggaaaaagatgttgggcagagagagctgaaaaatgtctaccagggcaggtcaagcctgtgactatctaggatacccagcatgactctttcttgaaggctctgggtataattcgttttactgatttttttaaggttgatttattttctttccttccttccttccttccttccttccttccttccttccttccttccttccttcctttttctttctttctttctttttcgacagagttttgctctgttgcccaggctggagtgcaaggcatgatcttggctcactgcaacctccgcctcccaggttcaagcaattctcctgcctccgcctcccaggtagctgggattgcaggtgcccgctaccatgcccagctaactttttttggtatttttagtagagatggggtttcatcatgttggccggtctggtcttgaactcctgacctcaagtgatctgcctgcctttgcctcccaaagtgctgggattacaggtgtgagccaccatgcccagccctttttttaggttgattttcatcaatcaattttgagattgattaaacacagtaaatgtttaagaagtagataggttaatgaatgaacaagtatttgg

SEQ ID NO: 552334 - DNA, 1683 bp, Homo sapiens
aatccctgcaatctatttcttgattctcaagacaaataatttgcatttctttgatgcattctaatatctgacagtgctcattgtcaagaatctacgttttgcttaaattcctagatcacattttaataggagtaagttctttttgactttgtctccagggtgtttttcctccttgtttccagctgtaggtctcccagtttgaaagtcatgtacaggagacgctcctacttcatctggtaagtcccttaggcctggagtggtagggactcctatccagtgaggttatttggagtgtgtagacttaaacctgaggaccattacgtctgctcactgagcaacttgccaggcaggatcctgaggtttgcaagatggctggttccaggctcctagggttcaggcaagttgtctccagatttccacagggccagagtcagttctgggggcatctggacttttgcagggtgcccctttgagggccatgtattccagcaccagggtctcctatgaggtccctcagggacaggatcagatatcctcccttcttctcatctttccctccaattctctttctgggtttcactccattgctctttagactttgatcctccattgtacaaggcacacaaaacgtgttaacccttttgctatggtaaagcagaaccagttcttagaaacaaagaactaatatcttagaaactctccaggagaggaaatgagaagcactgatcacatcttggtgagacactctttccctaggaaggagagcataatttagttgaggaaayaaaacaacagacacccaccccaagtaatgcttttatgaagttctgactaccaaggaagaggagcagaattgaatggcattctgattttgttataagagcacatcataagtttagagatgattgattattaaaaatcataccatagcatcctccttttctctaggcacactgagcacggtttgtttgtttttctgcctttaaaaaattagatatttcccaaagttgttcatcttgatttttaaaattcaatttccttccccaaatcctcatatctgtctttaaaattaggtccaatacttggtgctccatgaaagctctgtttgatgctgagggacaaagcaaggtcatgtcagggttttaaatgccatttaggtaaccacttacttgttgcagaatttagtttcataatttttatagctgtactgctttgataagtcatgctcagccctgcctatgacatctagagagtcaacccttcttcaaggcaccagcatctcagattgcttcattctattcctatataagtatttcctggggctataattgcctgagcatatggtgagagtataatgtgatgaaataatacatcacaagctgatcctaatcacctatccttaatccattacttccagatcactggggcgtgatttctaaggcattttttcaagcttgctcagtttctgagttctttagatatcatacaattgctttcagtaaatctgcatttctagcaccaatacagccatcaggactgtcacgttgtggacttctttgccttttctgggtcacaagggctgttgtcctttgggcaagaagcttctgcccaaatggctgaatgctgagattgagaaagtgcagcagctcccaccttagggaaaccacatcccagggttcttca

SEQ ID NO: 552335 - DNA, 553 bp, Homo sapiens
  misc_feature 427: n = A,T,C or G
atagttattaactacccctgtctttggaggggascttacttcctcagttttcttctctgccttctgtgtgtcattctgtcatcccaccttcatctaagaatgaggtctttgaaactcactggcattgacctcatggttcagcacctgcttggggctcgcagttgtccttgttatgactgacatgttctaagaggtatgctctttatcaactccatccctccctggcccccaaagtccttgaccctttggctgtagcagacacccctttactctggacaaatcatctttctttgctcagcacaaaaatgttgaaaagagcttatcctgactagtgatgttttctaaatgcttaaggtagcaaattattttcagttgtctgcattccttcatctttaatttcagtctaatgaggaagtgttttaagaanctcaaaatatcacataatcggcaaagaaccattacacttaagaagatagcatttcaattaacatattctatgtgataaagaatacttcacagctcatacacaaaacaagttattttgccttccttc

SEQ ID NO: 552336 - DNA, 980 bp, Homo sapiens
gaaagagaaatacagactagaactgttggaacaaatggctgagcaacagaggaacaagagacggtaatgaaaggtttgcatttaaaagagatattttgagtttaaagtgcatttgtgtaaaatgacatggttaaataaggggttgtcgttctaatatgatgtttgatttgtaaatcacttatattttcatctctacatgctaaatcaacaaggaaaataaatactaagagagttttttttttttttttttggtcataagtagcaagtgagagtatttatatattctgtaatagcccttttacttccctcattgatttcttcagtttttgatttaaggtagcatttaatgttatagatatgcccattggattatcccatatatagtaacaaatataaaagtattttttgccatatgaaatggtatgcacacacacatacwtgcaaaaaaaattgtatcctataaatttaacatttccatcccaaatgagcatctcaaaaccaactgtccctcttcattttctattaatagcccaataatggagcctcaaaatctcactatgacttggattccttgtcctctcgtattcacttcatacgaggccccctccttctttctattctcagagccattaatgttggataagtcctctctacgtctgacctggattgcagcaatagctttctaactaataactagtcttcccaactcccttctccctgctccagtagatccagcacactgtgtaatattaactgtcaaaaaatacactaatcaaactggcaccctgctcaaaaatcttcagtggcttcctcaattctacaggaatggtaaatcacaagtatttatgttgtacataggtatcattgtttgtagtctttcttgttgaaatacctatgagatattatagtttaaaattaggaatagagtttaaaattagaaattttaaatatagcttaaaattagaaattacagtggatca

SEQ ID NO: 552337 - DNA, 670 bp, Homo sapiens
aaaaaaacaaacatcaacgacagcaaaaacaacccaatggtgcagagttctgcttctggcatgacggcatgaggaattctatggacacattcccatgcaaaactggtgaaaattataaaaggacaaaacttaaagtctcttgaaatggtcctgggtcatggaggaagtgaaaaaacatttactcaagaaaatctattatagcttttaaaggtaagagtatgtagtctttgaacaaggttccactccatctctcctatcttttagctcaaccagatagaaaatccactccagacaggtgcagccaaaagcacaggttctctctccctacatctcccagtcagaggactattttcctaagcaagaaaggtcattgtcattgttctggcatataggatggtgtayctataccaagagaggatacttaaaaagatttcaggctattgccccacactccactgagtatgcagcgcctaaagaggagatatcacttggaaagaaaggtgtctttgcttctacttctagctccagagctctggctgggagatttggagtggggatagaaacaggccttaaggagacagctcctaatctcttcccagagaaactgacttcatttgaaatggaatatgtggaagtttaagccttagtgtgctctcaaaaactgtggaga

SEQ ID NO: 552338 - DNA, 666 bp, Homo sapiens
agaactctgacatgtctttatatggaatatacatgtgggttttgtctgtggtccaatcaaacttagtctatcaatcactttaaaagtattgagtcctcactcataccaaacactctgaaaatacaatagcataaaaattaagtgttgttggcagttccaagatggctgaataggaacagctccagtctacagctcccagcatgagcgacacagaagacgggtgatttctgcatttccaactgaggtacagggttcatctcaggcttgtcggacagtgggggcaggacagtgggtgcagtccactgagcatgagctgaagcaaggtgaggcatcacctcacccggaaagtgcaaggggtcagggaattccctttcctagccaagggaaggggtgacatacggcacctggaaaatcaggtcactcctaccctaatactgcgcttttccaatggtcttagcaaatggcacaccagaggattatatcctgtgcctggctcggagggtcccatgcccacggagcctygctcattgctagcatagcagtctgagatcaaactgcaaggtggcagcgaggctgggggaggggcgcctgccattgctgaggcttgagtaggtaaacaaagcggccagaaagctggaactgggtggagcccacagcagctcaagg

SEQ ID NO: 552339 - DNA, 640 bp, Homo sapiens
tataaaaaggctcagtcaacagggggcaactctgaagtggcagtagtttcatatcgccccaaggggctggtcaagcctgtcagtagtctcgcagtgtagcttgattttttccctcccatccaactttcttcccctttttgctacaggcattggtaccaagataattatctaataaacatctgacatgcaaaacactgtgtcagtatctggttcccagagaactcaagctaaaacatgcatgtttcagcacattttcttattatttccccttgacggggagaatcagtctgggacatgcagacytgagtagctctatccatccaatagaaagaatgatagccaggcccagcatccccattctacctctaattcctatctacacactattgactctccttgcaaccacaatctcagttttccaactttggataagattaaattccatgataaaaagtaaatacattgcacctagcacagctcaaaagatcatgtttggtctgtgattttattgttcattgcaaagcattgggatgtaattaacttttaaaattcatgccaaagaatgtcatttacaattaccaaatgagccagcaaaaccagaaacaaacaaacaaacaaacaaacaaaggcagtatctaaa

SEQ ID NO: 552340 - DNA, 372 bp, Homo sapiens
aaaaaaatcacagtctgtgatgcgccaggcactcaggatctggcctctgcagattcctccggtttcttcttcaggcctctttcaggtggtcacatgcacaaggtttcctcctgtctcaggaactgtttacacgctgttccttctccctagaaagcgcttcaccaccatcacctggttctcgcasataaattggtgagatttcagctcaaatgtcacttcctccaggaagtcctccctgtttcttggttctcctatctcattccctcattcaccagcccagtggagccatggtggacctatctcaagatcccaaagggcttgcgggccatgttaagacatttgctctttgtctggaagagaactgggagtcac

SEQ ID NO: 552341 - DNA, 1964 bp, Homo sapiens
gcttttattttaggtagcttcaaaattcctacttaaaaaatgaaacaaaaaacaggtaacataatttawaaacaccacccaagtctaagcaatttaacaagccaattaaaaaatgtatttatctaaagacattggttgggcgtggtggctcacatctgtaatcctagcactttgggaggctgaggcaagtggatcacttgaggtcaggagtttgagaccagcctggccaacacagtgaaaccctgtctctaccaaaatacaaaaattaaccaggcgtggtggtgcgcgcctgtagtcccagctactcaggaggctgagacaggagaattgcttgagcccaggaggtagaggttacagtcaatcaagatcgcgccactgcactccagcctgggtgacagagcaagactccatctcaaaaaaaaaaaaaaaaaaaaaaaagacatttgagccaagaaaaggcttaaaaatatataaaaaaattaattctgtacctacatttttttaaaaaaaggctaaacgaaacccccaaatgccatatacctaacatataaaattcttcttctgacctttgatcattcttggcacgaacactggtctcgaacttcaggccgttcctggcgacatactcggccagcttgtcaatcacgggctggacgtcggggggcggggggatgatggcggccacgggggcaagtgcactgcaggagaagagtctgtgagacccctgggcttcaggggctcgccaagctcagtcctggctgctcgggggtcctcaccgcctcagatgcccggagagacatgtgagttataaacagtgtgttaggggaggctcttgttgaaggtgatgcacacgacagaaactaaagtcaactagacaggattgttgtcaagagtgaaaaatggggattttagtgataaaaggtgcatttttcctactaattaacatttccccccaatcacaagctaattcttagaaataacaaagaataagcagtttgttgttgttgttgttatattgaaaacaagtcggcaagcatggttcaacctccttcatttcctgtctgacttgctcagcatgaccagaaagagtcgttttcacagaaactcgcgtgtttcattccatttcccaggagtctcctttcaaggcagggcattccaggcccactggtaaagcgcctgtctcatactcgtcccctgaacactgggggccctcgctgctggagaagctagggctctgccgatggcttcacaggttaactaaagtagctgccagggtcccctggtggccaacagcttgggagagactcatgaagcaccccaacatcacctgcgtcaactttatgaacctgcatgttttgcaaacaactgcagcttcactgcatactgattttgcctagcacagctcaactgagactctgacacaaagcgcaagaacagatgctggagatctggggccagcgtgcgacgtgaaatgaattcaactttataagtggtttaacttcaatgctaaaaagtttgtgctacaaccatttctgttttcctgtcaactttgtaacttggggatttggaataataactactcagacaatggggacccctgtatatgatctagattacaagccccccatggagacacagacggccccagtgactgcagtgctgagtgactcacacagcaggcagcggtggacgctgcacctaccttgtggtggtggttgtggaggtggccccgctgctagtctctgctgtggttgggggcggtagtggtgtggtcccaggaggtggtggggcggtggtcgtcactccaggggagttagacacggtcacgccagcaggaagggtgctgtagtaagtagtcacgtcgattccgggaggggcggcgccaggcagtaagtgccgtccggtagcatgtagtagctgtaatacatggctgccacggtcgctgtggagacacattgccccgg

SEQ ID NO: 552342 - DNA, 1964 bp, Homo sapiens
gcttttattttaggtagcttcaaaattcctacttaaaaaatgaaacaaaaaacaggtaacataatttaaaaacaccacccaagtctaagcaatttaacaagccaattaaaaaatgtatttatctaaagacaytggttgggcgtggtggctcacatctgtaatcctagcactttgggaggctgaggcaagtggatcacttgaggtcaggagtttgagaccagcctggccaacacagtgaaaccctgtctctaccaaaatacaaaaattaaccaggcgtggtggtgcgcgcctgtagtcccagctactcaggaggctgagacaggagaattgcttgagcccaggaggtagaggttacagtcaatcaagatcgcgccactgcactccagcctgggtgacagagcaagactccatctcaaaaaaaaaaaaaaaaaaaaaaaagacatttgagccaagaaaaggcttaaaaatatataaaaaaattaattctgtacctacatttttttaaaaaaaggctaaacgaaacccccaaatgccatatacctaacatataaaattcttcttctgacctttgatcattcttggcacgaacactggtctcgaacttcaggccgttcctggcgacatactcggccagcttgtcaatcacgggctggacgtcggggggcggggggatgatggcggccacgggggcaagtgcactgcaggagaagagtctgtgagacccctgggcttcaggggctcgccaagctcagtcctggctgctcgggggtcctcaccgcctcagatgcccggagagacatgtgagttataaacagtgtgttaggggaggctcttgttgaaggtgatgcacacgacagaaactaaagtcaactagacaggattgttgtcaagagtgaaaaatggggattttagtgataaaaggtgcatttttcctactaattaacatttccccccaatcacaagctaattcttagaaataacaaagaataagcagtttgttgttgttgttgttatattgaaaacaagtcggcaagcatggttcaacctccttcatttcctgtctgacttgctcagcatgaccagaaagagtcgttttcacagaaactcgcgtgtttcattccatttcccaggagtctcctttcaaggcagggcattccaggcccactggtaaagcgcctgtctcatactcgtcccctgaacactgggggccctcgctgctggagaagctagggctctgccgatggcttcacaggttaactaaagtagctgccagggtcccctggtggccaacagcttgggagagactcatgaagcaccccaacatcacctgcgtcaactttatgaacctgcatgttttgcaaacaactgcagcttcactgcatactgattttgcctagcacagctcaactgagactctgacacaaagcgcaagaacagatgctggagatctggggccagcgtgcgacgtgaaatgaattcaactttataagtggtttaacttcaatgctaaaaagtttgtgctacaaccatttctgttttcctgtcaactttgtaacttggggatttggaataataactactcagacaatggggacccctgtatatgatctagattacaagccccccatggagacacagacggccccagtgactgcagtgctgagtgactcacacagcaggcagcggtggacgctgcacctaccttgtggtggtggttgtggaggtggccccgctgctagtctctgctgtggttgggggcggtagtggtgtggtcccaggaggtggtggggcggtggtcgtcactccaggggagttagacacggtcacgccagcaggaagggtgctgtagtaagtagtcacgtcgattccgggaggggcggcgccaggcagtaagtgccgtccggtagcatgtagtagctgtaatacatggctgccacggtcgctgtggagacacattgccccgg

SEQ ID NO: 552343 - DNA, 1964 bp, Homo sapiens
gcttttattttaggtagcttcaaaattcctacttaaaaaatgaaacaaaaaacaggtaacataatttaaaaacaccacccaagtctaagcaatttaacaagccaattaaaaaatgtatttatctaaagacattggttgggcgtggtggctcacatctgtaatcctagcactttgggaggctgaggcaagtggatcacttgaggtcaggagtttgagaccagcctggccaacacagtgaaaccctgtctctaccaaaatacaaaaattaaccaggcgtggtggtgcgcgcctgtagtcccagctactcaggaggctgagacaggagaattgcttgagcccaggaggtagaggttacagtcaatcaagatcgcgccactgcactccagcctgggtgacagagcaagactccatctcaaaaaaaaaaaaaaaaaaaaaaaagacatttgagccaagaaaaggcttaaaaatatataaaaaaattaattctgtacctacatttttttaaaaaaaggctaaacgaaacccccaaatgccatatacctaacatataaaattcttcttctgacctttgatcattcttggcacgaacactggtctcgaacttcaggccgttcctggcgacatactcggccagcttgtcaatcacgggctggacgtcggggggcggggggatgatggcggccacgggggcaagtgcactgcaggagaagagtctgtgagacccctgggcttcaggggctcgccaagctcagtcctggctgctcgggggtcctcaccgcctcagatgcccggagagacatgtgagttataaacagtgtgttaggggaggctcttgttgaaggtgatgcacacgacagaaactaaagtcaactagacaggattgttgtcaagagtgaaaaatggggattttagtgataaaaggtgcatttttcctactaattaacatttccccccaatcacaagctaattcttagaaataacaaagaataagcagtttgttgttgttgttgttatattgaaaacaagtcggcaagcatggttcaacctccttcatttcctgtctgacttgctcagcatgaccagaaagagtcgttttcacagaaactcgcgtgtttcattccatttcccaggagtctcctttcaaggcagggcattccaggcccactggtaaagcgcctgtctcatactcgtcccctgaacactgggggccctcgctgctggagaagctagggctctgccgatggcttcacaggttaactaaagtagctgccagggtcccctggtggccaacagcttgggagagactcatgaagcaccccaacatcacctgcgtcaactttatgaacctgcatgttttgcaaacaactgcagcttcactgcatactgattttgcctagcacagctcaactgagactctgacacaaagcgcaagaacagatgctggagatctggggccagcgtgcgacgtgaaatgaattcaactttataagtggtttaacttcaatgctaaaaagtttgtgctacaaccatttctgttttcctgtcaactttgtaacttggggatttggaataataactactcagacaatggggacccctgtatatgatctagattacaagccccccatggagacacagacggccccagtgactgcagtgctgagtgactcacacagcaggcagcggtggacgctgcacctaccttgtggtggtggttgtggaggtggccccgctgctagtctctgctgtggttgggggcggtrgtggtgtggtcccaggaggtggtggggcggtggtcgtcactccaggggagttagacacggtcacgccagcaggaagggtgctgtagtaagtagtcacgtcgattccgggaggggcggcgccaggcagtaagtgccgtccggtagcatgtagtagctgtaatacatggctgccacggtcgctgtggagacacattgccccgg

SEQ ID NO: 552344 - DNA, 539 bp, Homo sapiens
atatatatatgataaattacaggtaaatgaatagatggataagcagatagataatagagatgaagacagacatgcactgggtcttgaattaagatgtgtttcttatgtatatgtgttttaacaaaaaaaaatagaaaaacttctatctaatctccattaattttttgttatctaatcttcattattttattcctcttacttgctttcaattttgtttgctcttatttttcttgtatttttataagatgatacgttattyacaaacttttttttaaagtggcatttacagctgtaaatttctctctaagcaatgttttagtagcaaggtgtaaattttggtatgttgtgttttacttttcattcatctcaaagtattttctaatgttcctgtttatttcttctttgcccattggttatttaataatgtgtcatttaacttccacatatttgtggatttcccaaatttcttcatgtttttgatttctagtttcacttcattgtcatcagagaattcactttctatggtttaaatcctgtta

SEQ ID NO: 552345 - DNA, 581 bp, Homo sapiens
agagttcattttattttcttgattggataatttcttgtggggtaaaatcatggatgggaacagtcaatacatataaataggaagaaatctgcttactgagttttctgtaagggatattttccaatccaatattacttttttcttatgaagtcaatttatttcataaagaatataataagtggatatgtatccagaagttcctactcgatttctttctttgaaggctatgcacttgttatatggtttgaaaaaaattgcctcgtayggggaacttttctttaccacaatattgattgtatagtgagttaaattatgtcccctctgtttgtagtcagatagttcagtgtgaagtagaaggctttcaatatatattttaaaaattgttaattctctggaatctatcattttcgaaaggactttgtcatgtttcttttttttttttttttgagacagagtctcactctgtcacccagttggagtgcagtggtgcgatctcggctcactgcagcctccgcctcctgggttcaagcgattctcgtgtctcagccttccgagtagctgggactacaggtacatgccac

SEQ ID NO: 552346 - DNA, 775 bp, Homo sapiens
aagtgattttacattattattattaaagattcatattgtaattatgtggcaactactgcaatacccaatctgctggaacactcagcatgccaatagggtagtattaggtatgtctcttcagtgggaattcttacaaaattcaagggcaatttttaggattactaaatgaacgctgagatgtaaggcagcacttcagagtgtggaaacatttctatcttagaagctgtaggttccatataagaagcactgggcataaccctcggcccccacaacgaaacacctctgtatgtcattcaacatacaagaaaaatcaaagctgtgtcttccaacgtgatatttgtaattcataaatggtccttttaatccagcttctaggaacttattacttagtattacactaaaatgccgttatcatcagkcttctaggaaaacaggtacataaaagttaaccccaggtcagtttcccatgtagaaagaaagttttgttaaaattatactcacaactatgaaaatagtagtaacaagttggatatcaaaataaaattcatagagaaaacatctcaaagggagaaaaaggaaaaagctagtgggacaaactaaaaacagatactaaaatggctgatataaatctaaattagtaagtaattataatgaacttatataggctaaatgcttatagagcaagttagaaaataacaatgcccataatgcttattagaatcgaatctttaatgtaagggaagaaagctaaatgtagaaggattaaaaaaatgca

SEQ ID NO: 552347 - DNA, 775 bp, Homo sapiens
aagtgattttacattattattattaaagattcatattgtaattatgtggcaactactgcaatacccaatctgctggaacactcagcatgccaatagggtagtattaggtatgtctcttcagtgggaattcttacaaaattcaagggcaatttttaggattactaaatgaacgctgagatgtaaggcagcacttcagagtgtggaaacatttctatcttagaagctgtaggttccatataagaagcactgggcataaccctcggcccccacaacgaaacacctctgtatgtcattcaacatacaagaaaaatcaaagctgtgtcttccaacgtgatatttgtaattcataaatggtccttttaatccagcttctaggaacttattacttagtattacactaaaatgccgttatcatcagtcttctaggaaaacaggtacataaaagttaaccccaggtcagtttcccatgtagaaagaaagttttgttaaaattatactcacaactatgaaaatagtagtaacaagttgratatcaaaataaaattcatagagaaaacatctcaaagggagaaaaaggaaaaagctagtgggacaaactaaaaacagatactaaaatggctgatataaatctaaattagtaagtaattataatgaacttatataggctaaatgcttatagagcaagttagaaaataacaatgcccataatgcttattagaatcgaatctttaatgtaagggaagaaagctaaatgtagaaggattaaaaaaatgca

SEQ ID NO: 552348 - DNA, 634 bp, Homo sapiens
gataaagccaaataagagcaaaccaaggtcagtcacttgacaaataatccaagagagaaaaaaggttaccatataaaatcgtactgattaataaactgataagcrgcacattgaattccttgcagaatggggcttgattcttacttagagcccacagagtatgacctggtattgttgagtaattgagtcattgtccttcattgaagaaagcatgattttcctttatagaaaggactaattaaagaaggtaacatgaaacacttgaagtgaatacttaaatgaaattataggaaattgtcatgctcattttgttctctttccatggtattctttaaaaaggaatttatttttaaaatattgtttcagtattttggccaactgatgaagtgtaagtagatcaggaacatgaactgagctgcatgtttcacttgagttcaagagcatcctaaataattttttacatggaactttcttttgatcatctacttttgcttgagacaaaaaaaaagaaaaaacagtttttcgttgaaataaaatataccacaggcacaacttttattattttttgttcccattttttatcacatatttctgcacaattttaatgtcttttggggcaaaactttctggggtt

SEQ ID NO: 552349 - DNA, 634 bp, Homo sapiens
gataaagccaaataagagcaaaccaaggtcagtcacttgacaaataatccaagagagaaaaaaggttaccatataaaatcgtactgattaataaactgataagcggcacattgaattccttgcagaatggggcttgattcttacttagagcccacagagtatgacctggtattgttgagtaattgagtcattgtccttcattgaagaaagcatgattttcctttatagaaaggactaattaaagaaggtaacatgaaacacttgaagtgaatacttaaatgaaattataggaaattgtcatgctcattttgttctctttccatggtattctttaaaaaggaatttatttttwaaatattgtttcagtattttggccaactgatgaagtgtaagtagatcaggaacatgaactgagctgcatgtttcacttgagttcaagagcatcctaaataattttttacatggaactttcttttgatcatctacttttgcttgagacaaaaaaaaagaaaaaacagtttttcgttgaaataaaatataccacaggcacaacttttattattttttgttcccattttttatcacatatttctgcacaattttaatgtcttttggggcaaaactttctggggtt

SEQ ID NO: 552350 - DNA, 638 bp, Homo sapiens
cagtgctttaattacgtacttgtatatgactctctgtgtattcttccagttatttctggagaatataaagctttatcagagattatgtataattcatatttcaacaaataatgccattcatatgtttgtacttcctttttgatttttgagaattttaacatattctgaggtaattatttgcaagtattatgcttgcattttctcagtcttcagaaatagttctttgccttcattgggcattatactaacattgaaatttagaaaataattatattaagaataaacagtggcttaaaaagtgtggcctcactatgtaggccctaaaaagaaatagaaaatattaaagatttatatttaaagtcaataatgaaaaatgagagttaataagattatataaaactgctaaaattcacaagagttacataaattaatatatactgctctgttcagagcaatatagtgtacaaacaaattacaaaataatkgatataaactggcctaaatggcaaagggtttgtaattatctgaacacatgtactttataaataatgacattttaaatacatggacaaactgtgataatttcagcaccctttcaaggaagaggcaagttataagttgctttgggccattctctt

SEQ ID NO: 552351 - DNA, 3562 bp, Homo sapiens
ggtgctgggaaaactggctagccatatgtagaaagctgaaactggatcccttccttacaccttatacaaaaatcaattcaagayggattaaagacttaaacgttagacctaaaaccataaaaaccctagaagaaaacctaggcattaccattcaggacataggcatgggcaaggacttcatgtctaaaacaccaaaaacaatggcaacaaaagacaaaattgacaaatgggatctaattaaactaaagagcttctgcacagcaaaagaaactaccatcagagtgaacaggcaacctacaaaatgggagaaaattttcgcaacctactcatctgacaaagggctaatatccagaatctacaatgaactcaaacaaatttacaagaaaagaatatttcatttgtgatattttttatacttttatgcctcataaaagaccatgagatttagtggatggatcactgcatttaaaatcaaggaaactgaggtgaatgacttcaatgaaaactaggtatataataccaagcatcagtttacaataattatgaattttgactcactgtgagaggtattagaaatatcatttaaaaccaggctaatggtgccaagagtaactttagctttgcattaaccatctttaaaatagtctggtttctttctgtcccaatatactataagtattgtctaaaatttttgctctaaaacacaattgcaattaattagtatctgtcattcaatatttgaataaatcgaaaaataaaatacattaaatgccaaggaaaattttaaggtataattaattcatattttggcaatatgaactcatcctgatctgccttctcaattgtttatagggtatcattggctaatgtgtgcttagatactaacccttattgatccacccacagctggtaacactccactctcttgtttatggctaattgcctcatctactctctttacaatggcatggtaagttagagtaatggcctccaacactattatatcatttgtttaaacgaccctagacagacaattaatacagttctccataggtcaaaatctacagttcataatgaagcatagaaatctataatgccacccaagggcacgtctcaggagttcaaatctgttcactcaggcaactaaaaaggtctcataatcttttattgcactacttttaatatctgcactgaagcacaaaaggcttcctgcttccgtgcatttgattctcatactgtcaaatcatatgttgcttcactataatttatactttggaacatacatccatgtcacttatatatactaaagtgaatgtattaacaaatactattttaatgcttttctttataaacatttaaagttttagaaagtattaatatattctatgattataactcaaatgatataaaaataaaggataatttacttaaagaggcttataaacaaaatactatcaaatttaaacttaggaatttcatgttacaaaaatatcttcagcttagtactaaatactcaggataaaatgttaataaaatacatttactttttatcacaattcctgataatatggtgaacaagagttttaaagaataatttgacagaaatggttatttctaaattattcaccgtcatgcattagagaaatatttccacaactttcgtctcataattttcactatgagagaagaattttactctgacccatttatgttggatgtgtttaatagtttatacagtataacaaataaccataatttctgtgtttggatgtgcataagaatagctaaattgcttcttgcaagcgaatcattcagtggccacagagaagacttaaggcaggaaatgagagatatgtacaatacattgtaactgagttaaggtcctgtcagtttaaaagtgtatccagccagttgccatagctctggctacagaaaaaaacaaaaacaaaacaaaacacacacaaaaaaacccagaggatgtcaagaggtgtctgaaacaccccctacaaacaaaaataagcttgcaatttgcactaaacacaataaatcacacagttcttttgtaagaaacgctgttgttttgtaagagaaatgctacccttataggaaaggtaaaagttctggctaaattccccactagaggaatttgtcacaaggctatcacttctcccatatttcttttagattctcttttcctgtggctaggtgactaaatttttctctcaaaacattaggttcttgagtcatttttctcttgtaaggtcagagttcataaaattggccattcacaattactggacatgaaagcaccaacagacttcttatgaaatcccttgtctttcacttatgtgttccttttttatttcataagagcaaaccagtctcttattctttatgaagctcagtgccccctactactatggtaaatcctttcttagtctgattcactagtgtaagaagatacggaagatcagggttagtcaaaacctcagatcaaataaaatatttactatgccacttgataggcatactactgcctcctcctgtcttgagattcaaggcttcaagccttgaacatgaggttgatggaatgggagacacaatcttcacagatgagttgctgccaagtgatggtgaaaaggtgtaatgttatattttggccttggtttccagactcacttattctaattattcctcatcacaaatcagcaattggttcgctgcatttcccactccttgattgacagagcctcagtctcacattaccttgtccctcagttagcaatttacttgagattgtattaggcaaacctctgatatgtttccaatttgcatatcacttgtatgtatcttccactgtaaggcagattcgttgttttgtgttgatgaaggatcccctttcaataagtaagaatcagtttatgtattctggaatagactctttttgacaatattattcattatggttacttctaattacttcatacatgctggaaattaagactgaaatcacacccaggagctgttgtagagtttttctatactctgagctcccctcagaactggccacattctgggtcatctgattcagaggaatgccaagtttacaagagtggtatattctatcttcagaatgcaaaaaagtccattgaatactgtgtctatttttaatttggagggttggaaactgcaacaattcttccttaattttagagaatatgtctaccatgctttcagtcaatgggctgctaaacagtttatctgtatagcataaccaaaatgtctgtggggttcatttcacactttcagcatgcacatgtcttactagggtaaccaggtcacctgctacttcctcctcatgtggttcatttagcataatgtgattaataaaattgaaccatcatgatgtctatgaaatatcaagaatatcaagatcctttaggcctataatttaacaaaaaaaagtgcaattaaaagctttgggaaaatatagtaaatatgtattgctgtctttcatacataaaatatttttattgtctttaatgacagatatggagaaaaa

SEQ ID NO: 552352 - DNA, 3562 bp, Homo sapiens
ggtgctgggaaaactggctagccatatgtagaaagctgaaactggatcccttccttacaccttatacaaaaatcaattcaagacggattaaagacttaaacgttagacctaaaaccataaaaaccctagaagaaaacctaggcattaccattcaggacataggcatgggcaaggacttcatgtctaaaacaccaaaarcaatggcaacaaaagacaaaattgacaaatgggatctaattaaactaaagagcttctgcacagcaaaagaaactaccatcagagtgaacaggcaacctacaaaatgggagaaaattttcgcaacctactcatctgacaaagggctaatatccagaatctacaatgaactcaaacaaatttacaagaaaagaatatttcatttgtgatattttttatacttttatgcctcataaaagaccatgagatttagtggatggatcactgcatttaaaatcaaggaaactgaggtgaatgacttcaatgaaaactaggtatataataccaagcatcagtttacaataattatgaattttgactcactgtgagaggtattagaaatatcatttaaaaccaggctaatggtgccaagagtaactttagctttgcattaaccatctttaaaatagtctggtttctttctgtcccaatatactataagtattgtctaaaatttttgctctaaaacacaattgcaattaattagtatctgtcattcaatatttgaataaatcgaaaaataaaatacattaaatgccaaggaaaattttaaggtataattaattcatattttggcaatatgaactcatcctgatctgccttctcaattgtttatagggtatcattggctaatgtgtgcttagatactaacccttattgatccacccacagctggtaacactccactctcttgtttatggctaattgcctcatctactctctttacaatggcatggtaagttagagtaatggcctccaacactattatatcatttgtttaaacgaccctagacagacaattaatacagttctccataggtcaaaatctacagttcataatgaagcatagaaatctataatgccacccaagggcacgtctcaggagttcaaatctgttcactcaggcaactaaaaaggtctcataatcttttattgcactacttttaatatctgcactgaagcacaaaaggcttcctgcttccgtgcatttgattctcatactgtcaaatcatatgttgcttcactataatttatactttggaacatacatccatgtcacttatatatactaaagtgaatgtattaacaaatactattttaatgcttttctttataaacatttaaagttttagaaagtattaatatattctatgattataactcaaatgatataaaaataaaggataatttacttaaagaggcttataaacaaaatactatcaaatttaaacttaggaatttcatgttacaaaaatatcttcagcttagtactaaatactcaggataaaatgttaataaaatacatttactttttatcacaattcctgataatatggtgaacaagagttttaaagaataatttgacagaaatggttatttctaaattattcaccgtcatgcattagagaaatatttccacaactttcgtctcataattttcactatgagagaagaattttactctgacccatttatgttggatgtgtttaatagtttatacagtataacaaataaccataatttctgtgtttggatgtgcataagaatagctaaattgcttcttgcaagcgaatcattcagtggccacagagaagacttaaggcaggaaatgagagatatgtacaatacattgtaactgagttaaggtcctgtcagtttaaaagtgtatccagccagttgccatagctctggctacagaaaaaaacaaaaacaaaacaaaacacacacaaaaaaacccagaggatgtcaagaggtgtctgaaacaccccctacaaacaaaaataagcttgcaatttgcactaaacacaataaatcacacagttcttttgtaagaaacgctgttgttttgtaagagaaatgctacccttataggaaaggtaaaagttctggctaaattccccactagaggaatttgtcacaaggctatcacttctcccatatttcttttagattctcttttcctgtggctaggtgactaaatttttctctcaaaacattaggttcttgagtcatttttctcttgtaaggtcagagttcataaaattggccattcacaattactggacatgaaagcaccaacagacttcttatgaaatcccttgtctttcacttatgtgttccttttttatttcataagagcaaaccagtctcttattctttatgaagctcagtgccccctactactatggtaaatcctttcttagtctgattcactagtgtaagaagatacggaagatcagggttagtcaaaacctcagatcaaataaaatatttactatgccacttgataggcatactactgcctcctcctgtcttgagattcaaggcttcaagccttgaacatgaggttgatggaatgggagacacaatcttcacagatgagttgctgccaagtgatggtgaaaaggtgtaatgttatattttggccttggtttccagactcacttattctaattattcctcatcacaaatcagcaattggttcgctgcatttcccactccttgattgacagagcctcagtctcacattaccttgtccctcagttagcaatttacttgagattgtattaggcaaacctctgatatgtttccaatttgcatatcacttgtatgtatcttccactgtaaggcagattcgttgttttgtgttgatgaaggatcccctttcaataagtaagaatcagtttatgtattctggaatagactctttttgacaatattattcattatggttacttctaattacttcatacatgctggaaattaagactgaaatcacacccaggagctgttgtagagtttttctatactctgagctcccctcagaactggccacattctgggtcatctgattcagaggaatgccaagtttacaagagtggtatattctatcttcagaatgcaaaaaagtccattgaatactgtgtctatttttaatttggagggttggaaactgcaacaattcttccttaattttagagaatatgtctaccatgctttcagtcaatgggctgctaaacagtttatctgtatagcataaccaaaatgtctgtggggttcatttcacactttcagcatgcacatgtcttactagggtaaccaggtcacctgctacttcctcctcatgtggttcatttagcataatgtgattaataaaattgaaccatcatgatgtctatgaaatatcaagaatatcaagatcctttaggcctataatttaacaaaaaaaagtgcaattaaaagctttgggaaaatatagtaaatatgtattgctgtctttcatacataaaatatttttattgtctttaatgacagatatggagaaaaa

SEQ ID NO: 552353 - DNA, 2051 bp, Homo sapiens
tcttgccatacataataaatacatatagtaaaaataataataatacatgcactttgtagaaaaatatgaagaaaaattaaaatcatctgtaaacttatgactcagagacagccactcttaacgttttggtatatattcttccataattttcttcagtaatgtgtatacaatgaagtaaatatcacatacatataattttgtgccctctttttttgcttgatatcatttcgtaagcatttcttttcttttctttctttctttttttttttttttttgagacagagtctcgctctgtcacccaggctagagtgcagtggcgcaatcactgctcactgcagccccaacctcccccatctcagctgatcctcccatctcagcctcttgaagagctgggactacaaatgcgagccatgcctggctaatttttgtatttttggtagtcccccaaaggactagaggcatgagcaatcacacctggcctcggaagcattttcaataccttcctcttaaatggaagcgtctttcttgaaagaagtgtttctttcttcattgcaagttaaatagacaagtatctatccctcaggcctcagctgtgtacccctaaagttgcctgcaagaagaattactgtgcatttttatttgaaggagtcctaccctagctcaccatttgggtagatgtccccgtaccaatcaagttaagtatcaacaacaaaacattttcttcctttttaatttattttccacttgactctaagtgtggaataggctaggaaccctgcagtaaggaggaattttctgaattgtaggtaagttaaaaagaaagaaaaaaagaaagaaactaccttggtcagggctgcatcctttcagttcttattcctgtgcattatgaaatctgcataaagcattataccattcaccattggggtcctttcctgtggccgttagcggggtgtggttctgcaacgtgcagtcaagttcagggagcctgggctactcttctcttaagtcatgtgcttcatcactgcacaatccagaaaaacatggacaattagctccaagcatttccctcaggggaatggatatgagggcagtgaatagaaagagggccccaaacttttagagaatttatagagccagacctccccagaattccagaatgaatgtcctcagacctgaggtttgacagcaggataaagcaaggcaagaagaaccaggctgcctcctaggccaccaggctgaggtcttgaatggggcccaagcagaacactatagattcctaaatgcatcttcaagcccaacaaagattcttttttcttttttttttttttttgaaacaggatctcactccatcacccaggctagagtgcagtagcatgatcacagctcactgcaacctcaatctccctggcttaggtgatccctccacctcagcctcccaagtagctgagactacaggggcatgctatcatgcctggctaatttttgtatttttagtagagacagggttttgccatgttgcccaggctggtctcaaattcctgggctcaagcratctgcccgcctcggcctcccagagtgctgggattacaggcatgagccactgtgcctggccaacaaagtatttaagctcccactgacgtctaagtggccattagcacttagaaatctgaaaatttctagacgactttctcctcctgtttatgtgcattatgaaatctgcatagagcattatgccatttgttgatggggtcccttcatacagccataagctagggtttggcctttagcagtaacaaacccatttggggttgccattataatcatttcctcattgaagagcgaatagaacttaattgctcccctgacacaacctaaccactaccacaatgctccattttgtatttggggtgtttgtgtatatccacgagggcctccctacctcttgctccacacctaggctggtatggcctggggcccattcctcccacagagctgaaccatttggagacagctgggaagaagcattagaaattgaacttgttctgaaagga

SEQ ID NO: 552354 - DNA, 2051 bp, Homo sapiens
tcttgccatacataataaatacatatagtaaaaataataataatacatgcactttgtagaaaaatatgaagaaaaattaaaatcatctgtaaacttatgactcagagacagccactcttaacgttttggtatatattcttccataattttcttcagtaatgtgtatacaatgaagtaaatatcacatacatataattttgtgccctctttttttgcttgatatcatttcgtaagcatttcttttcttttctttctttctttttttttttttttttgagacagagtctcgctctgtcacccaggctagagtgcagtggcgcaatcactgctcactgcagccccaacctcccccatctcagctgatcctcccatctcagcctcttgaagagctgggactacaaatgcgagccatgcctggctaatttttgtatttttggtagtcccccaaaggactagaggcatgagcaatcacacctggcctcggaagcattttcaataccttcctcttaaatggaagcgtctttcttgaaagaagtgtttctttcttcattgcaagttaaatagacaagtatctatccctcaggcctcagctgtgtacccctaaagttgcctgcaagaagaattactgtgcatttttatttgaaggagtcctaccctagctcaccatttgggtagatgtccccgtaccaatcaagttaagtatcaacaacaaaacattttcttcctttttaatttattttccacttgactctaagtgtggaataggctaggaaccctgcagtaaggaggaattttctgaattgtaggtaagttaaaaagaaagaaaaaaagaaagaaactaccttggtcagggctgcatcctttcagttcttattcctgtgcattatgaaatctgcataaagcattataccattcaccattggggtcctttcctgtggccgttagcggggtgtggttctgcaacgtgcagtcaagttcagggagcctgggctactcttctcttaagtcatgtgcttcatcactgcacaatccagaaaaacatggacaattagctccaagcatttccctcaggggaatggatatgagggcagtgaatagaaagagggccccaaacttttagagaatttatagagccagacctccccagaattccagaatgaatgtcctcagacctgaggtttgacagcaggataaagcaaggcaagaagaaccaggctgcctcctaggccaccaggctgaggtcttgaatggggcccaagcagaacactatagattcctaaatgcatcttcaagcccaacaaagattcttttttcttttttttttttttttgaaacaggatctcactccatcacccaggctagagtgcagtagcatgatcacagctcactgcaacctcaatctccctggcttaggtgatccctccacctcagcctcccaagtagctgagactacaggggcatgctatcatgcctggctaatttttgtatttttagtagagacagggttttgccatgttgcccaggctggtctcaaattcctgggctcaagcaatctgcccgcctcggcctcccagagtgctgggattacaggcatgagccactgtgcctggccaacaaagtatttaagctcccactkacgtctaagtggccattagcacttagaaatctgaaaatttctagacgactttctcctcctgtttatgtgcattatgaaatctgcatagagcattatgccatttgttgatggggtcccttcatacagccataagctagggtttggcctttagcagtaacaaacccatttggggttgccattataatcatttcctcattgaagagcgaatagaacttaattgctcccctgacacaacctaaccactaccacaatgctccattttgtatttggggtgtttgtgtatatccacgagggcctccctacctcttgctccacacctaggctggtatggcctggggcccattcctcccacagagctgaaccatttggagacagctgggaagaagcattagaaattgaacttgttctgaaagga

SEQ ID NO: 552355 - DNA, 2051 bp, Homo sapiens
tcttgccatacataataaatacatatagtaaaaataataataatacatgcactttgtagaaaaatatgaagaaaaattaaaatcatctgtaaacttatgactcagagacagccactcttaacgttttggtatatattcttccataattttcttcagtaatgtgtatacaatgaagtaaatatcacatacatataattttgtgccctctttttttgcttgatatcatttcgtaagcatttcttttcttttctttctttctttttttttttttttttgagacagagtctcgctctgtcacccaggctagagtgcagtggcgcaatcactgctcactgcagccccaacctcccccatctcagctgatcctcccatctcagcctcttgaagagctgggactacaaatgcgagccatgcctggctaatttttgtatttttggtagtcccccaaaggactagaggcatgagcaatcacacctggcctcggaagcattttcaataccttcctcttaaatggaagcgtctttcttgaaagaagtgtttctttcttcattgcaagttaaatagacaagtatctatccctcaggcctcagctgtgtacccctaaagttgcctgcaagaagaattactgtgcatttttatttgaaggagtcctaccctagctcaccatttgggtagatgtccccgtaccaatcaagttaagtatcaacaacaaaacattttcttcctttttaatttattttccacttgactctaagtgtggaataggctaggaaccctgcagtaaggaggaattttctgaattgtaggtaagttaaaaagaaagaaaaaaagaaagaaactaccttggtcagggctgcatcctttcagttcttattcctgtgcattatgaaatctgcataaagcattataccattcaccattggggtcctttcctgtggccgttagcggggtgtggttctgcaacgtgcagtcaagttcagggagcctgggctactcttctcttaagtcatgtgcttcatcactgcacaatccagaaaaacatggacaattagctccaagcatttccctcaggggaatggatatgagggcagtgaatagaaagagggccccaaacttttagagaatttatagagccagacctccccagaattccagaatgaatgtcctcagacctgaggtttgacagcaggataaagcaaggcaagaagaaccaggctgcctcctaggccaccaggctgaggtcttgaatggggcccaagcagaacactatagattcctaaatgcatcttcaagcccaacaaagattcttttttcttttttttttttttttgaaacaggatctcactccatcacccaggctagagtgcagtagcatgatcacagctcactgcaacctcaatctccctggcttaggtgatccctccacctcagcctcccaagtagctgagactacaggggcatgctatcatgcctggctaatttttgtatttttagtagagacagggttttgccatgttgcccaggctggtctcaaattcctgggctcaagcaatctgcccgcctcggcctcccagagtgctgggattacaggcatgagccactgtgcctggccaacaaagtatttaagctcccactgacgtctaagtggccattagcacttagaaatctgaaaatttctagacgactttctcctcctgtttatgtgcattatgaaatctgcatagagcattatgccatttgttgatggggtcccttcatacagccataagctagggtttggcctttagcagtaacaaacccatttggggttgccattataatcatttcctcattgaagagcgaatagaacttaattgctcccctgacacamcctaaccactaccacaatgctccattttgtatttggggtgtttgtgtatatccacgagggcctccctacctcttgctccacacctaggctggtatggcctggggcccattcctcccacagagctgaaccatttggagacagctgggaagaagcattagaaattgaacttgttctgaaagga

SEQ ID NO: 552356 - DNA, 643 bp, Homo sapiens
ttaatggatttgatggcacaacagacagggggaagctggagccgtgtgccgagtggcggggtgtaaattgcctcagatgaaactgtggagtcacttttgccccttttaaataagataagaattagtgcgaggccttgatgaactcgccttggctggtggggatgagggaaaagcagagcctgggctaatttgattcgtgagctctgcctgcagacggccaggctcctcccaaggaatagaggcagacacacagatggcggcgatccagtctgggtaatgaaaagctccgagactgcaggacccacaggcctgagccttccttccccttgtgtccagcggctctagcactgcagagagaaggatgtgatcacatgtgggcctcaacttcccatctatcgctggatgccgttgccccttgtcctacccctgattgcttttcttgctcccattttccaggttaaaacacagagcccmgagaacctccatgacatgcgttaattcccacagctaatttcagacggaactgagatcttccagactcttggctccagccttttctattacagctgtgtttcccatcttctgcagtaaaattttactagtctgtaaaacttttaccaccaaagagcctgaccttttaaaa

SEQ ID NO: 552357 - DNA, 651 bp, Homo sapiens
cgagaaggattcacactgcaatttcttggtgtccttcccacattgattatgtgcaagtatcagaatgttagggggaaaatacatatcaggcagggaattgcactaataaatctcctaattctcttccagctgtgtaatttatgactctgttggtgatgacttattggcttgcaggtgatataatcaaggacacccagagactaacaaagtgaagggaaattacatctatggcaacagcagaataaacagtacaaaataacagattttgtgagactaggaaaataaggcagctaaagagtgggggcagcccactgcatcgagaagcaggcttctgtggcaagcctgactctgccccttaaccaactgtgaggttttactccagtgaagaaagctctctgggcttcagctcggtcaactgcagcatgaagaggacaacactaacctcttaggggcactctggggattagaggagacttcaatgaatatgaaaacagctagcaaattgttagcacttaatagatgctaaactaatttcagttkaaatacagtaatttaaagaaataaaacatttacaaaataagggccatgcacatggggattgcaaagtttatccagtacagacagctgaaaagatgctaagacagaggttcc

SEQ ID NO: 552358 - DNA, 716 bp, Homo sapiens
ttttctaatgccttccagtagtttccaagggacgtgaagaaccaattacctatctaggttcctctccttctctcatcttcctcctcataaatcacacaagtccaggagagtgtaaagacatttatatttctgtgcactgagcaaacctttctttccgtaaacaggagtttgttaaggaagtattctcctcttaagaaaattggaacaacacagttttttacatttttatagctttctaagatttttcacaaggtggatcccaaatttttaggtttcacagactagtaaaattatcaaaaaatgtctgactttgtattttgccarataatggtatttgagagagaaaaagttatatgtaacatcaccattatttatgaaaataaaaggtcatgatcatggtcaagggggtcattttacataaaaggtcttttaaatagcccaaaattgactctttggaaaactctgctgtccaaaattttcgccttctgcagagttgtagacactttctcaaaaactttcataatcaccctctagagtaggcaaagcatatattgttctcatcttgcctgttaagaaatgtgtgctaagaggtacgaagtaactagttgaaaatcacaactatgttgtggtagacctcaaagttgaatggagccattggactcctatcttcctcattctgcaatactgcctcctggaatgctatttcaattgtttcc

SEQ ID NO: 552359 - DNA, 639 bp, Homo sapiens
cgctggaatgatcccctaaaacaacagcaggacctagagagtccttcttcaaagacggcacctagagtgatgctctccgagcastgaaagacaggacccacgtcacaagcgtaccctctccagctccctccacagagaaaattactgagactcgcattttagacccgagggaatggaggccgagggcagcgaggcgacagctccaggttagagccagagacagggacctctccttacaactcctgtcctggattcaggaccctgggtaggaagtgattagccctgccctctcacctcaccctctcccgggatctccataacctagggcatcaaaagggagaagcacagagtcccggcatccgccgtattacagcggatgggtgcatgcgggcggtgacccgagctcgcgcgggctgcggaaccctccactcaccaacgccggcgccgccatgggcccagggggctgggtgaggccgtgagagtcggcgaggaagccggtcctgcgggctcggccgaccccgggctccggctctgggctgcgagggacctcagtccccgccgtcgtgtaaaatgcacacaaggttcgcggcgccgcctctgcgcgccgtgaggacacagggctgtcgccaaggccccagg

SEQ ID NO: 552360 - DNA, 1336 bp, Homo sapiens
ttatcttaacccagacatttccttctattgactccaggtctttagataataactctttcaactaattgtcaatcagaaaatctttaaatccacctatgaccaggaagcctccccacactttgaattgtcctgcttttctagatggaaccaatgaaactcttacatgtattgattgatgtctccctaaaacatataaaaccaaactgtagtctgaccaccttgagtacatgttttcaggatctggagctgtgttaagggctattggtcactcatatttggctcagaataaatcttctcaaatattttacagattttgactctcttcatcaacaaaagatgtggaactcaaggtcctatatctttcatacaggatgtttgatcctgacccaagtatcagttgagagaaaaataaattcatttttttgtgtgtgtattccmaatatcatttgaaattcaaatgctcttcattctaggtagaatttgaatctgttcaaattgacatgattgattgattgaggttagcatttgaatagaaaatggaaaaacagcaaaattggtagattgttttccctgataaagtggggaggtgtgggaagtcccaggaaggtttctggcatatcactttaaaattatcatttcatttaatttgactgcaaaagggaggaaaacaaattcagaagtgattgttcttttatgcattttcatttttactttaaataattacaaaattggattttgcatatttttgcagttataacccaagaaaaaatagaatagaaagctaaatgaaaattacttttgtatttgatttagaattcacatcctattgagtaatgaaccacagagaattttctctatataaaaactttttaaaattattttataaaattgttttttacatatttatgttgataatatgttaatttttttattgttaaattatgaatttaaaatatgtaatagaagcatcacattcttttcaaattacagtagtaatatagaaacaaaatagatgactcagaaaaataaacaactaaaattatggcactatttaagactgtgcaattaataattttgaaattcactggcttaaaattttttcaaaacctaatagttgaagtaattaaattgacaatgaggaaaacttgaagtatattaggattttcaaatgaaattttgaggaagggctaatttaagaaaagttattctttaaaattcaattcctcttgaatgaaagaagtctttgattaacccatgaatacagaagtttgagaatatttttgtgtttcctttgctttgtattataaaacacaggtagatctgtgttttctggaat

SEQ ID NO: 552361 - DNA, 1165 bp, Homo sapiens
ccaaagatctggtataaaagaatggaacaatatcttggggttgagtgaattatatatatatatatgtatgtatgtatgtgtatatatatatgtrtatatatatatgtatgtatgtatgtgtatatatatgtatatatatatatacacacccacatacatatttataaatgaatagacaaatatctatgcataataatatcacaaagctagcagagtgtcatcttccaaaaggtaaaatggaaaataagcaatagggaagtgtgcaatttctgaaatggagctggagttatattttatttctatgtctgcataacaaatggaagtagtacttcagctttttcactttggcctctgtgtccatccctcccccagtcctacctcaacctcattcctcattgccccaaccaagtcaatgaatttgtgaatattgggttggaactcagccaggaatatctgaaaatggtgtctcacgttgactgaatccataaggaggaaattattcagacgattgatgctccttagggcagaacattaaattgatcctttggcagggaaaacctcatggaacttaacacagcaattcccataaatatcaatgtgattatcaaccagattgggacttacctatttctcagaactagacaagaaggatacatgagtacgtgtttgtgtagttgttatgtttaatatgtgtgtatcttgacatgctcaaacccattattatataaatcacactaatgaaactgctttgtcaagcatgcagtgtgcttgacgaaacaattccgttgtaagacttattttcaagtacctgcctttcaaataaaattatcctctggactcacatttcttctagttttcctagctaagtggaattttcttctaaacagaaagctttatttcagccccttctatgactattactgtattttaatgacaagcttgcagaaaatattttttaaatgattgctttcttattatgaactgaaaacatttcttaaaacttgttctctccccaggatgatattttttgcattcttttgttccgtcatgccctcatctgttctgtcattcagtaaatgtttactgagtgcctgctttgtgccagatccagggttctaggaattgagtgttcattagtgaccaaagcagacacagtaatgattaa

SEQ ID NO: 552362 - DNA, 610 bp, Homo sapiens
aggcagttggagcaaaaagtaaattaggcttctgcttagggcagatagaaaataggtcatgtggttaacaccacctctgatcttctggcaaaggctatgaatagaggtgatagcaatgacactgtgttgagaaggattctgaagccttggccagccactgtttcccttggttacatcatgggaagttacagtttgccatgcctggcmtagagcttcagacacgcacaggcctactgatagataacaaattgtattctcaaaatcaatttcagaagaaatctaactttcctagttgatgaaaacagcaagagtggcttggagttctaagaggcaaggaaaatagtatgagcattggttttgttttctctaagcatgaaagtcaatgggcaacaagttcccctttgcatagtgtcatgcccactctaaagcagccacgcctatcaggtaagacaggtatttaatctattagctccatctccctgttttgggtgtttcagaatttgaacggccacatctctgctgggaaagactacatctcactgcccctctgctatccttgtgggaaactcctgtgtcccacgcagaaaagcagactttttttttttgagac

SEQ ID NO: 552363 - DNA, 610 bp, Homo sapiens
aggcagttggagcaaaaagtaaattaggcttctgcttagggcagatagaaaataggtcatgtggttaacaccacctctgatcttctggcaaaggctatgaatagaggtgatagcaatgacactgtgttgagaaggattctgaagccttggccagccactgtttcccttggttacatcatgggaagttacagtttgccatgcctggcctagagcttcagacacgcacaggcctactgatagataacaaattgtattctcaaaatcaatttcagaagaaatctaactttcctagttgatgaaaacagcaagagtggcttggagttmtaagaggcaaggaaaatagtatgagcattggttttgttttctctaagcatgaaagtcaatgggcaacaagttcccctttgcatagtgtcatgcccactctaaagcagccacgcctatcaggtaagacaggtatttaatctattagctccatctccctgttttgggtgtttcagaatttgaacggccacatctctgctgggaaagactacatctcactgcccctctgctatccttgtgggaaactcctgtgtcccacgcagaaaagcagactttttttttttgagac

SEQ ID NO: 552364 - DNA, 610 bp, Homo sapiens
aggcagttggagcaaaaagtaaattaggcttctgcttagggcagatagaaaataggtcatgtggttaacaccacctctgatcttctggcaaaggctatgaatagaggtgatagcaatgacactgtgttgagaaggattctgaagccttggccagccactgtttcccttggttacatcatgggaagttacagtttgccatgcctggcctagagcttcagacacgcacaggcctactgatagataacaaattgtattctcaaaatcaatttcagaagaaatctaactttcctagttgatgaaaacagcaagagtggcttggagttctaagaggcaaggaaaatagtatgagcattggttttgttttctytaagcatgaaagtcaatgggcaacaagttcccctttgcatagtgtcatgcccactctaaagcagccacgcctatcaggtaagacaggtatttaatctattagctccatctccctgttttgggtgtttcagaatttgaacggccacatctctgctgggaaagactacatctcactgcccctctgctatccttgtgggaaactcctgtgtcccacgcagaaaagcagactttttttttttgagac

SEQ ID NO: 552365 - DNA, 624 bp, Homo sapiens
ggttgaactagaaaactagggtcagaaaactcagtttaatctgttaaaatttttataaatattatgaaaagatggcaaagtacttaaaacgaatatcaatgatgctttatatatctttacttagctataatagttaactgtaacagttcattttcatttagaatctgtttaatataaacatttcaaaaactgyctttcttgtaattttaacaaactacctgaaagtgctctgttggaaataaaatatataagaggtttgctttattttgtttctcatgcatttctgattttatgacataacacgattatttcctgcctcaggatactacctggtctcagacatagaatcctttaattgtttgagagactgtgagtaacgttttaccctgtaagatatagttgagtagacatttttcaacctctcttcatacaatctatgattatgtggtcttacacaatgcatggaaccttcttgttaaagcgctatgaaactgcctgctgatacacatgtcctgataccttttcccctaaaagaatttgactctaaagtctcttggcttctgttttgctgtcctaggcttctttgaaaacagacaataacaacaaaacttatacttccacctg

SEQ ID NO: 552366 - DNA, 1514 bp, Homo sapiens
agcttttggaagtgtttgcccctctgccacagcctcaggcttctcacccttgccagcaggctcgatggtcaccttctcgctgctgttgccccggccggcagaggtgacggcggccacccacagcagatactgctgaccgcggtttaggtgggcgatccggtagaagagctgctctggactcgtctcgtactcgctgggagcctgcggggcagaggcaaagaggctctaagaagcagaactggggccctccagcgtccaaatcttcctcagtgcccggggctcagaggagaggatggcggggtcggatgcgaggcaggattctgtcctatttgccctttccaagttttagagatgcagcggacagagtgtgccctggktttggtccctgggagctgatgggcctgcctcgcggtgttgctgggtcagcctcagtttacctctttaactgatccacgctctggcagctgtggctcaggccaggggatgtgagtactttaggtgagggacggggtagccaggagaagggagaatgggggacagggggtcccaggaaagccctgaggaaagagtcttcaggaagaaggcaaatgactgcctctgcctgatgagggttggagacaggctcctgcagcctgctctggctcccgtcacctcctagccctgccgtctaattaccactcctgcattttgcaggcagcacgcccgcccgtccagggaggagggggcgggagaaggaactatgaaagctttactgggtagcactttattaatgattattagtggtatagatcaccatatatatttgtaggttatacaaatctataaaattttttttaacaaaatgacagttttgacaagttgccaacaaaacaatatcggatcccagtggttttaccagttgctttgatgaaaagattatgttgccttggaaaccagaggctcagatattgaaatgaatttgagaaggagcttttgataagcgctagtttgcagacctcctgtcagcctcttccctggcacgggcgggatggggctgactttcattttattttattttttggtcagccgcagggaagggagaggaggacagcaccagggcccctttgaaaacagagcggaagtccagggagggagagcagccccagaacagatgggggcccgaggccagagggagctaataattagttatctctgcagtcacaggatcttgcacacacacgctcacaagcacacacacatgtagacgcatgcacacatgctgaggaacagacctccaggcatgtatgggcacagagggacattcttcatgccccatagtggggctgagaggcccaataacttataacaggaggagacatcctttttggccccaggccatctgcagggaaatgttaggggaaaaggcacaggcatctctgcaacacacacacacagctccctggcatattcctcctgcctccctcgtgggggtctggccttgaatccaggaggtccgggggggcaggtgcagagcc

SEQ ID NO: 552367 - DNA, 558 bp, Homo sapiens
gaagtaatttgactacaagaatggtttctacattagagatttatgtgtcatgcttagccgtgattgtctaatcatttaggagccaaaaggaagctgacttagacaatagaccctaggtaattaaaaaaacagaaaatagggtttttcatataatttaaaagagcatatgatttaacttagaagagtaaataataaccgagaaaaaaatgtttttttgaatgttttatcatgaatgaggaacatgtgaaaaacccctgagcygaaggaaccacaagcccgcaattgtcctggccttgcagcccttctcctgcagggggtgccctccctcccactcctctctagatgggagccgaagggaagaggtgaatcttagttgagaacaacaaaaaattctgggctgggtacggtggctcacacgtgtaatcccagcactttgggaggctgaggccggcggatcacttgaggtcaggagttcaagaccagcctggccaacacagtgaaactccatcttaaaaaaaataaaaaataaaaagccgggcgtggtggtgcgggcatgta

SEQ ID NO: 552368 - DNA, 509 bp, Homo sapiens
ctgcagagaagagcttggttcctgtggggacacaaaaccgagatgggagtgaggatgggaaaggcaggacctgggagaacgcacccctttgtggtccgtgttcagcaggatcgcgttccccaggttgtctcctgcgaccaccattcacctactggcagacacatccagtctacgaaaccagatgctggagggtgagactgtgttgtaagattcttggggacaaagataggcctatttactcaccattgcagctctggtaactaaccctcagtgggcattcaataaatatttgttgaatgaaaaacaaacaaacaaacaaaaaaacatgccaggcactrtggctcattcttgtaatcccagcactttaagaggctgaggcgggtgaatcatctgaggtcaggagtttgagaccagcctggccaacatggtcaaaccccatctctactaaaaaaaaaaatccaaaaaaaaaaaaaaaaaaatgcgtaagcataattttctagttaaatgca

SEQ ID NO: 552369 - DNA, 591 bp, Homo sapiens
tgaagtcagtttaattgcctgcagtagttgctgtttctgtaaccttgacgacaaccagaaacaacagtaaatgtaaccatttaaggcttttaaaccatcaagctaccaagattgtatggaaagattgtatggaaaagtgaaacttcagtaaaggagaccagagtggaagaattttggagatgtagctcttttctgatagatactgaacattcaaacttagatttcttattcagaaagatctctggggttctaccatccactgacttcagctacatggagtatttaatgttgacatgagcctttgatagtatagtgctttctaaactggcggcccattgcaaagcaaaagttttttaaaaatccttacctgtgtgactgtggaaatttttgaagatagacaccacttatttaccaaatagatcratcaagatcataaggtttttacagaacaaaaataaacacttgagaatccataattgggacaatgtctatgttttcagttaatttttaaaaatgtatcaaaaataagtgcagaaagtcacttttctaatgtatcaaaaaccttatagtaaagagtgtggtcactaaacc

SEQ ID NO: 552370 - DNA, 1642 bp, Homo sapiens
cttcgaattcctgcacatcaggaagaagatcgaggagaagcgcaagattctgtgctgcatcacgccacaggcgacccagtggtacgccgaatacgtcacctacacgggctcctatctcctggacggcaagtctctcagcaagctccacatgcccatgatcgcaccccctccctcgctggtggagtccctgaactagctgttcaggcagcaggagccggtccgggaaaagctacgtctgcagcacagcatcgagcagtagaagctgatatgtcctatgagcaggagattctgcaggttcactgctgggcagccaggatcatcgccaaccaggcagtgccattcagcgcctgcacgatgctgctggactctgaggtttaaaacatgcccctagagagccagcgcgacgagaacaagtcagtgcgcgaccgrctcaacaccagccagttcatctcctggctccatgacttggaccacaagtacaaccgcatgaagacctgctcacgtggcagcagcacgaggccgcggccctaaacgccatgcagaggatggagtggcagctgaaagtgcagaagctggaccccgctgggcactagtccctgtgcgtgaacgacgtgccctccttctacgtgcccatggtcgacgtcaacgacgactttatgttgttgccgcggtgcgggatgactgcaggttgcaggcgagggctgcatggctgcgctgagccccaggggccgaggagggagcgccacgtccacccgggcggggagagacccccagagagacgccacagcgtctccgtcccttccagactggtccagacgtcgaggaggtaaaacacgtctcttgtctaccagctgccgcggcgggggcaaagcccccagagcctcaccggccccggcgggaggagaagaccatgccgggggcacacgtggcagcttctatctgaaaatggtaaccttcggacccttttctccagccaactgcagaggcatttcaggagttggagaatggagtggatttttaatttttttttgttccattctgatcaactaaagaaaataaaattaaggtgtccatgtctcacaaacagtgacctccaggtaggaggggcaggtgtgccgtcccagccatggtcctgttgccacagagctgcaacggcctcagactgggcttaggacctggtgcggagcaggacattggccgtgccacctgcccaggcagagggacacagaaccaggacccccgtactgtttttaatgcagtcaaatccacgtggttggtatcttttttcttttaatcttgggcattttgtttctctttctgagaacataacttgaaccactacagagccaataatcatataaaaagtgtatctgcaaacgctgtatagttttatgtaaattcacaatgtacttttgctgccttctagataatttagtttgcaacacattactgcacagttgtaaataacttctgtactgtaacatcactttcagctatgtgtaaaggaataaataaattaattttttaaaaagctatacatgtggcacgagcctctatcacagactgtaagatactaaactcctggaagtaactcatttgatgttagaaatagtgtaatttgtattttctcccccttataact

SEQ ID NO: 552371 - DNA, 657 bp, Homo sapiens
gggttagctgcgcgctcaagcacctagtgtcctgagtttcttcaggggttcctgctgccagcctaacgttcctaaatagagcactctaggtttctggcatcaaggctatgtgatcaggtgtgaggcaggtacaaggtgcagctcatcagtctggaacagctccccattctggaacagctcctcatcctggaatggcttctcattctgaaacgattccccattctggaatggcttcccactctggaacagctccccattctggaacagcttcccactctggaacagctccycattctggaacagcttctcattctggaaaagttccccatgcttgaacggcttctcattctggaacagctcctcattctgtaacagcttctcattctggaatggctccccattctggaagggctccccattctggaacagctccccgttctggaatggttcctcattctgaaacagctcctcatcctggaacagctcttcattctgaaatggctacacactctggaacatctcctcattctggaatggctccccattctggaacagctcattctgtctgaaatggctcctcattttggaacagctcctcatctggaacgtccagttgctttgcattttcttctgacctccactccatactctcagagg

SEQ ID NO: 552372 - DNA, 657 bp, Homo sapiens
gggttagctgcgcgctcaagcacctagtgtcctgagtttcttcaggggttcctgctgccagcctaacgttcctaaatagagcactctaggtttctggcatcaaggctatgtgatcaggtgtgaggcaggtacaaggtgcagctcatcagtctggaacagctccccattctggaacagctcctcatcctggaatggcttctcattctgaaacgattccccattctggaatggcttcccactctggaacagctccccattctggaacagcttcccactctggaacagctcctcaytctggaacagcttctcattctggaaaagttccccatgcttgaacggcttctcattctggaacagctcctcattctgtaacagcttctcattctggaatggctccccattctggaagggctccccattctggaacagctccccgttctggaatggttcctcattctgaaacagctcctcatcctggaacagctcttcattctgaaatggctacacactctggaacatctcctcattctggaatggctccccattctggaacagctcattctgtctgaaatggctcctcattttggaacagctcctcatctggaacgtccagttgctttgcattttcttctgacctccactccatactctcagagg

SEQ ID NO: 552373 - DNA, 1128 bp, Homo sapiens
tgctgcttaaaactttaaaaaaaaatcaatacaatgtgaggcaaagggaagtgtaatttagcaaaaagtctgaattatagatttttttaaaaggttatawaatttaaagtaaacaaagttatggaaaatagaaaagtgagttaagaagtctttctgaaacagaggtaagccggacatcattcaatgaacagaaatcatgatgtgaagtaacactttggcagtaaaccgagtttctttaagtggttcaaaaaaattttttttgtcttaggtaggttcaaatttctccctcaaagttgtgtttatattactcattatgtgtacaagacctttcttcatgatttcaaattcaactaacatttcatcaagtatttattatgagccaggtactttcgtataactaacttagtatgagaattctgtaagattggtattctcacctccattttaaggctagaagatcaaagttcatagacgtcgaataacatacgcagagttacacagataaagaataaacaaactcctcagcaggagagatttttcaacctaaaccttttgcctttaaatcagtgctcttgtcacagtatcaaataccaaacagaatacattgaaacagaagtcatgaatatttaacaaaaataaaatttagcctatgtgaaatgatgcctctgcaatattcacattcagtttataagtggtaaaagatacttggtaagaaataagggccaaatacagttgatttgagaaaattttccaaaagtagtgagttataagcacgatggttaagtgaaataaacatttaaaaaatccttatagataaaaataaatactgtaaaaatatactaagaaacaggtggtaaagtatgcccacactgacattagctataaccgatatgctcaaatggatataaaaactgttagtgggaactgcttaccatggactaccttgaatggaaggtacgtagagcatcaaagtctattgattttgggtgagctaacaagagttagtggaccagagactgtattgccattttcctcattttgaaaataatagactgtacaataatagaagtgttatcacaagtgcattatcaaaaactcatgggtgagcctcatctgaagcagagtttg

SEQ ID NO: 552374 - DNA, 1128 bp, Homo sapiens
tgctgcttaaaactttaaaaaaaaatcaatacaatgtgaggcaaagggaagtgtaatttagcaaaaagtctgaattatagatttttttaaaaggttataaaatttaaagtaaacaaagttatggaaaatagaaaagtgagttaagaagtctttctgaaacagaggtaagccggacatcattcaatgaacagaaatcatgatgtgaagtaacactttggcagtaaaccgagtttytttaagtggttcaaaaaaattttttttgtcttaggtaggttcaaatttctccctcaaagttgtgtttatattactcattatgtgtacaagacctttcttcatgatttcaaattcaactaacatttcatcaagtatttattatgagccaggtactttcgtataactaacttagtatgagaattctgtaagattggtattctcacctccattttaaggctagaagatcaaagttcatagacgtcgaataacatacgcagagttacacagataaagaataaacaaactcctcagcaggagagatttttcaacctaaaccttttgcctttaaatcagtgctcttgtcacagtatcaaataccaaacagaatacattgaaacagaagtcatgaatatttaacaaaaataaaatttagcctatgtgaaatgatgcctctgcaatattcacattcagtttataagtggtaaaagatacttggtaagaaataagggccaaatacagttgatttgagaaaattttccaaaagtagtgagttataagcacgatggttaagtgaaataaacatttaaaaaatccttatagataaaaataaatactgtaaaaatatactaagaaacaggtggtaaagtatgcccacactgacattagctataaccgatatgctcaaatggatataaaaactgttagtgggaactgcttaccatggactaccttgaatggaaggtacgtagagcatcaaagtctattgattttgggtgagctaacaagagttagtggaccagagactgtattgccattttcctcattttgaaaataatagactgtacaataatagaagtgttatcacaagtgcattatcaaaaactcatgggtgagcctcatctgaagcagagtttg

SEQ ID NO: 552375 - DNA, 1430 bp, Homo sapiens
  misc_feature 334, 337, 356: n = A,T,C or G
acaacaaaatataattgagtcatcctttaagataaagaaaaacgatatatgatgtaatgttactcatgcaaagttgattttacagtatgctttctgctatataaaaaacagactagaaggaaacagaccactatttcatggtggctatttctggatggcagaaatatgggtgactttctgttctctgctattttttggtccctaagcatctagagactcttttccaggactctccaaaatcttgagttatctaatatgcctaaccagactccttgagttcagtgttctttcagtagggcaggaattaccactgtggtctgcttgcccatctacntgngatttaataagaacaccgnagtaaaccttccagcagcaactcatagcactcagataaaactccaactccttagcttggtatccaagctcaggcccttgctcacttctcctacccagcccctcgctcgctgtgtccagccaactggccaagttcattccctcctaagagtgtttaaacacactgttctctctgcctagaactcttttccccagaacttcctatgaatggctcaaaattacactaaatgcctcaaaatgccacctccttacaaaggccttccctgacactgattcccatttagctgcctctcccccagccccatataagtttgagggtttttcttttcatctatagaagcattttctgctatgtacccaaataagttttatcacagcagtcttagcacagggtgatagctcttatcatcatgtgaatccgtttttttttaacttgttatctgctctaagtacccctccccccagattataatcatgagagcaggtgcctcatctgtcttgttcaatattatcctagtacctggaacagtgtgtgaaaatagtaggcgctcaataaacagctgttgaaggaattaatggatatcactgaaggtgttaacacagagaagaaatgaaaagaaaccagaggtgctttagtaacacaaaggaaatcatgtggaagcctgttttcttttctcctatttgtcaaaagcagccaagtatcaccttcatttgcatgtacaggggtgctattaaaacctacactattacagtgttagcaactamactgacagtcaccaaattattgtcatctgcagcccaaaccatacttgctaagtctatgcttccccacaaaaccaccaaaccacaacaaaggttgtaactctgcagatcctggaagctgccttgggaactgactgctagctcctctggctagcagaataaacttgggtgcatctttacctccgtttaggctgaatgacaccagctagcccaactaatttacctaacatgggtaaagctaaagctcttggctttatatgctatcccactgaaaactcacagccaccccgcaaggcagttattacatttcacag

SEQ ID NO: 552376 - DNA, 1185 bp, Homo sapiens
tctgcctcagcctcccgagttgctgggtttacaggcgcccaccaccactcctggctaatttttgtatttttattaaagacagggtttcaccatcttggccagtctggtcttgaactcctgaccttgtgatccaaccaccttggcctcccaaagtgctgggattacaggcgtgagccaccgtgcctggcccaggatattaaactcttgacctgcagtaggagccaacaaacctcaaacaaagatttcaagcaaatatagtaagtcactcttcctaaatgtgaaagttgaaagaattgccggaagaatttgaggaaagcaaaccattttcctcaaaatgtagacagactgctgcccacctcctcaggttagaatccttctaagttcacttactacccagggggcacattataaacaggagttttattttttaaatactagatcaaatttcccaaaatgaagtcagctgtttacaagagaggaaagtgttgcttatttgtatgtaggggtccaggtaaacagcctgatcaggaactgacgagcagttaaaagtgtgatccagagattgatgcggacaggcatttacctyaaatgtgaagtcttataatagccatttaaattgagaaagaaagaatgtttttatgcagcaatatttctaaaatgttacccataagctcagaaagttctttcatcctgggagtttgaacactgttaatttgttttaagtaacatctattataccactgaagtcctcttattacataacagcaggacttgagtcatctatttacttagttaattacttcattcaaatatggggtactataactttttaaactttatagtctttcccccatttcttcttttacttaaagaaaatcagcaaaacaagaattatccccatattttcctttgtgcggaaggtcccatctgagcaacggtattccagccgccgcagttcagttttctccttaccaagagcacagaaatggtctttttttccccttgaatgtgcatattcctgatggagcttaaaaacttccataaatcaataaagtaattgctacataatgacctattgttggtgttcgtgcccagaatgatgtcacaagggggtaatggagctactgaatcaaaaaatggcagctgtttccaatttatttgagagtcagttggacagaaaattaa

SEQ ID NO: 552377 - DNA, 640 bp, Homo sapiens
gctctattgtgtgcaaatttcaagcaaggctatgatggaggaaaatgctggagggtgttactttagtgaataatgaaactttcttaagggaaagacaatcatgattcacattagaaaagtgagctcccatttatagcagtcctgtagattggaataaaagagaagaacaacacatgtattaagtgatgtctttcactattcccagcaactttcagaacyaggtattattatccccaatttacagatgaaaagacatcatgcaactcacccatgcttatatggctaaaagagattatgagagaagctagtaagaaatactttgaatggtcaaagaaaatcacctaagaacttctagaagattatttcaataacaggcaatgagggttggaggggagtcaggaggggtctttataggcatggttcccttaactgagctctctagggcaggggtcaaagaagagttgctgggtcattctttcttccttgtgcttggagaaaaggagttaaggaagaagctgcccacagctgggagctctccagatcctggtctcaagaacggaggatatttccaggaataaatttaaacttatattctgtttgcctagaattaaaaaaaatagagaaaagaaattaaacttcc

SEQ ID NO: 552378 - DNA, 640 bp, Homo sapiens
gctctattgtgtgcaaatttcaagcaaggctatgatggaggaaaatgctggagggtgttactttagtgaataatgaaactttcttaagggaaagacaatcatgattcacattagaaaagtgagctcccatttatagcagtcctgtagattggaataaaagagaagaacaacacatgtattaagtgatgtctttcactattcccagcaactttcagaaccaggtattattatccccaatttacagatgaaaagacatcatgcaactcacccatgcttatatggctaaaagagattatgagagaagctagtaagaaatactttgaatggtcaaagaaaatcacctaagaacttctagaagattatttcaataacaggcaatgagggttggaggggagtcaggaggggtctttataggcatggttcccttaaytgagctctctagggcaggggtcaaagaagagttgctgggtcattctttcttccttgtgcttggagaaaaggagttaaggaagaagctgcccacagctgggagctctccagatcctggtctcaagaacggaggatatttccaggaataaatttaaacttatattctgtttgcctagaattaaaaaaaatagagaaaagaaattaaacttcc

SEQ ID NO: 552379 - DNA, 640 bp, Homo sapiens
gctctattgtgtgcaaatttcaagcaaggctatgatggaggaaaatgctggagggtgttactttagtgaataatgaaactttcttaagggaaagacaatcatgattcacattagaaaagtgagctcccatttatagcagtcctgtagattggaataaaagagaagaacaacacatgtattaagtgatgtctttcactattcccagcaactttcagaaccaggtattattatccccaatttacagatgaaaagacatcatgcaactcacccatgcttatatggctaaaagagattatgagagaagctagtaagaaatactttgaatggtcaaagaaaatcacctaagaacttctagaagattatttcaataacaggcaatgagggttggaggggagtcaggaggggtctttataggcatggttcccttaactgagctctctagggcaggggtcaaagaagagttgctgggtcattctttcttccttgtgcttggagaaaaggagttaaggaagaagctgcccacagctgggagctctccagatcctggtctcaagaacggaggatatttccaggaataaatttaaacttatattctgtttgcctagaatwaaaaaaaatagagaaaagaaattaaacttcc

SEQ ID NO: 552380 - DNA, 651 bp, Homo sapiens
tgcagcagaatgaaactggacccatatctctcaccacataaaaaaatcaattcaagatggactaaagacttaaatgtgagacccaaaactataaaaatatgagaagaaaacttagagaaaactcttctggacattgagctaagtaaccaaaaaatgtatgactaagacctcaaaagcacaggcaaaaaaagataaatgggactatgtaggtctgttcttgtgtcactataaagaaatgtctgggccacgagcrgtgactcacacctgtaatcccagcactttgggaggccgaagtgggcggataacaaggccaagagatgagaccatcccagccaacatggtgaaaccccgtctctactaaaaaaaaatacaaaaattagttgggtgtggtggtgtgtacctgtagccccagctacctgggggactgaggcaggagaatagcttgaagccaggaggcggaggtttcagtgagccaagatagcaccactgcactccagcttggcaacagagcaagactctgtctcaaaaaaaaaaaaaaggcctggcctggtggctcacacctgtaatcccagcactttgggagccagaggcgggcagatcacaaggtcaggagattgagaccatattgaccaaaatggtgaaacgccgtct

SEQ ID NO: 552381 - DNA, 902 bp, Homo sapiens
aaaggtttaatcactggatatgaagttactagaagaagcaatgatataaccaaatgatcagattgagaacttccatgtcaacagtaaaataatcacaacaacaaaaaaagyatagataagttataaacaaatgtaaagatacaaaaatacaactaagaaaaaaaaattccatctataaaggattacttatttcctatgcagaagtaaatatctagagcagtgaccccttgcggctattgccttcatttaagtaaatctgttctgataaaagcagttttcagaaattcatctgaaattaacaattaaaggaatgttgtcagaataatgtaggaagcacactatttcatctttaggaaaggcaaatagttgcaatccaattaaacaggaaagaaaacagccctcatttcagatgatgaactggcagcagtactttcaactctaccttaagaaaatggcaagtgaatgcctgtatctgcaaacttttgagtccttaagaaaaggcaaacaccacgatgagacagccacttcacatgcacaaaaatgtggagaaactggcagcctcatccactgctggtgggaatgtaaaatggtgcagccactagggaaaataatctggcacttcctcaagaagctaaacacagttatcttatgactcaccaattccactcttaggtgtgtaatcaggaaaatgaaaacatttgtccacacaaaaacttgtacacaaatgttcataatagtaaaaaaaaaaattggaaaacccaaatgtccaccaactgttgaacggataaacaaaatctgctacatccataaaatggagtacgattcagcaataaaaaataaagtactgatacgtgctataagatggatgaactctgaaaacattccaagtgaaagaagccagt

SEQ ID NO: 552382 - DNA, 568 bp, Homo sapiens
aatttgtttaagagataggctattgggtttctgatacttatgaataatggaatcgtcatttgtgagagttaggacatgagtgtgtgtgtatttgtaaggatagagaagcaaaaaagagtttaccatcagagaaaagcccaggacatgagagtttcactgctgaaatttaccaaaaatttaaagaactaatgtcagtcctactcaaactatttcaaaaargtgaggaagaggaaatacttacaatcttattctataatgccagcattacccaaacaccaaaaccggacaaagacacaataacaataaaacctataggccaatattgtgatgagtgtagattcaaaaatcacaaacaaaatcctaacgtgaaattgaacaacatattaaaaaggtcatttaccatgatcaagtggaattattcccagtgatgcaagaatggttaaacatatgcaatgtacacaacatatgcaaatcaataaacatcacatcaaaagaatgaaggccaaaaaaagtgatcatttgaacagatgcagaaaaagcatccaataaaatccaacatcccttcatg

SEQ ID NO: 552383 - DNA, 1004 bp, Homo sapiens
cagcagcagtaggaaactaatacagagctgaaactagaacctacatcagctgactctttctgtctgttatactactcatcatctttagtaattccaaattaccctaaactcaatggcaaacagattaaatactcacagaacagtgctgtgacaggaaaatgtctcctaaattagamagattgtagtatacaactgttgtgacagatttcttaaactgtcagctaattttttttttaaatttcacaaagagataatgacatcatgaaacaaggctatatacagcatctaaggaggggatataaagcttagcaatgtgttttgaataggttttatttgaactcatttatcattctcattacattcatcttaatgagaaaatagctccattctggttataatctgtgttattgtaatataatatacaacattgttctgaagagcaattcaatgcagccaaatggcactttttctttctttatatctttttgtcagtttgtttcaaacttttgcttgcattttcatgcagcctctagaagatgggatagaccaataaggaaaaggaaaaaagagagtaaaatgaataaaggaagagacaaaggggtcaaggaaatgctgaaccaaaagtatgtactaatacagaataacacatagatgttttggctaagattggatgggctgaaccctgtttgctggttaccatatttctgaaacaaagcaattaatcttgtttgacaggatagttttataagtgaatatattaatgtaagaaacttaaaaaatacacaaattatatcatattcagttataaatattatttcattgaacatttagtaaatatataactattagtcaataaaaatttttaaattcttgaaatcaggtctattaaaaaattgtgagatgtataattacattaaaattatagctaacttttttgtactgaaagcaagaacacaagtttctttggtataacttgcatatttgaatatacatgcataccacca

SEQ ID NO: 552384 - DNA, 1004 bp, Homo sapiens
cagcagcagtaggaaactaatacagagctgaaactagaacctacatcagctgactctttctgtctgttatactactcatcatctttagtaattccaaattaccctaaactcaatggcaaacagattaaatactcacagaacagtgctgtgacaggaaaatgtctcctaaattagacagattgtagtatacaactgttgtgacagatttcttaaactgtcagctaattttttttttaaatttcacaaagagataatgacatcatgaaacaaggctatatacagcatctaaggaggggatataaagcttagcaatgtgttttgaataggttttatttgaactcatttatcattctcattacattcatcttaatgagaaaatagctccattctggttataatctgtgttattgtaatataatatacaacattgttctgaagagcaattcaatgcagccaaatggcactttttctttctttatatctttttgtcagtttgtttcaaacttttgcttgcattttcatgcagcctctagaagatgggatagaccaataaggaaaaggaaaaaagagagtaaaatgaataaaggaagagacaaaggggtcaaggaaatgctgaaccaaaagtatgtactaatacagaataacacatagatgttttggctaagattggatgggctgaaccctgtttgctggttaccatatttctgaaacaaagcaattaatcttgtttgacaggatagttttayaagtgaatatattaatgtaagaaacttaaaaaatacacaaattatatcatattcagttataaatattatttcattgaacatttagtaaatatataactattagtcaataaaaatttttaaattcttgaaatcaggtctattaaaaaattgtgagatgtataattacattaaaattatagctaacttttttgtactgaaagcaagaacacaagtttctttggtataacttgcatatttgaatatacatgcataccacca

SEQ ID NO: 552385 - DNA, 830 bp, Homo sapiens
tgtatatgtgctacattttcttaatccagtctatcaatgttggacatttgggttggttccaagtctttgctattgtgaatagtgccgcaataaacatacgtgtgcatgtgtctttatagcagcatgatttatagtcctttgggtatatacccagtaatgggatggctgggtcaaatggcattcctagttctagatccctgaggaatcgtcacactgacttcyacaagggtttttaaaaaatgttttaaatattctttagtaaactaaaactagtgatggctacttataaaaagaactgtatgaagcacattaactactgatcacttatttacttccttagttcacggaaacccacagcagcgatgcgatgcatgtgccctctctatgaccctaacaggcagctttggatcgaactggcccctttaagcatgccgagaattaaccatggagttctctcagcaggtaccgttctgtggcaaattttccttaaacagcagatcaagtaatgtgtaatctcaaggttttacagaatgactcagagccttttaaagatacaattttattatctctacatgacatttttagtgtagttctagcttctgagaccgtggttaggaaaaccgtattttctgtcagtccttattatctctgtatcttcagcacatagctgcttttaagaactactggagaagcagttacttgatgacttaatgtcaggagagcaaacttcagtgatgcttaccactaagtagctgtagggccacacctggaacacagcgtttctttgcaccatggtagtcccatctttgaaattcatgcagcttagaatt

SEQ ID NO: 552386 - DNA, 612 bp, Homo sapiens
taattttgttttatgtattggaagttcacttaaaaacttgaaatattttctagaagggtaccacacaaaaggaatcatctttaagctgtttaattaacctaataaaataatttgatggggaaggcattctaattgtttctgatttttagagtggttcctgctaaatcatcattatcaatacagcttgatttgatttaagaatgaaacgttgtcgtttctgtcatttacacggtgtgggtgtcagctcctagaccgtggcttgtgatgttagatccgtcccttagcagccacaccccagtcactgcctgagcctcttccatcgctgactgcctgagtctctccatcgctgactgcctgagtctctccatsgctgactgcctgagtctttccatggctgactgcctgagcctctccatcgccgtcagcataagtctccttgctgtcttccctgaaaaatggtttcaaattggctttcctcagaagacagagagaaaatagatttcggaggactagaggaccttgatattaagggcttggtaatatgaggcagaattccatctgcagaaagcagatttctctagttccctcttactgcgctgtccagagacaata

SEQ ID NO: 552387 - DNA, 612 bp, Homo sapiens
taattttgttttatgtattggaagttcacttaaaaacttgaaatattttctagaagggtaccacacaaaaggaatcatctttaagctgtttaattaacctaataaaataatttgatggggaaggcattctaattgtttctgatttttagagtggttcctgctaaatcatcattatcaatacagcttgatttgatttaagaatgaaacgttgtcgtttctgtcatttacacggtgtgggtgtcagctcctagaccgtggcttgtgatgttagatccgtcccttagcagccacaccccagtcactgcctgagcctcttccatcgctgactgcctgagtctctccatcgctgactgcctgagtctctccatggctgactgcctgagtctytccatggctgactgcctgagcctctccatcgccgtcagcataagtctccttgctgtcttccctgaaaaatggtttcaaattggctttcctcagaagacagagagaaaatagatttcggaggactagaggaccttgatattaagggcttggtaatatgaggcagaattccatctgcagaaagcagatttctctagttccctcttactgcgctgtccagagacaata

SEQ ID NO: 552388 - DNA, 612 bp, Homo sapiens
taattttgttttatgtattggaagttcacttaaaaacttgaaatattttctagaagggtaccacacaaaaggaatcatctttaagctgtttaattaacctaataaaataatttgatggggaaggcattctaattgtttctgatttttagagtggttcctgctaaatcatcattatcaatacagcttgatttgatttaagaatgaaacgttgtcgtttctgtcatttacacggtgtgggtgtcagctcctagaccgtggcttgtgatgttagatccgtcccttagcagccacaccccagtcactgcctgagcctcttccatcgctgactgcctgagtctctccatcgctgactgcctgagtctctccatggctgactgcctgagtctttccatsgctgactgcctgagcctctccatcgccgtcagcataagtctccttgctgtcttccctgaaaaatggtttcaaattggctttcctcagaagacagagagaaaatagatttcggaggactagaggaccttgatattaagggcttggtaatatgaggcagaattccatctgcagaaagcagatttctctagttccctcttactgcgctgtccagagacaata

SEQ ID NO: 552389 - DNA, 612 bp, Homo sapiens
taattttgttttatgtattggaagttcacttaaaaacttgaaatattttctagaagggtaccacacaaaaggaatcatctttaagctgtttaattaacctaataaaataatttgatggggaaggcattctaattgtttctgatttttagagtggttcctgctaaatcatcattatcaatacagcttgatttgatttaagaatgaaacgttgtcgtttctgtcatttacacggtgtgggtgtcagctcctagaccgtggcttgtgatgttagatccgtcccttagcagccacaccccagtcactgcctgagcctcttccatcgctgactgcctgagtctctccatcgctgactgcctgagtctctccatggctgactgcctgagtctttccatggctgactgcctgagcctctccatcgccgtcagcataagtctccttgctgtcttccctgaaaaatggtttcaaattggctttcctcagaagacagagagaaaatagatttcggaggactagaggaccttgatattaagggcttggtaatatgaggcagaattccatctrcagaaagcagatttctctagttccctcttactgcgctgtccagagacaata

SEQ ID NO: 552390 - DNA, 664 bp, Homo sapiens
atggagatataatatacttcctaacaatttgatagggttactgtgaagtgtaatgaaataaggcagtggaagtccatttttaaaatttagttattcatcttctgaaaaagtacaaagaagggctacctattggtgtcagtccttgtttttgagtaggacccctcctaacacagcactgattaccattctttaaaaaatgactggttcaacrataaacactaaaacttgtcatctgtggcttatttgttcactatgaaaacctgtttctggtttacattaactatttttaaactaaaaacctcattctcttctgattgctcataagatattaatctttaaaagttctgtttcaaaatatttcatgaatataaagctttttccgtacttctaagactactacttataattctattaattcttttagaaaactgtaaacacagtattttccaagtgaaacagaatcaaggattgtgagattctgtttccaataaagcccagctcaaactcctttggccccttatcctggtacaaatttcttttgggccctcactatgtcagtttccacctatatactaatagctttgcatttcatgtgcttctggcatttgatattttttctttatctaaaggttatatatgtgtgtacaactttaacgtgttttta

SEQ ID NO: 552391 - DNA, 664 bp, Homo sapiens
atggagatataatatacttcctaacaatttgatagggttactgtgaagtgtaatgaaataaggcagtggaagtccatttttaaaatttagttattcatcttctgaaaaagtacaaagaagggctacctattggtgtcagtccttgtttttgagtaggacccctcctaacacagcactgattaccattctttaaaaaatgactggttcaacgataaacactaaaacttgtcatctgtggcttatttgttcactatgaaaacctgtttctggtttacattaactatttttaaactaaaaacctcattctcttctgattgctcataagatattaatctttaaaagttctgtttcaaaatatttcatgaatataaagctttttccgtacttctaaractactacttataattctattaattcttttagaaaactgtaaacacagtattttccaagtgaaacagaatcaaggattgtgagattctgtttccaataaagcccagctcaaactcctttggccccttatcctggtacaaatttcttttgggccctcactatgtcagtttccacctatatactaatagctttgcatttcatgtgcttctggcatttgatattttttctttatctaaaggttatatatgtgtgtacaactttaacgtgttttta

SEQ ID NO: 552392 - DNA, 1131 bp, Homo sapiens
  misc_feature 655, 778, 780: n = A,T,C or G
aaaatgtgctgtatccaagtaaaataacttactgagttcttattatgccatgaaactataatctattattttatttcatactcatgaaaccttatgatgtatgtagtgttatcattcacagtttttagataaagaaactagggcacagaaggtttaagaaatttgtatgcatatgttaatatctgctgtaacactaaaactagatgtgaatagaattttttattttttattattttattttttgagacagagtcttactctctcacctagactggagtgcagtggcacaatctcgcatcactgcagcatctgcctcccaggttcaagcagttctcctacctcagcctcccaagtagctgggaattacaggtgtgaaccactgcaccctgccaaattaattttcttctaataagaaacttgattttcaatttgtaccactttagtataattgctatgtttttcaaaaggaaatcaacattattcttattaaatctattaatattaactactttgtgacgctgagggcctttttgtaagtacctaagtgtgagatgaataacattatcatgattatcttagtgaaccaaacatctgaccctttgactatgaactcgcaaaattgtcacaattttgccgaattctaagataatattanggtaataatgggctacgaaagtctaagacataygttatacaatgctccagattagattttgtgccagcttaataagtggatttcagaacaaagttatatatttctccctgacccaccttctcngntctgtatttatatagccagaaaagtgtaagaataaaaagaagtggtataaaagtgcactacaagaagcatgtctactctatggatattctcatgagcaaagactggaaatgtgctgcctatcaaaactacaaggtgtataaatattttttctttattactctgaaataaggatttattcaaatgcatgttttccaaaatatgtttgctcattcaaaaatctctatctctttctcttcatagggaaatagtatatcattgtttatttgaaaattatttttatatcaatgaatagcatatattttgtcccctaaaacaattttcaatgactaaacatacactctttttaaatg

SEQ ID NO: 552393 - DNA, 2217 bp, Homo sapiens
  misc_feature 1689, 1690, 1691, 1692, 1693, 1694, 1695, 1696, 1697, 1698,1699, 1700, 1701, 1702, 1703, 1704, 1705, 1706, 1707, 1708,1709, 1710, 1711, 1712, 1713, 1714, 1715, 1716, 1717, 1718,1719, 1720, 1721, 1722, 1723, 1724, 1725, 1726, 1727: n = A,T,C or G
  misc_feature 1728, 1729, 1730, 1731, 1732, 1733, 1734, 1735, 1736, 1737,1738, 1739, 1740, 1741, 1742, 1743, 1744, 1745, 1746, 1747,1748, 1749, 1750, 1751, 1752, 1753, 1754, 1755, 1756, 1757,1758, 1759, 1760, 1761, 1762, 1763, 1764, 1765, 1766: n = A,T,C or G
  misc_feature 1767, 1768, 1769, 1770, 1771, 1772, 1773, 1774, 1775, 1776,1777, 1778, 1779, 1780, 1781, 1782, 1783, 1784, 1785, 1786,1787, 1788: n = A,T,C or G
gaatatcagttagctcaagttagttgatggcatttttgaaattttrtatacccttactgatttcctgcttattcctatttattaatgaaaaagagttattgcaatttccaatgataagttttctatttattaggaatatgtcttgaaaaaggaagtaggatgaagtagcaaggagcatctgtgcattaacagggaagtaaaaaatacaaaagaactagacatagaaaactgtgacctttcctggattgctaggcatttatctcttctcctcaaaactttcaagcaccctctcatatttgcaataggatacctgtgtttttattgaatttttagagataattatatatgaagtatccatgattatcataaatcctgttaaatatcggtattgaagaaaatttgtgacccatacgtatttactcagtaagcaatgacttcatttcctgaattttaatatattattgattctattaagttttctatattctaaattagggttttaataatataatatgcatgtagagggaatttaatttctgccttttcaaaggttatgtctcattttttattcttgttttgttttgttttcttctttaatacattggccagattttcctaaacaatgttaaatgcagtagtgatagtaaatatgctaatcttttatcaacttgtagtgggactagctcacatttaactaccatgtgaatagtttgtttttgctttcatatgtttgttatcattaagtaactagtttttcttagtagtttacagagttttatgagaaatggaagttggatgttatcaaatgagtgtttaaaacatctattaagatttatttgtgaattatgaaaatgacaaagtatagtgcttcctaataatataacatcattgttttttttaagatcaacttgggtcacaatagactattttattatactgttaaatttagtgttttattttatttgggaatttctgcgaatgaactaagtgaattgctctattccttttaaactttgaactatttttatcatgttttaatgtctgaatgacatacagcagtttcatagaacaaacggataatttttctatatttatggtactctgaaaatgttcatataacattataaatatctgtgtattcaaagtttggaggaactcaattataagaataatttggactatttcagttaattctttcatggtggtacgcgccgtctcccagaggtatagcctcagagaagggactcccacgtgttagtcatctgtatgtaacagttacatgcttctagcaaaacacactctccgaaatggaagtgccaccctgccaagtctgaaactgggacacactcagaaatgccatacatctctggcatctatcacaaataggctcttgtcagtactatatgtcctgaatttgattattccactgtatatgatagcaggagttaaacattacgttctgcactacctgcccccacctcactctccaactctctctcgttaagttttcatcacatctgaataccagatcttggtttactctttaatgtttcacctttcagtgcaattttgtttcggatgtgtctttttaaattagcatcatcatcattttttatactttttattgaagtaaaggaacaaacaaaaatacacatactgtaagtgttaaagctccattatcactaagtnnnnnnnnnnnnnnnnnnnnnnnnnnnnnnnnnnnnnnnnnnnnnnnnnnnnnnnnnnnnnnnnnnnnnnnnnnnnnnnnnnnnnnnnnnnnnnnnnnnnctttcccaaaacagtcacatatccttttcccatatccactttcctatatatattctttggagcagttcccattttttatctgccagagttctagacacttccaaagcctttcccacacaactcctctttgaagcctgaagattatattcaatatatgtattaatctataataagctattgtatgttaccaattactcaatttgtattgttactcaattctttttaaattaatctaaaaaaaactcaactccaaaaaatagttctaaattttagcattttctagcaaagttctttgccactaacattctctgcattcgtatccctaaactaaaaaatgcaaaatacatggaaaaatatttataagaaaattttacaaatgttcaatatcattgtatatttcatagcacaaactatttaacttattttaca

SEQ ID NO: 552394 - DNA, 2217 bp, Homo sapiens
  misc_feature 1689, 1690, 1691, 1692, 1693, 1694, 1695, 1696, 1697, 1698,1699, 1700, 1701, 1702, 1703, 1704, 1705, 1706, 1707, 1708,1709, 1710, 1711, 1712, 1713, 1714, 1715, 1716, 1717, 1718,1719, 1720, 1721, 1722, 1723, 1724, 1725, 1726, 1727: n = A,T,C or G
  misc_feature 1728, 1729, 1730, 1731, 1732, 1733, 1734, 1735, 1736, 1737,1738, 1739, 1740, 1741, 1742, 1743, 1744, 1745, 1746, 1747,1748, 1749, 1750, 1751, 1752, 1753, 1754, 1755, 1756, 1757,1758, 1759, 1760, 1761, 1762, 1763, 1764, 1765, 1766: n = A,T,C or G
  misc_feature 1767, 1768, 1769, 1770, 1771, 1772, 1773, 1774, 1775, 1776,1777, 1778, 1779, 1780, 1781, 1782, 1783, 1784, 1785, 1786,1787, 1788: n = A,T,C or G
gaatatcagttagctcaagttagttgatggcatttttgaaattttgtatacccttactgatttcctgcttattcctatttattaatgaaaaagagttattgcaatttccaatgataagttttctatttattaggaatatgtcttgaaaaaggaagtaggatgaagtagcaaggagcatctgtgcattaacagggaagtaaaaaatacaaaagaactagacatagaaaactgtgacctttcctggattrctaggcatttatctcttctcctcaaaactttcaagcaccctctcatatttgcaataggatacctgtgtttttattgaatttttagagataattatatatgaagtatccatgattatcataaatcctgttaaatatcggtattgaagaaaatttgtgacccatacgtatttactcagtaagcaatgacttcatttcctgaattttaatatattattgattctattaagttttctatattctaaattagggttttaataatataatatgcatgtagagggaatttaatttctgccttttcaaaggttatgtctcattttttattcttgttttgttttgttttcttctttaatacattggccagattttcctaaacaatgttaaatgcagtagtgatagtaaatatgctaatcttttatcaacttgtagtgggactagctcacatttaactaccatgtgaatagtttgtttttgctttcatatgtttgttatcattaagtaactagtttttcttagtagtttacagagttttatgagaaatggaagttggatgttatcaaatgagtgtttaaaacatctattaagatttatttgtgaattatgaaaatgacaaagtatagtgcttcctaataatataacatcattgttttttttaagatcaacttgggtcacaatagactattttattatactgttaaatttagtgttttattttatttgggaatttctgcgaatgaactaagtgaattgctctattccttttaaactttgaactatttttatcatgttttaatgtctgaatgacatacagcagtttcatagaacaaacggataatttttctatatttatggtactctgaaaatgttcatataacattataaatatctgtgtattcaaagtttggaggaactcaattataagaataatttggactatttcagttaattctttcatggtggtacgcgccgtctcccagaggtatagcctcagagaagggactcccacgtgttagtcatctgtatgtaacagttacatgcttctagcaaaacacactctccgaaatggaagtgccaccctgccaagtctgaaactgggacacactcagaaatgccatacatctctggcatctatcacaaataggctcttgtcagtactatatgtcctgaatttgattattccactgtatatgatagcaggagttaaacattacgttctgcactacctgcccccacctcactctccaactctctctcgttaagttttcatcacatctgaataccagatcttggtttactctttaatgtttcacctttcagtgcaattttgtttcggatgtgtctttttaaattagcatcatcatcattttttatactttttattgaagtaaaggaacaaacaaaaatacacatactgtaagtgttaaagctccattatcactaagtnnnnnnnnnnnnnnnnnnnnnnnnnnnnnnnnnnnnnnnnnnnnnnnnnnnnnnnnnnnnnnnnnnnnnnnnnnnnnnnnnnnnnnnnnnnnnnnnnnnnctttcccaaaacagtcacatatccttttcccatatccactttcctatatatattctttggagcagttcccattttttatctgccagagttctagacacttccaaagcctttcccacacaactcctctttgaagcctgaagattatattcaatatatgtattaatctataataagctattgtatgttaccaattactcaatttgtattgttactcaattctttttaaattaatctaaaaaaaactcaactccaaaaaatagttctaaattttagcattttctagcaaagttctttgccactaacattctctgcattcgtatccctaaactaaaaaatgcaaaatacatggaaaaatatttataagaaaattttacaaatgttcaatatcattgtatatttcatagcacaaactatttaacttattttaca

SEQ ID NO: 552395 - DNA, 958 bp, Homo sapiens
tgcctccaaggcaaaaggatcttctgagcttgtttacttctctggactcccattttctcttcaactttggccyggtaatttcccacagtttgtcagttatttttcaacacttctaagaaagtacttttaatactttaatcagcaggattggtagggtttgcttgcttaccctcatttttctctcctatgaaatggaaacgataatattaatggcacttttgcaatgatgtaatgatcatgagttatcatgataacaaaagaaaatactttacaggcttttaagctatctcttactactgtagacagtctgtcaacttctcctcccctaactgtaccacagtgtatttgttaacttggcttctgttcagatgcataagaagatgcataagaagttttcttttttcaaatgcctaaggagagaatagatttttgtttaagagaaagctcttctgactcctctcctccataatactagaaggaaaagaaaaaagtgggaaaatgggggaagatgtaggaaagtctcctggtctagccctgtggaatgaaggtgatcatctgtgggtgatcaggagaaacagaatctgctctgtgcaagatgctctgtctgacactagcacaaaagctatgctgaagcccagggaacagcgtgcctaactctatatgtgaattttctttcttgagaacccagagcccatttatactggaggcatgggcagtgtagtggttatcaactgtaatggtggaaatgaggcttctgtaagcacttttttaggcaatattttttttatggacaagggagagtcagagcagggaggaacttgcaagaaggaagaaggcaaattacttctgcagatagtcttgtttatgatgtactgctttggggacaatcagagatcaatggaagacacttcaagaggggccgagattctactataatgctagaggggcctcttaaata

SEQ ID NO: 552396 - DNA, 958 bp, Homo sapiens
tgcctccaaggcaaaaggatcttctgagcttgtttacttctctggactcccattttctcttcaactttggcctggtaatttcccacagtttgtcagttatttttcaacacttctaagaaagtacttttaatactttaatcagcaggattggtagggtttgcttgcttaccctcatttttctctcctatgaaatggaaacgataatattaatggcacttttgcaatgatgtaatgatcatgagttatcatgataacaaaagaaaatactttacaggcttttaagctatctcttactactgtagacagtctgtcaacttctcctcccctaactgtaccacagkgtatttgttaacttggcttctgttcagatgcataagaagatgcataagaagttttcttttttcaaatgcctaaggagagaatagatttttgtttaagagaaagctcttctgactcctctcctccataatactagaaggaaaagaaaaaagtgggaaaatgggggaagatgtaggaaagtctcctggtctagccctgtggaatgaaggtgatcatctgtgggtgatcaggagaaacagaatctgctctgtgcaagatgctctgtctgacactagcacaaaagctatgctgaagcccagggaacagcgtgcctaactctatatgtgaattttctttcttgagaacccagagcccatttatactggaggcatgggcagtgtagtggttatcaactgtaatggtggaaatgaggcttctgtaagcacttttttaggcaatattttttttatggacaagggagagtcagagcagggaggaacttgcaagaaggaagaaggcaaattacttctgcagatagtcttgtttatgatgtactgctttggggacaatcagagatcaatggaagacacttcaagaggggccgagattctactataatgctagaggggcctcttaaata

SEQ ID NO: 552397 - DNA, 651 bp, Homo sapiens
ttcataattttgctatcttttattattattattattattatttgagacagggtcctactctgtcacccagactggagtgcagtggcatgatcacggctcacttgcagccttgacctcccaggctcaggtggatcctcccatctcagccccctggatagctggractacaagcatgcaccaccacacccagctgatttttttattttttgaagtgactgggtttcgccttgttgcccaggttggtctcgaactactggactcaagccatctgcctgccttggcctcccaaagtgctgggattacaggtgtgaaccacccacgcccagcctgctatctttaaaaaagtaattttttttttcagccaccaaacatttctgtaggtcaagtgcagtattttttcttgtattcttcattggcaagttattcctttattctgggtttattttccctttttcctgaagtacagtcattagttgtttttccagtgagtgttttagtctctatatgaaaacatttttttcactatcattcatgattttttttgagctttttgtttttatttttttcatggttgctctagggattacagtatctacctacttagccttttacaatctacttggagttaatgtactatttcatgttctgtaa

SEQ ID NO: 552398 - DNA, 651 bp, Homo sapiens
ttcataattttgctatcttttattattattattattattatttgagacagggtcctactctgtcacccagactggagtgcagtggcatgatcacggctcacttgcagccttgacctcccaggctcaggtggatcctcccatctcagccccctggatagctgggactacaagcatgcaccaccacacccagctgatttttttattttttgaagtgactgggtttcgccttgttgcccaggttggtctcgaactactggactcaagccatctgcctgccttggcctcccaaagtgctgggattacaggtgtgaaccacccacgcccagcctgctatctttaaaaaagtaattttttttttcagccaccaaacatttctgtagktcaagtgcagtattttttcttgtattcttcattggcaagttattcctttattctgggtttattttccctttttcctgaagtacagtcattagttgtttttccagtgagtgttttagtctctatatgaaaacatttttttcactatcattcatgattttttttgagctttttgtttttatttttttcatggttgctctagggattacagtatctacctacttagccttttacaatctacttggagttaatgtactatttcatgttctgtaa

SEQ ID NO: 552399 - DNA, 1150 bp, Homo sapiens
caccctgagggcacaaagggagggagctgtcactagaacccagagaaggtagctgcatattgacagccacttaacaggagccctcagaaggtaaggacagtgtgcagcaacccaagggggaggaagcaacaagaataaataccccaaacttacttttctccctccctctgatcacttgccaaaacataccagtgaccaaaccaaataggaaaacaggggacaaagtaaccacggtgatgaagtccacatgggtcagcctcccaggacagaatggagtagggtaaagatcgratgggggagtgcaaacaggccctctctccacttcttggtttatagaccttcaaaatagacatggtcacatagctgatccagccccactaacctaggccaaggaggaaagatgaaaatatttcattttgggattggattcacataagcttttaggattcaaacggccttattctaccagtctggccactactttgccaaattggaattttgtgttaaaattaaaagagattgagagcaaaagaaatgactcttactgtatatatgcagtgacacatgcaaccttcatgtcaaatatgattcttggggttgtttgagggtcaggatgcccaggctaaagccctggttctgaaacattaccagctaggtgattccacacagtttcctccacctcctgtaaagctaccttgcttcttctaactctgacatactgtgattctattttcattttttccccagttactactctgacagatttagggcctcttcaatttcacagaaaagaaccacatattttaaaattgagctcaagagggattattaaagggtgtatgaatagtttatctttgaaaagagaaagcaaataagctgcaaagcaaaatttaaaaagtatctttaagtttttaactgaaaggaaaacatcttctcccctgagaaattattttctctaccatttattaaatatcttactgcattttctgggcattcaaagatgaaccagatgtgaattcagctctcacagaacctccagactgggagggaagaggaaacagacataggaaaaatgacaaagttgcaaaggttgcagttatttgaggtggcttttgaggattgttatgattttattttttccttttattaa

SEQ ID NO: 552400 - DNA, 1150 bp, Homo sapiens
caccctgagggcacaaagggagggagctgtcactagaacccagagaaggtagctgcatattgacagccacttaacaggagccctcagaaggtaaggacagtgtgcagcaacccaagggggaggaagcaacaagaataaataccccaaacttacttttctccctccctctgatcacttgccaaaacataccagtgaccaaaccaaataggaaaacaggggacaaagtaaccacggtgatgaagtccacatgggtcagcctcccaggacagaatggagtagggtaaagatcgaatgggggagtgcaaacaggccctctctccacttcttggtttatagaccttcaaaatagacatggtcacatagctgatccagccccactaacctaggccaaggaggaaagatgaaaatatttcattttgggattggattcacataagcttttaggattcaaacggccttattctaccagtctggccactactttgccaaattggaattttgtgttaaaattaaaagagattgagagcaaaagaaatgactcttactgtatatatgcagtgacacatgcaaccttcatgtcaaatatgattcttggggttgtttgagggtcaggatgcccaggctaaagccctggttctgaaacattaccagctaggtgattccacacagtttcctccacctcctgtaaagctaccttgcttcttctaactctgacatactgtgattctattttcattttttccccagttactactctgacagatttagggcctcttcaatttcacagaaaagaaccacatattttaaaattgagctcaagagggattattaaagggtgtatgaatagtttatctttgaaaagagaaagcaaataagctgcaaagcaaaatttaaaaagtatctttaagtttttaactgaaaggaaaacatcttctcccctgagraattattttctctaccatttattaaatatcttactgcattttctgggcattcaaagatgaaccagatgtgaattcagctctcacagaacctccagactgggagggaagaggaaacagacataggaaaaatgacaaagttgcaaaggttgcagttatttgaggtggcttttgaggattgttatgattttattttttccttttattaa

SEQ ID NO: 552401 - DNA, 1150 bp, Homo sapiens
caccctgagggcacaaagggagggagctgtcactagaacccagagaaggtagctgcatattgacagccacttaacaggagccctcagaaggtaaggacagtgtgcagcaacccaagggggaggaagcaacaagaataaataccccaaacttacttttctccctccctctgatcacttgccaaaacataccagtgaccaaaccaaataggaaaacaggggacaaagtaaccacggtgatgaagtccacatgggtcagcctcccaggacagaatggagtagggtaaagatcgaatgggggagtgcaaacaggccctctctccacttcttggtttatagaccttcaaaatagacatggtcacatagctgatccagccccactaacctaggccaaggaggaaagatgaaaatatttcattttgggattggattcacataagcttttaggattcaaacggccttattctaccagtctggccactactttgccaaattggaattttgtgttaaaattaaaagagattgagagcaaaagaaatgactcttactgtatatatgcagtgacacatgcaaccttcatgtcaaatatgattcttggggttgtttgagggtcaggatgcccaggctaaagccctggttctgaaacattaccagctaggtgattccacacagtttcctccacctcctgtaaagctaccttgcttcttctaactctgacatactgtgattctattttcattttttccccagttactactctgacagatttagggcctcttcaatttcacagaaaagaaccacatattttaaaattgagctcaagagggattattaaagggtgtatgaatagtttatctttgaaaagagaaagcaaataagctgcaaagcaaaatttaaaaagtatctttaagtttttaactgaaaggaaaacatcttctcccctgagaaattattttctctaccatttattaaatatyttactgcattttctgggcattcaaagatgaaccagatgtgaattcagctctcacagaacctccagactgggagggaagaggaaacagacataggaaaaatgacaaagttgcaaaggttgcagttatttgaggtggcttttgaggattgttatgattttattttttccttttattaa

SEQ ID NO: 552402 - DNA, 210 bp, Homo sapiens
aaggaaggaaggaaggaaggaaggaagaaagaaagaaagaaagaaagaaagaaagaaagaaagaaagaaagaaagaragagagaaagaaaagcaagcaagcctgccttcagaaatatttattaccagaatgaagccctcactatatatcagaataatttcactggaagataaagacaggataataagtgctaatgattgtgccttactta

SEQ ID NO: 552403 - DNA, 544 bp, Homo sapiens
tgacctcaagtgatccacccaccttggcctcccaaagtgctgggattacaggcgtgagccactgcgcccggccactcaccataaattctgtccttaaactggagctcactccctccacccattggccccatctaatgtttcaatatctcaaaagatctttttactgggctgtctctatgaggaggcggggtctgttgaccaatggcagtcaatattgactttctccaaccagatgtcaagcataccctctggggtatggcctgagggaattctggggcaaccaaaattaaataactgtattaagaaatgtttaataaagcagggtgacaaaatgattaagagcctggaattggaggctgggtgcagtagctcacacctgtaatcccagcactgtcagagcctgaggcaggcggattgcctgaggctgggagtttgagaccagcctggccaacatggtgaaaccccmtctctaataaaaagacaatcattatctgggcaaggtggctcacccctgtaatcccagctactcaggaggctgaggcag

SEQ ID NO: 552404 - DNA, 1593 bp, Homo sapiens
ttagattttctaaatctctgcttttatttggaaagttattagccccctagaattaacaatcaaaggaaaacctttacccagcatagttacagggtggaatgtataattcaataatgttttcactgaaattaattaaaattcatcttacttatgtagtcaaatttcttctgcaaagatatttcagaacctgcttacagccattcactgggtgatttgtcaattgcttttttgtttattttttaaagaacattttgagaaaggtctcatgtaaatacataattatgttttcctgagaatttttcagaataaacagagagggaaaattaaattcttcacaagtagaaggccaagcattcactgacagttcaataatgatagacatttctgaattaaatgtttaatataaatgtagaaagtgaaaggaagttgtgtaaaataatgtgtcagctttaaagaacctggtaactgttcaaggattaaaaacaaaataattgttaaagttgctcttcaatctctaagctaaatgaagaaagcctcaaaatctgctgagtaacaaggcagagagtgccagaaattcctgagaaatgacatgtaaatgagttagctaggtaatggctggaatgcctaggttgcaacctcctcatatagatcttgttgttttgtagatgccatgtttcttatttaactaccttctgttaaacatctagattatatctaatcctttcctagaaggtttttacatactttttaacatacgtaattattcaaactttaattgccttctaaagttacacatggactgtggtttcactatagttcctaaaactgagtactccattactttgatttttttttttagttttttgtatctaccattcaatccaacaatcccaacaactaggtatctacccaaagaaaaataagtcattaaataaaaaagacacctgcatttgtatgtttattgtagtacaatttacacataaaatatatggaatcaacctaagtaccaaactaccaataagtggataaagaaaatgtggtatacttataccatggaatactacttagccacaaaaaagataaaaataatgtcttttgcagcaagttgggtggaattggaagctattatcctaagtgaagtaacgcaggaacagaaaaaccaaatactacatgtttttacytataaatgggagctaagctctggatatgaaaaggcatacagaattgtataatgaacattggagactcagaagggggaagggtgggagaagggtgagagattaaaaatcacctattgtgtgcaatgtacactattcaggggaggggtacaccaaaagcccagacttcaccatgttacaatttatccatataagaaaaaaccagttgtacccctaaagttattgaaatttataaaaagaaaaaagctgtaattttaaagatatttctttatagcagaatgacattaaaagtattgaaaattctacatgaaaatatgatagcagatttcctacttagtttacattgactaaaaccaggtggataatttagaagctaataccaagaaatagtaacattattttgcattatttttta

SEQ ID NO: 552405 - DNA, 1404 bp, Homo sapiens
tggcaagcataaagaagttaatgtatattgggcataccgaacataatgtacatggcaaacccagtcattctttttatcttggcaccatgtgtttttcttaataacacttatctccaccttacataacatttattcattttattatttgtatcttacacatttgaatgtaagctccatatgtagaaactttgcttaactccatatgtggaaactatacatctgttcactgatgtatacctagtgcttagtgcaccatgtatttttcttaataacacatctccaccttatataatattcattcgttttattatttgtatcttatgcatttgaatgtaagctccctatgcagaaactttactttgttcactgatgtgtacctagtgcttagaacagtgtatacagcagagtatgtataagaactcagtaatattcagtgaatgaattaatgggtccctacccttaactcttgaayacccagtttatgggtttaagtcactgttaggtcctttattacctaaaatattggggtagggatgaaggactggaatatgtgtgtagggaaagagaaaggacatgtgaatgtcaatttagatatgtgtttgaatttgtgcatatgctcgtgttgagggttaaattttcctctgcaaaaaacacttgacattaatgcctggggagagtgaggtacataaagaaaggagagcaactggcttggatatctgaaaagaatgccaattagttgtttataataagtaaataagtatatataatctacatctaatttattaaacattaaatataaattacatatcattaatagctatcagttatattgaaatatcacctaacaccaaacatttacagaaattaaattattcctcttatttttattacaacattgaactatatgttaattcttaattttcatatttttttgctctctttgatggatctctgtttataacttaaaaaaatcaaaaccctacttaggagtgtcattcctacttaatccacaaataaactttcttatataatttgaacttctttagcttctaccagtaccaactgcctaaaagtgtagggtgaacatgactagattctgaaaagcatcactttcttggtcttaaaggaccaattattggcaggtttgaaaatcagcagagccaggaagctcaatgtgctagtttagtggttctcaaactttacatcagaatcacctggagggcttgtaaacacagaattgctgggctttatcctctagagcttcagattctacagatctggggtggggcctgagaatttgcatttttaataagttgatgctgttattgtctctcagctccgaatctgcccttctgtacttgcttagtgatgctggagctgggattctgctaaccagtttctgct

SEQ ID NO: 552406 - DNA, 1404 bp, Homo sapiens
tggcaagcataaagaagttaatgtatattgggcataccgaacataatgtacatggcaaacccagtcattctttttatcttggcaccatgtgtttttcttaataacacttatctccaccttacataacatttattcattttattatttgtatcttacacatttgaatgtaagctccatatgtagaaactttgcttaactccatatgtggaaactatacatctgttcactgatgtatacctagtgcttagtgcaccatgtatttttcttaataacacatctccaccttatataatattcattcgttttattatttgtatcttatgcatttgaatgtaagctccctatgcagaaactttactttgttcactgatgtgtacctagtgcttagaacagtgtatacagcagagtatgtataagaactcagtaatattcagtgaatgaattaatgggtccctacccttaactcttgaacacccagtttatgggtttaagtcactgttaggtcctttattacctaaaatattggggtagggatgaaggactggaatatgtgtgtagggaaagagaaaggacatgtgaatgtcaatttagatatgtgtttgaatttgtgcatatgctcgtgttgagggttaaattttcctctgcaaaaaacacttgacattaatgcctggggagagtgaggtacataaagaaaggagagcaactggcttggatatctgaaaagaatgccaattagttgtttataataagtaaataagtatatataatctacatctaatttattaaacattaaatataaattacatatcattaatagctatcagttatattgaaatatcacctaacaccaaacatttacagaaattaaattattcctcttatttttattacaacattgaactatatgttaattcttaattttcatatttttttgctctctttgatggatctctgtttataacttaaaaaaatcaaaaccctacttaggagtgtcattcctacttaatccacaaataaactttcttatataatttgaacttctttagcttctaccagtaccaactgcctaaaagtgtagggkgaacatgactagattctgaaaagcatcactttcttggtcttaaaggaccaattattggcaggtttgaaaatcagcagagccaggaagctcaatgtgctagtttagtggttctcaaactttacatcagaatcacctggagggcttgtaaacacagaattgctgggctttatcctctagagcttcagattctacagatctggggtggggcctgagaatttgcatttttaataagttgatgctgttattgtctctcagctccgaatctgcccttctgtacttgcttagtgatgctggagctgggattctgctaaccagtttctgct

SEQ ID NO: 552407 - DNA, 547 bp, Homo sapiens
tgctagactggctggggctgtaagttctatataaaagagttctccatgaggaaaagagtaaaatgcataattgtggatctgaattcatccaaggcaattatggtgaagccacccctctggccagtgacctgtatgtgcccgcagctggtttaagggtagaaatgtggcccagctctgttggctgtgacaggaaagggagaagtctcccaagaggcatctgaggaagatctctttggtctaaatttaaaaagaaaaaaaaatgcttggcaggaaatcatcgccttcttctactgaacgttcttgtagaataaggggtcctgacactgtggcatttaccctacgaccatgcagtgggcctatgacaaagatgcaggatgaagatggggctcaacaatatggtggagcctcgaagccaaccagcgcgcaagctctctcrccacatgttcttggagatggtattttcacctccttggctgagctcttgggggttgctttttctgttatgggaccagttaggatgcatttggctgatagtcaccaaaaaacc

SEQ ID NO: 552408 - DNA, 563 bp, Homo sapiens
aaaaaaaattgataaacttctaaaaaaaaaaaagaaaaagaaaaatcatgcatatggtcttagctcaagcttgggcagatgaagctcatgcttgtaatcttaatgataacaaagctggggcagaagctgtccacgacacagaacccagctggcagtaccaggatgccaatgccagcccaaacagaggtggggcagattagattatatgataacttgcttgttggaaggaatgaaaaaggctgtaataaaacctgttaatttttctaaagtatgagaaatcacccaggagccatgagaaycctgcccttttccaagctagactggtggaggctatgaataaataaacaaatttagacactgaaaaccctaagggccaatccattctggccatacattttataagtcaggcttcccgagacatcagacaaaaactcccaaaattagataaaggtccacaaactccctttcttacattgttaaatacagcctttaaggttttcagtaactgcgaggaaacatcaaaaataaaaaaggctcaattggaggaggaaaaatgctgttgt

SEQ ID NO: 552409 - DNA, 601 bp, Homo sapiens
aatttctacttctcttttgtattgctttctttcaacatttccttcaaaagaaggataaaattacatctatttagcttgttcatcttttgttatcccaaargcacacccaaccatggggtcagtgagaaaatgttcaaacatttgtaaataatcaattttcctaatgtgaaggccaactcagcagagtcctaatcagggaaaggcaaagaaaacagtccagcctttaagagatccaaatttggattctttgttaactttatcttctttatttctctttcttctacagcagtgtttacaacgttatgatgtacagcaatgttacagaaaaaaagtggagaaagataatgcaactacctcattgacatatacatctcagcataatgatttaaatactgtgactttgtagtaggctgatcaccaagcaaggtgatccggcaacttgacccaatatcagactgcacaaactacaaagggtaacctggtgtattgggtgctcaaactaagcctattgctaaaacaacttaaaatgcaaattgaaaaaaaatgaattgtgtccatgagctagaacatgcaggctataaattaaatgaaggtggggacc

SEQ ID NO: 552410 - DNA, 1298 bp, Homo sapiens
agtcaagtgtacaatggggtgggggaggcagaattctaaacagggagcgcgtgaggttccttggacctgagctattctctctctctccattcccagggtaaaacccgttttgccacaagtcgttcggatttttaaaatctctatttcataacacaccagaactaagttgctgtttactcgttccaacaggacatggtgtgtatacatcattcgattaagttattactgggtaaatcaagagcatctgtgtgggggagaaaggctgagatcctgactcagtgatttgcagcagcgcctaataatatctccacttgcgcatcttcacagagccaagaggctgtccaccaactgtttcctcgctttagccctgtgaccaccaaggcataggctccagggacagactgcctggattgggctccagcctggctgtttacatgttgtgcaaccttgggtaaaatatttaacctctctgtgcctcagaagcctcatttataagacaggcattataacagaatctatatcataggggtgttataaggactgaaggaatcaatacatgcacagtgcttagaacaatgcctggctcacagggagcacacagtagatgttatctattcttattcttatccccttagctaccaaaacaggactagaattggacttaaatttgtcagtttcccatagactcaacattgaatcttggccccttccacgtccaaggaacaggcccttgcttgggttccatcatcggtgaaggtcccatttgtacatctttccagtttgattctagaatgcctgtaggcctgatcaattccttagactttgctcgtccctatctagttagtaattaacatattaggtttgggtgcctaatatgttaattaggtaggattgggtgcctgacagtgaatgactctaagtaattgtgtgatgtgaattacaccaggggcatttgtattcccagtttccagaatattctaggcactcaataatacttggtggatgaatacgtaatgttaagggcaacaacagaaagtaccatctgggctggggcatggtggctcatgcctgtaatctcagtacgttgggaggacaaggcaggaggattgcttgagcccaggaattcaagaccagcctgggcaacatagtgaggctcatctctatttaaaaagaaagaaagaaaggaaggagggaagaaaggaagaaagaaagaaagaaagaaagaaagaaagaaagaaagaaagaaagaaagaaagaaagaaagaargaaagaaagaaggaaagaaagaaaggaagga

SEQ ID NO: 552411 - DNA, 1298 bp, Homo sapiens
agtcaagtgtacaatggggtgggggaggcagaattctaaacagggagcgcgtgaggttccttggacctgagctattctctctctctccattcccagggtaaaacccgttttgccacaagtcgttcggatttttaaaatctctatttcataacacaccagaactaagttgctgtttactcgttccaacaggacatggtgtgtatacatcattcgattaagttattactgggtaaatcaagagcatctgtgtgggggagaaaggctgagatcctgactcagtgatttgcagcagcgcctaataatatctccacttgcgcatcttcacagagccaagaggctgtccaccaactgtttcctcgctttagccctgtgaccaccaaggcataggctccagggacagactgcctggattgggctccagcctggctgtttacatgttgtgcaaccttgggtaaaatatttaacctctctgtgcctcagaagcctcatttataagacaggcattataacagaatctatatcataggggtgttataaggactgaaggaatcaatacatgcacagtgcttagaacaatgcctggctcacagggagcacacagtagatgttatctattcttattcttatccccttagctaccaaaacaggactagaattggacttaaatttgtcagtttcccatagactcaacattgaatcttggccccttccacgtccaaggaacaggcccttgcttgggttccatcatcggtgaaggtcccatttgtacatctttccagtttgattctagaatgcctgtaggcctgatcaattccttagactttgctcgtccctatctagttagtaattaacatattaggtttgggtgcctaatatgttaattaggtaggattgggtgcctgacagtgaatgactctaagtaattgtgtgatgtgaattacaccaggggcatttgtattcccagtttccagaatattctaggcactcaataatacttggtggatgaatacgtaatgttaagggcaacaacagaaagtaccatctgggctggggcatggtggctcatgcctgtaatctcagtacgttgggaggacaaggcaggaggattgcttgagcccaggaattcaagaccagcctgggcaacatagtgaggctcatctctatttaaaaagaaagaaagaaaggaaggagggaagaaaggaagaaagaaagaaagaaagaaagaaagaaagaaagaaagaaagaaagaaagaaagaaagaaagaaagaaagaaagaargaaagaaagaaaggaagga

SEQ ID NO: 552412 - DNA, 1298 bp, Homo sapiens
agtcaagtgtacaatggggtgggggaggcagaattctaaacagggagcgcgtgaggttccttggacctgagctattctctctctctccattcccagggtaaaacccgttttgccacaagtcgttcggatttttaaaatctctatttcataacacaccagaactaagttgctgtttactcgttccaacaggacatggtgtgtatacatcattcgattaagttattactgggtaaatcaagagcatctgtgtgggggagaaaggctgagatcctgactcagtgatttgcagcagcgcctaataatatctccacttgcgcatcttcacagagccaagaggctgtccaccaactgtttcctcgctttagccctgtgaccaccaaggcataggctccagggacagactgcctggattgggctccagcctggctgtttacatgttgtgcaaccttgggtaaaatatttaacctctctgtgcctcagaagcctcatttataagacaggcattataacagaatctatatcataggggtgttataaggactgaaggaatcaatacatgcacagtgcttagaacaatgcctggctcacagggagcacacagtagatgttatctattcttattcttatccccttagctaccaaaacaggactagaattggacttaaatttgtcagtttcccatagactcaacattgaatcttggccccttccacgtccaaggaacaggcccttgcttgggttccatcatcggtgaaggtcccatttgtacatctttccagtttgattctagaatgcctgtaggcctgatcaattccttagactttgctcgtccctatctagttagtaattaacatattaggtttgggtgcctaatatgttaattaggtaggattgggtgcctgacagtgaatgactctaagtaattgtgtgatgtgaattacaccaggggcatttgtattcccagtttccagaatattctaggcactcaataatacttggtggatgaatacgtaatgttaagggcaacaacagaaagtaccatctgggctggggcatggtggctcatgcctgtaatctcagtacgttgggaggacaaggcaggaggattgcttgagcccaggaattcaagaccagcctgggcaacatagtgaggctcatctctatttaaaaagaaagaaagaaaggaaggagggaagaaaggaagaaagaaagaaagaaagaaagaaagaaagaaagaaagaaagaaagaaagaaagaaagaaagaaagaaagaaagaaggraagaaagaaaggaagga

SEQ ID NO: 552413 - DNA, 769 bp, Homo sapiens
tgagaaggtggtgctctgaattgagttgtttgcttggcagatatggtagcgatacaaatgtggcagcaaatgagggctactgggtaagaaaaaaagttgagacaatcaagcctgtgattccattaaagtagggaagagctactaagaagaggcttatagaatgagggaattagaaatatcaaaagattatacacctgtataacaacaaagagtagaaacaatgagaatgaggtgatcagaaatgggttgacaaggcttcatgctcagacagtaaatattgttctgtatgactttttaggtggggcttttctaggtcctgaagattttaggatatgtgtctggaaataggtggataaagtacaatcaaagaaaacattgttgaagtaaaataaatccagaatgagacagttacrtggacagttaaatatctcataattatgattgaagttttagtggagataaaagctgagcaacatacttctaaatgagtaaggctaagtgactcaaaggagaataggtgactttagattccctgtcatttctttacgaaaatatttgaactaatccacaagactccctctctatggcagtcactcatgtgatttgtctaatatactgactctttgcccaacaaatacataatagaattgtacctcatagccctcttgaaaaccaagatggtagattttagatgcactcaaacctttattagttctattaattcaatttaagtaatggtaataacagttaatatttattatttcttttg

SEQ ID NO: 552414 - DNA, 1251 bp, Homo sapiens
tacctgtgtgatctgttgccctcatatgccacacgtgtgcctctagaatttctaaagccaggttgagttatcaaatctagcctagaagatggttgaagtatcagaatataaaagttgttagatggagttcatatctgcttgtttacacctatattcagagtgcccagcactgaagctgagtttaagttttgttgggtgaagacatgaaggtaaactgcttcatgcttcttttccttagaatctcatttcagtaggccaggagaacagggacactgattagggatctgagaggaagccctgatctccatggaaggattagatgaagtcactactattcaacagccatttattgtaattccttcattgaatagatacaaacaattattccaggaagggcaatgtttgctcaaggtcattgtgttagtctgttctcacgctgccaataaagacatacccaagactgggtaatttataaaggaaagagrtttaattgactcacagttcggtatggctgggagacctcaggaaacttatatatgtgatggaaatgaagccaacatgcccttcttcaaatgacggcaggaaagagaagaaagaatgcctagcgaagggaaaagctccttgtaaaatcatcagatctttgtgagaactaactcactatcatgagaacagaatagaggaaaccacctccattattcagttatctccccttggtccctctcatgacatatggggatgtgtcagttcaagatgagatttgggtggggacacagctaaaccatatcagtcatatgtctaatttgtgggatattttcaaaacatgttccattttcctattgcaccacagtgtgattgaaaggaattaacagacagattgttggatgatgaaatttggtgcagcctctctgaaaggaaatatacttgattgttcagagggcggaatctggactactgagagtaaatatctgcatattaatgataacaaaaaggtaataaaactgaaaaacattcattcttatgatttttaaatcacactacatttccaaatgttctgtggatcttatttttgaaagttttctatgtaagaatacgtaaagagaaatatctagagtgatctacaatgaaatattttcagagctccctgggaagtaaaatttttggtcatcacatacttattgaacaataatgttgattctaagaccatttttcagcaacatgtttattacctgtattaggtctaagataaatata

SEQ ID NO: 552415 - DNA, 1251 bp, Homo sapiens
tacctgtgtgatctgttgccctcatatgccacacgtgtgcctctagaatttctaaagccaggttgagttatcaaatctagcctagaagatggttgaagtatcagaatataaaagttgttagatggagttcatatctgcttgtttacacctatattcagagtgcccagcactgaagctgagtttaagttttgttgggtgaagacatgaaggtaaactgcttcatgcttcttttccttagaatctcatttcagtaggccaggagaacagggacactgattagggatctgagaggaagccctgatctccatggaaggattagatgaagtcactactattcaacagccatttattgtaattccttcattgaatagatacaaacaattattccaggaagggcaatgtttgctcaaggtcattgtgttagtctgttctcacgctgccaataaagacatacccaagactgggtaatttataaaggaaagagatttaattgactcacagttcggtatggctgggagacctcaggaaacttatatatgtgatggaaatgaagccaacatgcccttcttcaaatgayggcaggaaagagaagaaagaatgcctagcgaagggaaaagctccttgtaaaatcatcagatctttgtgagaactaactcactatcatgagaacagaatagaggaaaccacctccattattcagttatctccccttggtccctctcatgacatatggggatgtgtcagttcaagatgagatttgggtggggacacagctaaaccatatcagtcatatgtctaatttgtgggatattttcaaaacatgttccattttcctattgcaccacagtgtgattgaaaggaattaacagacagattgttggatgatgaaatttggtgcagcctctctgaaaggaaatatacttgattgttcagagggcggaatctggactactgagagtaaatatctgcatattaatgataacaaaaaggtaataaaactgaaaaacattcattcttatgatttttaaatcacactacatttccaaatgttctgtggatcttatttttgaaagttttctatgtaagaatacgtaaagagaaatatctagagtgatctacaatgaaatattttcagagctccctgggaagtaaaatttttggtcatcacatacttattgaacaataatgttgattctaagaccatttttcagcaacatgtttattacctgtattaggtctaagataaatata

SEQ ID NO: 552416 - DNA, 531 bp, Homo sapiens
ttttatacttcttctctctttgcctgatggttggcggacaaactatttgcaaacatttatatgacttctgcttatgtgttccagaggggaaaaggccttttgttgtagatagtaaaaatcaagcgaaacagatagggtcatgatttgccaaaggtcaaaggtcatgacaagtgagtgactcaagaagccttgaggtcaaaggtgcagctggaatcccataacctccactctgcttttyacatgacaaaggaaagctgtgctttcctaacttctgtgaagcaatctagctacatgttcacatttttccccttgaaaaattattttcaaatgattctgcccatgattattttctcccttgaaaccaagtggcatgaaataggcttttatataaattgaatgtctccttagccttttattagtattctatatcggaaacctagaagaggaagaactaacagagattaatatgtgttttttaaatggaaaataagcacattttttagatcaacacagactaaagaagtacattta

SEQ ID NO: 552417 - DNA, 602 bp, Homo sapiens
ctaattgacctattcataaaccttttcactttcctttccaggtccttctggaggtttcctcatggaaagatggatgaaaacagaatgtggcctccatcaatatagtgcaatgttaggtaacagaatcaacgctacttgataggggttgagttatgcttaagcaggaaagcacatgaatccttcctaatcatctactggtgatatccaatatggcggccactagcagcatatggctacttgtattcaaagtaattaaaatgaaaataagttaaaaattcagtgtttcagttgcattagctaaatttcaagtgctyaatagccatatatggccaatggctaccatattggacagagcaggtatagaacatttatttcattgcagaaagttctacaggccagcaccaaaggaattaatatcaaaattaagaagactgtactttgccactgtgatttccaggtccttccacatgagtaattgtgaactgtcataaattatattgaaattagatataaatgccactgagaagacgacagaggactagaaaaatctataatgtgatgctgatcacattatagatacaattttaaatggttaaaaatga

SEQ ID NO: 552418 - DNA, 602 bp, Homo sapiens
ctaattgacctattcataaaccttttcactttcctttccaggtccttctggaggtttcctcatggaaagatggatgaaaacagaatgtggcctccatcaatatagtgcaatgttaggtaacagaatcaacgctacttgataggggttgagttatgcttaagcaggaaagcacatgaatccttcctaatcatctactggtgatatccaatatggcggccactagcagcatatggctacttgtattcaaagtaattaaaatgaaaataagttaaaaattcagtgtttcagttgcattagctaaatttcaagtgcttaatagccatatatggccaatggctaccatattggacagagcaggtatagaacatttatttcattgcagaaagttctacaggccagcaccaaaggaattaatatcaaaattaagaagactgtactttgccactgtgatttccaggtccttccacatgagtaattgtgaactgtcataaattatattgaaattagatataaatgccactgagaagaygacagaggactagaaaaatctataatgtgatgctgatcacattatagatacaattttaaatggttaaaaatga

SEQ ID NO: 552419 - DNA, 684 bp, Homo sapiens
tcaaaccttaccgctatggtatgagtgtttgtgttccttcaaaatttatgtcgaatcttaatctccagtgcagtagtattaagaggtggggcctttggagctagttaagtcacggagtggagctctcatgaaagggattagtgaatttataaatttgtctggaggcgactagtgttcgtttccttttgctttctggacacagccttcatcccctttggaggatgcagcaaccaggtgccatcttgaaagcagagaccaggtccttactagacaccaaacctgctggcaccttgatctttaacttyccatgttccagaattatgagaaatatatttctattgttcctaaattttttctttaaccccaatttactttgtggacctagacaaagttgataaatctaccagcgactttccaattaaaaggacgatattagtggctatgaactgaatgtttgtgtcctctgcaaatttattcgctaaatccctgacccccaatataactgtatttggaggtagggtctttatggaggtaattaagcataaatgaagtaataagtgtggggtcctgatccaatagcattagtgtcactataagaaaagagaccagagctctctgtctctctgcacttgccagaatgttgatcttgtcatcccagcctccagaactgtgagaaataaattt

SEQ ID NO: 552420 - DNA, 1121 bp, Homo sapiens
gaagatataaaaaagactcaactcccacacacccaaccctgggccactcctgaaagtgcactcaggttgcatctggagttcgtcctgagggctggagcaggcagtgtccatccttggtgcagaagctactgccctggagctgtctgcttgggtgatccaggcagtgtagttccccttagactgtgagagcccagccctaccctgtatcacctctgcagttcctgagagatgttccccttcttccccaatgtcattgccaattacaggacctagaatctaaaagcatgctgggcaaacacacagggtgaggaagaggcagtttttttgtgactatgaggggtgtggcaaaaccttcatcaggaactaccatctgtcccttgatcttgattcacacagaagaaaagccatttctgcagctattggctgtggtcaaaaattcaaaacagaatcaaatcagtaaaaataatgtgtacgtaattttgaactttggaacatgagctttaagaaacattgcagctgaaaatttttcagtgccagtatattggtgaaacactcttcaagaaaaccatggaggatgtgggagacactttgcttcacccagcaggtggaaaggaaggagaaaggttcagagggttctgtgtgtcagacaagactttcctctgaggtaaaaccatggayagagcttcttgaaatgtgagagaaacccaaagagacagtatcacatgaagcatgagaggaaacatgtgaaatatgtctctggaaacattcaaatgcaaagattgtcttaagcagcacatgaaaactcgtgcctccaaaagggatgtatgctgatggcgaagagaaggctgtggtaaaaccttcacaactgtttaaactccagaaccatattttctcttttcatgaagcggagcattcatttatgtgtgaacatgctggtggtggcaaaggtttgcaatgaaacaaagtctcagtagttatgcatgtacatgattctgataggaaaataaaatgaccaaaataaaacaatcttatggaaaatagttttgcttctcatgtcattgcatatatccctcctaaacaaaacaggaacaaggcttatctttgcctacaaatggagagtc

SEQ ID NO: 552421 - DNA, 1121 bp, Homo sapiens
gaagatataaaaaagactcaactcccacacacccaaccctgggccactcctgaaagtgcactcaggttgcatctggagttcgtcctgagggctggagcaggcagtgtccatccttggtgcagaagctactgccctggagctgtctgcttgggtgatccaggcagtgtagttccccttagactgtgagagcccagccctaccctgtatcacctctgcagttcctgagagatgttccccttcttccccaatgtcattgccaattacaggacctagaatctaaaagcatgctgggcaaacacacagggtgaggaagaggcagtttttttgtgactatgaggggtgtggcaaaaccttcatcaggaactaccatctgtcccttgatcttgattcacacagaagaaaagccatttctgcagctattggctgtggtcaaaaattcaaaacagaatcaaatcagtaaaaataatgtgtacgtaattttgaactttggaacatgagctttaagaaacattgcagctgaaaatttttcagtgccagtatattggtgaaacactcttcaagaaaaccatggaggatgtgggagacactttgcttcacccagcaggtggaaaggaaggagaaaggttcagagggttctgtgtgtcagacaagactttcctctgaggtaaaaccatggacagagcttcttgaaatgtgagagaaacccaaagagacagtatcacatgaagcatgagaggaaacatgtgaaatatgtctctgraaacattcaaatgcaaagattgtcttaagcagcacatgaaaactcgtgcctccaaaagggatgtatgctgatggcgaagagaaggctgtggtaaaaccttcacaactgtttaaactccagaaccatattttctcttttcatgaagcggagcattcatttatgtgtgaacatgctggtggtggcaaaggtttgcaatgaaacaaagtctcagtagttatgcatgtacatgattctgataggaaaataaaatgaccaaaataaaacaatcttatggaaaatagttttgcttctcatgtcattgcatatatccctcctaaacaaaacaggaacaaggcttatctttgcctacaaatggagagtc

SEQ ID NO: 552422 - DNA, 554 bp, Homo sapiens
ttccagagaagatcggtagttgtgccagaattccctgtatacactgagtttgatcattttggtgttcctcttctgggatgcaaacacactatatatgcaggcagttactgattctcagaacctcctgtcttaagaggaactggagtgagggmaactgacacaaaccatgagtaattaactgcctaggtccatgaaccagaaatcctgaggcgcctgtcagaatttacatatcaaactatggcaggataacttgtttgcttgcatatagggtaaaatttcagacccttcacagtttttgagttaaacttccagtgttcaaccaaaataccgtattccccagcatcccttgaagttgaaagcagccaagtgatccagttctcaacaatgatacaaaagcaaaagttgttgtttgggacttttaaaatgttcttttcccctggattctcctgtttcctgaaatatggttataatggctggggacacagcgtccttcttttgttactacaaggtgattttgagagttggataataaaggtttacatgtaataatgaga

SEQ ID NO: 552423 - DNA, 748 bp, Homo sapiens
aaataaatttacagatgtttttagacttttttttttcagttgaggtcttgcttagttgcccaggctggagtacagtggtgcaattctagctcactgcagcctcaaactcctgacttcaatcaatcttcccatttctgcctcctgagtagttgagactacaggcatgagccatgacacctggctaattttacttttatttatttatattttttttttgtagagatggggtcttgttatgttgcccaaacttrtctgaactcttggcctcaaacaattctcccaccttggccttccaaagtgctgggattacaagtgtgagccaccatgcccagcagcaacacatatttttatgagcatatgtacctgtaatttccattgtcttgatgaattttcagtgaaatttttataaacaagtagtgtactcaagaggctatatcccaaaggaccccaaatctcataaatatcaccttcctatacagtgacagttctttgcaatttgttattattgctgatgtacattcatctgcaggtaataatttcccttttctattgatacaggaatgtttgtttctcatttttgtattagaagttaaggtatagttttttaaaggaaataatcatttgttgaacattcacttatttctatgatccatacttggtattatcatgtacatcatcttattcaacacaagaatcatgtgaagtatttttttaaacaaataacgtaatgaagagttgaacagtttat

SEQ ID NO: 552424 - DNA, 748 bp, Homo sapiens
aaataaatttacagatgtttttagacttttttttttcagttgaggtcttgcttagttgcccaggctggagtacagtggtgcaattctagctcactgcagcctcaaactcctgacttcaatcaatcttcccatttctgcctcctgagtagttgagactacaggcatgagccatgacacctggctaattttacttttatttatttatattttttttttgtagagatggggtcttgttatgttgcccaaacttgtytgaactcttggcctcaaacaattctcccaccttggccttccaaagtgctgggattacaagtgtgagccaccatgcccagcagcaacacatatttttatgagcatatgtacctgtaatttccattgtcttgatgaattttcagtgaaatttttataaacaagtagtgtactcaagaggctatatcccaaaggaccccaaatctcataaatatcaccttcctatacagtgacagttctttgcaatttgttattattgctgatgtacattcatctgcaggtaataatttcccttttctattgatacaggaatgtttgtttctcatttttgtattagaagttaaggtatagttttttaaaggaaataatcatttgttgaacattcacttatttctatgatccatacttggtattatcatgtacatcatcttattcaacacaagaatcatgtgaagtatttttttaaacaaataacgtaatgaagagttgaacagtttat

SEQ ID NO: 552425 - DNA, 748 bp, Homo sapiens
aaataaatttacagatgtttttagacttttttttttcagttgaggtcttgcttagttgcccaggctggagtacagtggtgcaattctagctcactgcagcctcaaactcctgacttcaatcaatcttcccatttctgcctcctgagtagttgagactacaggcatgagccatgacacctggctaattttacttttatttatttatattttttttttgtagagatggggtcttgttatgttgcccaaacttgtctgaactcttggcctcaaacaattctcccaccttggccttccaaagtgctgggattacaagtgtgagccaccatgcccagcagcaacacatattwttatgagcatatgtacctgtaatttccattgtcttgatgaattttcagtgaaatttttataaacaagtagtgtactcaagaggctatatcccaaaggaccccaaatctcataaatatcaccttcctatacagtgacagttctttgcaatttgttattattgctgatgtacattcatctgcaggtaataatttcccttttctattgatacaggaatgtttgtttctcatttttgtattagaagttaaggtatagttttttaaaggaaataatcatttgttgaacattcacttatttctatgatccatacttggtattatcatgtacatcatcttattcaacacaagaatcatgtgaagtatttttttaaacaaataacgtaatgaagagttgaacagtttat

SEQ ID NO: 552426 - DNA, 576 bp, Homo sapiens
taataactactgctttctgacttctttccatgagtsttgttaaagaaacagtctagacaaaagtattttcaaacaaaaggaaaaagtattcttgcgaaaagttgccgggcaggtttcagaaagattagctcaagaaagataatgagtcattaaaagagagtgtaagtcacaaattaccacagcatggccatttagccaaatatagaataagctttaaaactattttttcttttgctgtagtaatattgtttgtaaatttattatttggatgtaataacaaatgagcataaaaaacatgctgtcagaaatagtatcaaccatagaataaccaacttttattgagcacttactacatgccaaacactgactatatcatcatatgtattctcatttgaatgacataaaaactatgtgatatggtactattattttccatgttttacaattacagaatggattatgttctgaaataataaggcatgagttaatgacctaaagccttataaaacttcccttgtgcccagataagaaaaaaacagccattttaatatagtcttgcctttagaccatggtggg

SEQ ID NO: 552427 - DNA, 576 bp, Homo sapiens
taataactactgctttctgacttctttccatgagtgttgttaaagaaacagtctagacaaaagtattttcaaacaaaaggaaaaagtattcttgcgaaaagttgccgggcaggtttcagaaagattagctcaagaaagataatgagtcattaaaagagagtgtaagtcacaaattaccacagcatggccatttagccaaatatagaataagctttaaaactattttttcttttgctgtagtaatattgtttgtaaatttattatttggatgtaataacaaatgagcataaaaaacatgctgtcagaaatagtatcaaccatagaataaccaacttttattgagcacttactacatgccaaacactgactatatcatcatatgtattctcatttgaatgacataaaaactatgtgatatggtactattattttccatgttttacaattrcagaatggattatgttctgaaataataaggcatgagttaatgacctaaagccttataaaacttcccttgtgcccagataagaaaaaaacagccattttaatatagtcttgcctttagaccatggtggg

SEQ ID NO: 552428 - DNA, 535 bp, Homo sapiens
tgtgaacaccaaggacatccgccagaggtcggggtcaccaggacgctgacattctggaagtaaacaacgttaatggacagtaagtaaatcattttattttccaaacctttaattgttttttatgattgtgaatgtatttttatgctttaagacttccttatataaagcactgtaggaaaattttaaatgacagataaatgaaaaaagttttgttacctttatctgcagggagttggaggtgtcacaagttataaacattggaacatttgtgaaataaatattttgaaacaattaaaatgttacagacttttcagatcatatatcaggagtatatgcagaaaaacatgagaagtacattccccatatttcacagtaaaaatggaratgcatatatttttccaatacagaatagttttatgttcaccctcaccaaacaactcttgaccaaatatttaatgaatatgagttttagggtcacattatcattagttctcttatgtctctgtcctacccaaacatagaaatgtccacccta

SEQ ID NO: 552429 - DNA, 568 bp, Homo sapiens
agtgaggctctgtctcaaaaaaaaaaaaaaaagaaagaaaaatgcaatgatagtacagagtgtttcatatacctttcagcctcctgtaatgtttataccttacatagccacagtatgtgtatgaaaactcagaaaactggtggtacaaaactagtaactgaaatacaggcattcttcgtgttgtattaggttttcactaatatcttttttytattgcatgatctaatctaatataacacactgcagttactcccacgtatattagttatttattactgcataacaagttacctcaaaccttagtgactcagaacctcataaatgtgttacccatggtttttcagggtcacatgactcaggctgaggttacaactgaaggcttgcctagggaaggtcaccttccaagctcatgtaattgttgttagaattcaattcttgtctagggcaaaatgacgggtgaattactctaaacctgttaagaatgaataacaatcctttactaactcttcctcaaagaaaaaaaaaagagaagacaaaatttaccaatctattctatgagggcagttat

SEQ ID NO: 552430 - DNA, 628 bp, Homo sapiens
tgcctcctacaatattactaaaagatggtctaccaattattttacaagaacacttttggaagacacagtctcttccattctggagctgctctaactagctaataccttctgtcatcctgatctctctactccctcttcctagttttgcacttcagagttacaaaaactagtcaaattcaattcacgtgcatacacatgaaatctataatggaggctgttgaaaataatgcagcttctttgaccattttcccaaaaagcatgatttccaaccccaccaccaactttggtcatcttttggatgcacctcagactgccaatgtctctcttaaaatgtgtccaggactgggcgcagtggctcaygcctgtaatcccagcaccttgagaggtcgaggcgggcagatcacgaggtcaggagattgagaccatcctggccaacatggtgaaaccctgtttctactaaaaatacaaaaaaaaaaaaaaaattagctgggcatggtggtgtgtgcccgtagtcccaactactcggggggctgaggcaggagaatcgcttgaacctgagaggcagaggctgcagtgagccgagatcatgtcactgcactccagcctggcgacagaatgagactccatc

SEQ ID NO: 552431 - DNA, 583 bp, Homo sapiens
cctcagtttacctagcttgcagcccaaatgccaacaatcttggggccaaataactttctctgtggtttcagtctgggtagcagtgaccactttcaataaacttaagagtgagagatctttgtttaaacaatgaatgttatgaattcttcggtgccrcatcacaaagcccagcacctccgtgaagtccataaatgtctccccaaactaccccaggacgtagagttaaagaacccaaatctgccctagcgcaccccttgtttgaatacttcaccccatattaacaacctttatgtccaaacttaatgtaatattttaaccaggcttgaattagaaaaagtaataataatgacattttcttaaaggagaaaagaacatgaagatagtaaggtgaaaaaaaaataactaaatactattttaaattatcaaaagtaggtgcaatctatatggtttgacatttcacagtatcaaaagttttctgtgttttggccccaacagaattcttaccagcccccaaaattgtgtataaagggaaggcagagatcatcacccagaccctagtaccacaaatgtaaacatgttctca

SEQ ID NO: 552432 - DNA, 583 bp, Homo sapiens
cctcagtttacctagcttgcagcccaaatgccaacaatcttggggccaaataactttctctgtggtttcagtctgggtagcagtgaccactttcaataaacttaagagtgagagatctttgtttaaacaatgaatgttatgaattcttcggtgccgcatcacaaagcccagcacctccgtgaagtccataaatgtctccccaaactaccccaggacgtagagttaaagaacccaaatctgccctagcgcaccccttgtttgaatacttcaccccatattaacaacctttatgtccaaacttaatgtaatattttaaccaggcttgaattagaaaaagtaataataatgacattttcttaaaggagaaaagarcatgaagatagtaaggtgaaaaaaaaataactaaatactattttaaattatcaaaagtaggtgcaatctatatggtttgacatttcacagtatcaaaagttttctgtgttttggccccaacagaattcttaccagcccccaaaattgtgtataaagggaaggcagagatcatcacccagaccctagtaccacaaatgtaaacatgttctca

SEQ ID NO: 552433 - DNA, 534 bp, Homo sapiens
aagacttagtggcatcatctgaaggaattcctggagaccaggctcacctgttttgcactcaraaaatttcagtattaatcggtatttatttgggaaaggctgtgatggcccaccgtggtgtatgctgcctgtatacatataaacactgatgtgtctttcctttattctctaagtgacagtggaagaaagtgtgttggagatgtactgacatcagtatattgttacaatatgagtaacaagacagccccctgacaggtggggctgttccatttataacaatcacactcccctttcttccacactcaaaggacgagggtgcacagcgggcactgggagcaaatgtggaaactgaaatttggcaacgacacatcatgttctgggggtcccctgtaaatgtgcactcgtgttctggtggcaacctcggggactgacaacccaccattccgtcacctccactgcagtagaggagggcagacccaccccctgtgcacaggtgactgcacacagacagtcgtgaagaaatgaattgaccca

SEQ ID NO: 552434 - DNA, 552 bp, Homo sapiens
gcacgccagctccgggaaggggcagtgcagtctaaaatgactgtttcttttattgatcacagcttctcttaattctgtgggctcaggtttatccacttctcccccaagtactggcagacttaagagtatttttaatctttgaatagtttctaattatatttttgtggggtagagatgcggggatctgcatctgattcagtgagatctgctattctgattcagtgagtgttagagctatgtatctctgatctccagagtgatgttaatgctgcatgtcaatggaccacattttgagtatagaaccaataacgcaaagtccagtttctattatggccccaaaatagcatagtggcatccatggttatattgtaaattctgaatgaaatgaggtagacatgaatagaattttgaaaagtatcaccctgtctttagggtcagagtgtagcaaagagtattcagggacaaggggaacaagaaggctagtatygctgccaattattctgcttgcttcatagcaaaaaagtgggtagagacattttgaagtcaacaaga

SEQ ID NO: 552435 - DNA, 1380 bp, Homo sapiens
gttgggcaggctggtcttgaactcctgacctcaagtgatccacccacctcggcctcccaaagtgctgggattacaggcatgagccactgaacccggcccagctccatagttttttgtgttttactcttgatattttacaggtaaggttattaaggccatgtctatgtagttccaaaagctaccaattatttcaatctgtaataatggtctataaataaacaaacaagcaaacctgcaaaaagcccatgtaggaatcatctagagcacaggtcagacaattgctttggttgactcacaaaatatttaatatttacaaaaatcaattatcagtatttagaattccatgttatgtaatttatgagatacccataaatcccctttccctttttctcctgcaatagcagagtctggaaatatttgtcctgcattcccacgtaggagagaaccctggcaaagtgggcctgacttcagggcctcctctagtttcttactgtcttgctcattgatgttgactccgtggcctttgagcgttagaaagcataagtcctctcctaggtcaagcatctggttggctaagcaagtgttttatttgcttcacacttaactccatgctagtattgtttgtcacgcagcttttaaaggatttgtgagatacccttagatctgctttccctttgtctcttgcaataggaggatctggaaacattggtcctgctttcccatgtcttgacaccccattccaagccagatgtcaaggagaagaaaggactttcaattaaaaaaaaaacaaaaactcgaaacaacatgttttttattgtacgccattaatttcctatcactgagatataaaaataaataatacaaataaatgagaacatgaatttgagctattttattttcttgtagggtatcatatctgacagaggtgacacttaattagatagtttgtcagtgtttgccattttataaaattgataaattgataagatgacacttaactctgatatgtaagtcaaataaacattcctaggttctacttgagatttagaagctaagcttataattaataactcctaagaagatgcataaatcatacagagaattcttgtcattttcaatgatgtctgtgctgtacaccttattcttaaagtttgtcatttatttatgaccatgtaaaggtcagagatgttactatagacgtagctgtcttgaasttaaatgacttattaagaactttggtaaaatcaagccatgcactctatttctaagtcaagaattgaaaaattgataatagcatgaagatatttatcaactaactagatattagcgggaaaatagacattagggggattactgcatggtctcgttgcacttatgatt

SEQ ID NO: 552436 - DNA, 639 bp, Homo sapiens
ctacggatatggaaaatacatgctccgctggraatagtctttcttaaaatatatctgctctgcttaaagattagtttatcatttttgccacatataaaataagctcaggtctctacaagtgcccttgtaatttccatttcataaatttaaaaaatattttgttttacctcgttatatttctaatagtgacctccaaatgggtctgtgtacgatatttcattaaatgggtttagtaggcttccaaagggagaaaagaggatttccatttctgcataatattcttgctcttttaagaagaaaacacctctacagtggcagggctaatatgtcgacaggcatattccgtatcatttatgtaagttaacacattctgaggctctgcccatttccacttctctgatttgtcctccctccctgagtgcacaatactgcatttgtcccttttgaacatgtaacagattaaagagctgggcaggaggcagatgtaggggcacctttgatctctcatccttggaggttaagggagggcagacacctggcggctgccgagctggaaacaaaacacaggcccagactggaattaccttaaagggagcccggctccaaccgcagaggcagctggaagcgctgaatgggcac

SEQ ID NO: 552437 - DNA, 844 bp, Homo sapiens
tctcaatacagtcacattgagggttaatgtttcagcataagaatttggggcagggaccataactcagtccatagcacctaagaatgtgttgcatatgtccaccggttaacatatgcaagattcacaaccaacacaactgcctggtgaaaccccagccccattgtgatggcagtctcctaatgaccagacaaatcatgaagcaatcacagaaaacacaacccagctgaattgacccagaccagaagcgtcatcccagacctcacacaaaagaataagctaaatcaaatgtgatttttttaagctgctaaattctggattgtacgtttatgcagaaagagctaactgatataataggctagatatttgaaatatctctgaatttacacatgcttcaaatttatccaaattgaatccagtgaacaagtgcttattatatgcatatatgtctttttctgtaattatataggacaaaatcccctactctctagctggtgagataaaaaaaaaatgagatacaaactaattcaaaatgtaaatgactaaagatggaaacagtagttcaaggcaayattttaatagattttacaagacaatggattactcatagctacataatggataaaataaatgataaaagagaagtgtttagactgagattatcaggaaagttcttaaagatgaggtagaatataattatttaaatcatttatactttgatattttattcatttaaaatttatctggtcattcaggtgaagtttaactgtttcccaaaaagcaaagttcaatgtgaggattgtcatatattaggcaatatgctaaaccctgtaaattaaaatatgat

SEQ ID NO: 552438 - DNA, 1139 bp, Homo sapiens
tttgcccctcattgcagagttgtgggaactctaaccatccacccacggaaaactcaactaatgcatccattgctttatttactaaattttcaaatgcctttattttcccagggaactcctaggcagtggaagcatgatgatgaaaaatacaaggacactgactttctgcctcctacagtcaaagcagggatgcagagcgatgggcaaacacgcaactgccatacacagtaaagtgcaactgcacatagaaggaccttcctcgtcaggtttagccaattagggaaaggttcctggaggaaatgatgttttgggtgaggtgtgagttagtaagctgtgggtgcaggaaggcgcattgcatcagggagagggaacacgatgatcaaagacctaactggtacaagagagctaattaggccttatgaaacctgaaagtcattcaatctagcttttgtacgagagctgtggaagagggatgagtgtcagtgacaaaagatttctctggaaagtaaaagggaaccctaaggagctacttcagagccactgaagtattttaagcaggggaataaagtgatttgtttgaaagatcttaaaaattacattatggatgtgatcaaatatgaccttcttaacagccacatagaatctgccattttgtaggactgctctggctcttgacctaacatttgtagtcactctcagcgtttaccaggggtttcaaatgtaactgcctgcatgttcaggtaggaaagtaaaggcatgaagtggggctgatataagatattaaggagtggtggtgactctggtaaaggagggtatctatacctatctccacaacaaccatcacttagtttccactgagttccggtgcacagtaatgttggccagagattctgagtatcctgtatagactccttatttgtgaatggaaaaaaaacaaaaaaacaaaaaagcaaaaacaaaactgtgagctaggagttgccttcaagttactagtttggaacttctgktatagttaggaaaatctgtaaatctgtgaagcagatttgttgcccgagcaaacaacaatattatccttgattccaagaagatagcaattggtcaggttttctttgtttctgttttcttcaaaaatcctcaat

SEQ ID NO: 552439 - DNA, 1120 bp, Homo sapiens
ttttcagttatatattgaatttgacttattttataggcttcagcaatgttttatcttcctaagaaacataagaaattattctggaaaaaaaaaacccacttcaataaaatttaaggaaaaccactaagggcatttcrtttttttataaacaatatacacagctgtagcgatgttggcaggaacacatgccagagagctacgtacttgcttctacaaactgttctgttcaccctttatccagtaacagctggtaaaatggtatttaagaacagtttgatttaatctaatgagaaactatgctgcaatgcctgatattgcctgtggaaaataattggacaaacattgattttttatgttgctataataggtacatttccaataaatagaaatttatatgcatacttatttggcaacattcgtctcctgtgaaagctagtgtttggttcttcatacacatatacaggcacatacacatacatgtatatacatatacatgcacaacacacataaattaacacccagtgtatatacgtatactacaaaattttagtgttattgatgccagaaaacaaaatcctatttggaatgcgtttaagactttacagttattttcaaaaacaaaattatgcacagagaaggcaatagtttgggtaacagaactctccaacaactgaagctgtaaacactgagcaaagaatctatgagaccaagtaacaaattagcacacacttcagtctcttgaaatgaacaaagagaagaaagagcctcctgaatctctctacattccatcctggaaacctcaatagattcttctgaaagagtaaacatggtgtgtggttgctcgtacatgcaaacatgcacgatcttctctgtttctttttcttatatcttctcaattccaaattctgcaatcactggaacaagaaaagctgccccagtgggatttctgtcatgatttgctttagaaagtactcgaaaccacagatgaccattacttgccaaaatttgagtcaggacttgttgacgcataaggttcaaataatttgtataaacatccaagcacttagacagtatccaagatatttctttttcttggaagaaaaaaaaatcatctgtaaac

SEQ ID NO: 552440 - DNA, 1120 bp, Homo sapiens
ttttcagttatatattgaatttgacttattttataggcttcagcaatgttttatcttcctaagaaacataagaaattattctggaaaaaaaaaacccacttcaataaaatttaaggaaaaccactaagggcatttcgtttttttataaacaatatacacagctgtagcgatgttggcaggaacacatgccagagagctacgtacttgcttctacaaactgttctgttcaccctttatccagtaacagctggtaaaatgstatttaagaacagtttgatttaatctaatgagaaactatgctgcaatgcctgatattgcctgtggaaaataattggacaaacattgattttttatgttgctataataggtacatttccaataaatagaaatttatatgcatacttatttggcaacattcgtctcctgtgaaagctagtgtttggttcttcatacacatatacaggcacatacacatacatgtatatacatatacatgcacaacacacataaattaacacccagtgtatatacgtatactacaaaattttagtgttattgatgccagaaaacaaaatcctatttggaatgcgtttaagactttacagttattttcaaaaacaaaattatgcacagagaaggcaatagtttgggtaacagaactctccaacaactgaagctgtaaacactgagcaaagaatctatgagaccaagtaacaaattagcacacacttcagtctcttgaaatgaacaaagagaagaaagagcctcctgaatctctctacattccatcctggaaacctcaatagattcttctgaaagagtaaacatggtgtgtggttgctcgtacatgcaaacatgcacgatcttctctgtttctttttcttatatcttctcaattccaaattctgcaatcactggaacaagaaaagctgccccagtgggatttctgtcatgatttgctttagaaagtactcgaaaccacagatgaccattacttgccaaaatttgagtcaggacttgttgacgcataaggttcaaataatttgtataaacatccaagcacttagacagtatccaagatatttctttttcttggaagaaaaaaaaatcatctgtaaac

SEQ ID NO: 552441 - DNA, 1120 bp, Homo sapiens
ttttcagttatatattgaatttgacttattttataggcttcagcaatgttttatcttcctaagaaacataagaaattattctggaaaaaaaaaacccacttcaataaaatttaaggaaaaccactaagggcatttcgtttttttataaacaatatacacagctgtagcgatgttggcaggaacacatgccagagagctacgtacttgcttctacaaactgttctgttcaccctttatccagtaacagctggtaaaatggtatttaagaacagtttgatttaatctaatgagaaactatgctgcaatgcctgatattgcctgtggaaaataattggacaaacattgattttttatgttgctataataggtacatttccaataaatagaaatttatatgcatacttatttggcaacattcgtctcctgtgaaagctagtgtttggttcttcatacacatatacaggcacatacacatacatgtatatacatatacatgcacaacacacataaattaacacccagtgtatatacgtatactacaaaattttagtgttattgatgccagaaaacaaaatcctatttggaatgcgtttaagactttacagttattttcaaaaacaaaattatgcacagagaaggcaatagtttgggtaacagaactctccaacaactgaagctgtaaacactgagcaaagaatctatgagaccaagtaacaaattagcacacacttcagtctcttgaaatgaacaaagagaagaaagagcctcctgaatctctctacattccatcctggaaacctcaatagattcttctgaaagagtaaacatggtgtgtggttgctcgtacatgcaaacatgcacgatcttctctgtttctttttcttatatcttctcaattccaaattctgcaatcactggaacaagaaaagctgccccagtgggatttctgtcatgatttgctttagaaagtactcgaaaccacagatgaccattacttgccaaaatttgagtcaggayttgttgacgcataaggttcaaataatttgtataaacatccaagcacttagacagtatccaagatatttctttttcttggaagaaaaaaaaatcatctgtaaac

SEQ ID NO: 552442 - DNA, 538 bp, Homo sapiens
taatttaacaaaaaaaaaaaaagtcctctttgaaaacctaaaatcattagagaagtacttttcacttcagctctgcatcagcagttagtttggatcagcagccaggatggggcattaatgctttaggtagagggggtctcaaaatatggctcttggatcagcagcatcagcatcttctagggattggtataaacataaattctcaatgctctccctacctccaggctcacaaaataggcatatctaggggtggggtctagaaatctctgttttaacaaggcttgcaggagattgtggtgcatgcttaaatttgagaactaggtttgtataagtcctttaatttgtttggcaagtactctctgtggcttttactatcaaggcaagtttgagaagttctgtttttaggrattgaggaaaaacttttgccctaggcccactgaaaaatgcttccttcctctggagaaagcgatagtaattcagattctcttccctcatttcagctgtggattcattgaaattagggcagtagagtactaat

SEQ ID NO: 552443 - DNA, 537 bp, Homo sapiens
gtagtagcagcttcctgaaattgctaatcttcgagttgcctcaccctcccctgttttcrgcttttccaacactgtcgtaactgggttctcaaatgaaatcacctctctagtgagctacctggtgagctgggttttcctgacagtgtggttcctcctatctgctacaagtggggttcggggccttgagccacgtcttccctccttgtggacacagtctgtctcccctgcggcctccctggccattttgtcctggcccagcctgaagaaacatctgggcaaaatccttcggggtccctttccccagctgaggagtgggggggcgcaggggaggagccagggcgaacggcagctttcgccaacacctcactgttctcttctcgacatgtttactcacaggctgtctgggaagtgagaatcctccctaatggatgtttcacccaattaaataattaactccaagtgttgctaagcatcctcgcctctcaccttccagtcctggaggcgtcctcatgccaggctgcggctgctgctgagaca

SEQ ID NO: 552444 - DNA, 537 bp, Homo sapiens
gtagtagcagcttcctgaaattgctaatcttcgagttgcctcaccctcccctgttttcagcttttccaacactgtygtaactgggttctcaaatgaaatcacctctctagtgagctacctggtgagctgggttttcctgacagtgtggttcctcctatctgctacaagtggggttcggggccttgagccacgtcttccctccttgtggacacagtctgtctcccctgcggcctccctggccattttgtcctggcccagcctgaagaaacatctgggcaaaatccttcggggtccctttccccagctgaggagtgggggggcgcaggggaggagccagggcgaacggcagctttcgccaacacctcactgttctcttctcgacatgtttactcacaggctgtctgggaagtgagaatcctccctaatggatgtttcacccaattaaataattaactccaagtgttgctaagcatcctcgcctctcaccttccagtcctggaggcgtcctcatgccaggctgcggctgctgctgagaca

SEQ ID NO: 552445 - DNA, 537 bp, Homo sapiens
gtagtagcagcttcctgaaattgctaatcttcgagttgcctcaccctcccctgttttcagcttttccaacactgtcgtaactgggttctcaaatgaaatcacctctctagtgagctacctggtgagctgggttttcctgacagtgtggttcctcctatctgctacaagtggggttcggggccttgagccacgtcttccctccttgtggacacagtctgtctcccctgcggcctccctggccattttgtcctggcccagcctgaagaaacatctgggcaaaatccttcggggtccctttccccagctgaggagtgggggggcgcaggggaggagccagggcgaacggcagctttcgccaacacctcactsttctcttctcgacatgtttactcacaggctgtctgggaagtgagaatcctccctaatggatgtttcacccaattaaataattaactccaagtgttgctaagcatcctcgcctctcaccttccagtcctggaggcgtcctcatgccaggctgcggctgctgctgagaca

SEQ ID NO: 552446 - DNA, 1397 bp, Homo sapiens
ctgttcaagggagaaaattcagtgaaatattcatactgtgaaatctgagaaattatcctaagcaaactacatgctgacatgctttgttactgtatgaatggggaaatgtgaatcggctgagggaagggtagggtgacagccgcatgatggaaatgtcgagagttcccttagcttagttccttacatgtaaagaaggaacaatgtagttgggaaggatcacggggaaggtctagaagactctctccaatgccctgtagcttttcctggcatgtgcgctgtccagaagagaggcccagaggggaagagggaggctgtaagatttgtaggtagagattctgcctttcacaaagccagggaggcactaaccccagctgacacttgtcatgggctgtgagccatgaacaggccaagaacaggggtgaacctcgctggcgctcagcagagaacaagggcacttccaggaaactcccagtggcttccaaactgagaaaagaaccaagggcagagacgctccactcaggccatctcagaacggcttgcttcctggctcccggggctgctgaatcagcatagagaactgagaactcggtcttcttccctgccccttcccttgggtcggaataactcagaccgggatccccactaatggttctggacaaacattgcaytccctctgtaatgtcgagcacacagatgaaaatcaccaggagaatgagaagatagcacagttcaaaaggaggaagcactctgaggaatcaggggaaatattttcctataaaatatagtttctgaaagagatgggaaaattttgagaacacttctgatctgtgtttccaataaacttcaaatgagcatttcttctatgaaattcgagtagagaaccataaagaaaaaaaacaaacagggtagggaaggctgtgagatgatttaaaaaatgttcatttcagaaatggaaacggggaaggggagagcaaaatggacctttcagtaaaaaaggttttataagagagaagtcaaatttgacatcacagaagtcagaggaagaggataagagaaggttaattagagaaaatataggaaaagcatgggctgagatatatttaatttataaatattaggcattccagagaaagaacctccaaaagtggagctatcattaaagaactatttggtggaaattttcccaagttaaagaaagactcttcagaaatctagataaaataatgaagggcttttttttgcctagacttaccctgataatttattttaatttcaagaaaaagcccccacaaattcagtgagggtcaaggcgataaaacttggttcctgtttctttgtaacacgaagacaatgatcatcagttgcagaaatgtgaccaagaaaagtatggtgaccca

SEQ ID NO: 552447 - DNA, 652 bp, Homo sapiens
tgctgggcacagtgtaaataaagtataaagaggggtaaaatatcatgtagggcacaactgttgtgtcttttaaagactaaattgtttttgttcttgaattaccactgatcttttacagactcaaactgaaactgtttattcatacccagagctattatattatattgagaatattggaacatgatggttcaaaacctgtgctttagaatcatactgtattkaaatctcaaacttattgctagtctctctatgagtttgataaggttacttaacctttgaaattcagattccttagtggtgaaatgacaaaaataatatctctcagagtgtttttttctgaagactaaataacatacatataaagtagcatatttcctaaataatgtagaagttcaatatatttaagtattattattattgagaatatgctattattattattgaaaattcattatccattatcttaaaaaatcttagactaaaagattttacttcaaaacatgtggttttaacctggaaagattgtaatttccagtttcctgccatgattaatgtattgtcttttcattttctttttacaaaagcagcaaaagagatgcagagaagttaaggagcttttccaaggtcaaccaataataaactcagaaggcat

SEQ ID NO: 552448 - DNA, 529 bp, Homo sapiens
acaaagtgagctcccttaagcaccctgtgggaaaactaagtttgctaaaagaatataaagtttgttccagctaacacctgaagacagggtccttgtctcagcttctgtggaagagcagcagcctaactctacaataaagagccagttcgcaaatgcacatggcctaatcacattggtgaacccctgctttttgcttttttaaaattcccattttcggccaggcgtggtggctcaggcttgtaatcccagcaatttgggagactgaggcgggtggatcacaggtcaggagatggagaccatcctggctaacgcggtgaaacccatctctactaaaaatacacaaaaagtagccgggcgtggtgtcaggcgcctgtagtcccagctatttgggaggctgaagcaggagaatcacttcaacccgggaggcagaggttgcagtaagccgagatcataccactgcactccagcctgggcgacagagcaggactctgtcccaaaaataaataaatwaattaattaattaattaat

SEQ ID NO: 552449 - DNA, 529 bp, Homo sapiens
acaaagtgagctcccttaagcaccctgtgggaaaactaagtttgctaaaagaatataaagtttgttccagctaacacctgaagacagggtccttgtctcagcttctgtggaagagcagcagcctaactctacaataaagagccagttcgcaaatgcacatggcctaatcacattggtgaacccctgctttttgcttttttaaaattcccattttcggccaggcgtggtggctcaggcttgtaatcccagcaatttgggagactgaggcgggtggatcacaggtcaggagatggagaccatcctggctaacgcggtgaaacccatctctactaaaaatacacaaaaagtagccgggcgtggtgtcaggcgcctgtagtcccagctatttgggaggctgaagcaggagaatcacttcaacccgggaggcagaggttgcagtaagccgagatcataccactgcactccagcctgggcgacagagcaggactctgtcccaaaaataaataaattaatwaattaattaattaat

SEQ ID NO: 552450 - DNA, 529 bp, Homo sapiens
acaaagtgagctcccttaagcaccctgtgggaaaactaagtttgctaaaagaatataaagtttgttccagctaacacctgaagacagggtccttgtctcagcttctgtggaagagcagcagcctaactctacaataaagagccagttcgcaaatgcacatggcctaatcacattggtgaacccctgctttttgcttttttaaaattcccattttcggccaggcgtggtggctcaggcttgtaatcccagcaatttgggagactgaggcgggtggatcacaggtcaggagatggagaccatcctggctaacgcggtgaaacccatctctactaaaaatacacaaaaagtagccgggcgtggtgtcaggcgcctgtagtcccagctatttgggaggctgaagcaggagaatcacttcaacccgggaggcagaggttgcagtaagccgagatcataccactgcactccagcctgggcgacagagcaggactctgtcccaaaaataaataaattaattaatwaattaattaat

SEQ ID NO: 552451 - DNA, 529 bp, Homo sapiens
acaaagtgagctcccttaagcaccctgtgggaaaactaagtttgctaaaagaatataaagtttgttccagctaacacctgaagacagggtccttgtctcagcttctgtggaagagcagcagcctaactctacaataaagagccagttcgcaaatgcacatggcctaatcacattggtgaacccctgctttttgcttttttaaaattcccattttcggccaggcgtggtggctcaggcttgtaatcccagcaatttgggagactgaggcgggtggatcacaggtcaggagatggagaccatcctggctaacgcggtgaaacccatctctactaaaaatacacaaaaagtagccgggcgtggtgtcaggcgcctgtagtcccagctatttgggaggctgaagcaggagaatcacttcaacccgggaggcagaggttgcagtaagccgagatcataccactgcactccagcctgggcgacagagcaggactctgtcccaaaaataaataaattaattaattaatwaattaat

SEQ ID NO: 552452 - DNA, 475 bp, Homo sapiens
gccttcttcggggtgagacccgagactcccagcaggcccttgtgaaatggcttgggtaagggaggcagcccataaccaccagctctcactttctcagtgtgaagctaactgactcatacagggataaagcccactgtttggacctcactttacaacccaccaacccctgstcagttatccgtgtgtgactcaccaggtagtttgaaccatcagtgactcatgagcaccgctgaggttgcaatcttcacctcaaattctgatcttcccaaacttccaaattcaagtcccaaactacagctggtgccttttaaggtgaaaggttttctgtcctcactcagtttattcttaatgcatgttttttcctatgcacctatgaaagggcaaagatccaggccatgaacatgagggcttataaagatgtcggtaatctgtgggtcctggccactgatgggagggctgtgacaagtgttcaccc

SEQ ID NO: 552453 - DNA, 373 bp, Homo sapiens
tttaaaagcaccagaacttattaactgacttctacttttgaaccttaagggtttctctattagttattaatatgagaaatactgcagtgattgtccttgcacataaatctttgtttacacgtctatttttcccatagattagctttctggaatatarattactactcaaagaatataaactttgaaccctccctttaaattttcccatagacttccttggctttccttccattatgacttgctagtgttttgttcacacttcaaatatagaactcatcaccatgtgttgcaatttttttgtctctctcaattagaaaacatatgtcctgaagttagggccatgtcttttgatttgtcatatactcagaatcag

SEQ ID NO: 552454 - DNA, 373 bp, Homo sapiens
tttaaaagcaccagaacttattaactgacttctacttttgaaccttaagggtttctctattagttattaatatgagaaatactgcagtgattgtccttgcacataaatctttgtttacacgtctatttttcccatagattagctttctggaatatagattactactcaaagaatataaactttgaaccctccctttaaattttcccatagacttccttggctttccttccattatgacytgctagtgttttgttcacacttcaaatatagaactcatcaccatgtgttgcaatttttttgtctctctcaattagaaaacatatgtcctgaagttagggccatgtcttttgatttgtcatatactcagaatcag

SEQ ID NO: 552455 - DNA, 1287 bp, Homo sapiens
ctcaatgacaaatcagacatagaccctaagaatatgagagcaaggagggatctgagagactatttggttcaatcctatctttataaaacgagagaactgaggcccagagaggttaaataacttgctaaaattcaggcagccagtcagtggcagaagcagaactaactagttcctaatctcctggcttccaggtatgttcttaacacsttactacaacatgctgtcccctaagaccatgctaggaccttgtgttttctttgctcccatctctatcactcttttcctctcagttgctcatactcctgaagggacattaagagtggcctgtgagttaattttcaaaataaaatagaagaaatggaaagcagcagagtgagaccagactatagggaggactgtgagaaataaggccagagtattttttttatttttattttttgagacagggtcttgctccgtcactagacatgatcacggctcattgcagccttgacctcccaggctcaagtgatcctctcacctcagcctcccaagcagctgggaccacgggcgtgcaccgccacgcctggctaatttttttgtattttttgtagacacaaggtctccctatgttgtccaggctggtctcaaactcctgggcccaagcaatcctcttacttcagcctaccaaagtgctgggattacaggtgtaggccaccacacctggccagccacagtagatttaaggtgatcgatatgatggatctgtagcaagagtcaggtcagaatgcatgtggagaaactatggtgccaggagaggtcagtgggcccatattgggccctcgtgagccctacttatgattaagcacaagttatgctatagaggaagttaataaaaaaggataatgaagccagccagagttggaaaagaaggaaggaatctcagaaaagaacatacatgggggtggctgaggcatgttaatagcacaggggaagagagagaattcatgaatctgttttagggtcctggaagagccccatctctcttattaacaattaagggacagtaatgaattaatgagttaatgggaaaaaaattaaggaacaggctccctcacctactgctttatatgagtctatgctctctgtccccacaaagcccagctaaactaaccaaaacagtctaccatcccatagttcatcagagtatccagaaaccaaaggtgcctaccatgatgatgacaactttttactgagtcaagatgaactctgatgtcagacagacctgggttcaaatatcagccctcc

SEQ ID NO: 552456 - DNA, 1287 bp, Homo sapiens
ctcaatgacaaatcagacatagaccctaagaatatgagagcaaggagggatctgagagactatttggttcaatcctatctttataaaacgagagaactgaggcccagagaggttaaataacttgctaaaattcaggcagccagtcagtggcagaagcagaactaactagttcctaatctcctggcttccaggtatgttcttaacacgttactacaacatgctgtcccctaagaccatgctaggaccttgtgttttctttgctcccatctctatcactcttttcctctcagttgctcatactcctgaagggacattaagagtggcctgtgagttaattttcaaaataaaatagaagaaatggaaagcagcagagtgagwccagactatagggaggactgtgagaaataaggccagagtattttttttatttttattttttgagacagggtcttgctccgtcactagacatgatcacggctcattgcagccttgacctcccaggctcaagtgatcctctcacctcagcctcccaagcagctgggaccacgggcgtgcaccgccacgcctggctaatttttttgtattttttgtagacacaaggtctccctatgttgtccaggctggtctcaaactcctgggcccaagcaatcctcttacttcagcctaccaaagtgctgggattacaggtgtaggccaccacacctggccagccacagtagatttaaggtgatcgatatgatggatctgtagcaagagtcaggtcagaatgcatgtggagaaactatggtgccaggagaggtcagtgggcccatattgggccctcgtgagccctacttatgattaagcacaagttatgctatagaggaagttaataaaaaaggataatgaagccagccagagttggaaaagaaggaaggaatctcagaaaagaacatacatgggggtggctgaggcatgttaatagcacaggggaagagagagaattcatgaatctgttttagggtcctggaagagccccatctctcttattaacaattaagggacagtaatgaattaatgagttaatgggaaaaaaattaaggaacaggctccctcacctactgctttatatgagtctatgctctctgtccccacaaagcccagctaaactaaccaaaacagtctaccatcccatagttcatcagagtatccagaaaccaaaggtgcctaccatgatgatgacaactttttactgagtcaagatgaactctgatgtcagacagacctgggttcaaatatcagccctcc

SEQ ID NO: 552457 - DNA, 1287 bp, Homo sapiens
ctcaatgacaaatcagacatagaccctaagaatatgagagcaaggagggatctgagagactatttggttcaatcctatctttataaaacgagagaactgaggcccagagaggttaaataacttgctaaaattcaggcagccagtcagtggcagaagcagaactaactagttcctaatctcctggcttccaggtatgttcttaacacgttactacaacatgctgtcccctaagaccatgctaggaccttgtgttttctttgctcccatctctatcactcttttcctctcagttgctcatactcctgaagggacattaagagtggcctgtgagttaattttcaaaataaaatagaagaaatggaaagcagcagagtgagaccagactatagggaggactgtgagaaataaggccagagtattttttttatttttattttttgagacagggtcttgctccgtcactagacatgatcacggctcattgcagccttgacctcccaggctcaagtgatcctctcacctcagcctcccaagcagctgggaccacgggcgtgcaccgccacgcctggctaatttttttgtattttttgtagacacaaggtctccctatgttgtccaggctggtctcaaactcctgggcccaagcaatcctcttacttcagcctaccaaagtgctgggattacaggtgtaggccaccacacctggccagccacagtagatttaaggtgatcgatatgatggatctgtagcaagagtcaggtcagaatgcatgtggagaaactatggtgccaggagaggtcagtgggcccatattgggccctcgtgagccctacttatgattaagcacmagttatgctatagaggaagttaataaaaaaggataatgaagccagccagagttggaaaagaaggaaggaatctcagaaaagaacatacatgggggtggctgaggcatgttaatagcacaggggaagagagagaattcatgaatctgttttagggtcctggaagagccccatctctcttattaacaattaagggacagtaatgaattaatgagttaatgggaaaaaaattaaggaacaggctccctcacctactgctttatatgagtctatgctctctgtccccacaaagcccagctaaactaaccaaaacagtctaccatcccatagttcatcagagtatccagaaaccaaaggtgcctaccatgatgatgacaactttttactgagtcaagatgaactctgatgtcagacagacctgggttcaaatatcagccctcc

SEQ ID NO: 552458 - DNA, 1009 bp, Homo sapiens
cacttggtctttatttctaacaccagcagcatgtactttatattggtttcctttgcattttaatctgagatttaaaaaatttagttgaagtccctcttatcacgtgcaacaaaaaagggataccttttattcttttgaaaactgcagtagttcatagtctcatagcctacctttttcatatttttgaaataaaaacataaactcacagctttgcaaatttggttgtcagaattmatacccaaatccccaaacatccagagaacttgacaagtggctgcatcctgggattctcaaaattcataaaaatcaagagttgttttttgtttaagaagacctaaagaatggaagatggaaagtcacatgagacaagcaaatagaatttatgatttgtgtaaaattcatcaaggttttttgtttgtttgtttttgccttttatctaggacaaattacacatgtaaagtccaggagtgagaaaaagagtccagaattacagggccaattaaagtcctgagggattacctcaattctttaatctttttttttctcctgggcttttttcttgggtatagggtgagatattacatattaattcatttttctcatcatatactatctgccagccactcaggggtacatgaatgatttatgaaaataaagatataatttttgccctcccagtataatgttgcttgtagggaaataaataggaaattagattttgacatgataaatactttggtagtgataaaaatatagttttgcagagttggggagaattgagctcagaaaaattcctctgagggtatgtgtctttattttcatttgtctttgaataggtagctttggcaatgatttttagaatgcaagggattctgactctccctttactctctcagcatattcttttgcctgtggtaacatactaagaaaatcacagagcaggcccctaggattttagatgactctatactcaccatcaaaatgaaatttcctccttttcaaaataatc

SEQ ID NO: 552459 - DNA, 878 bp, Homo sapiens
ctgcattttggaaacagatttgggtgatgtgagaaagatgtactcaaaagaaaatttaagtggatagaagcttaaaaaaacccaaagggtcaaaatatgcaaatgactatattctaatgactttagtaaagggataagagaattctagaagacataaaatagatatgacaatggatgcaactctaattaaaagtctgaggaaggacttgcacacctccagtgagtcagagcagccacctctccggtggttccatggtgtaatggtaagcaccctggactctgaatccagcaaccagarttccagtctcagcgtggacctttacctgaagtccaaataaaatctcttgctttggaagcccaaaaaggcaaactttggggtggaaagggagtgcctctgacaatacaaattatgtacgactataattttttaaagttgtattgtttctcacagactatagaaatctcgaaatgtgagatgctaaaaagaaataatttgtaatcagtactttcaaataaattaaatataactttattaaatagtatcattagagtaataaagcataataaaatgaatctgagggaggctaatgagaacaaattctgccatttttattaggcaataccttcaagtcaagttgaaagataacttttttttggcttcaaaaatattaaaagcatataagtttgctattagtaatttgttagtaattatttattaataaatatcttatgaatattatttgcaatattattagtgtatctttaaaatacttttaaagtgacatttttctcattgaaatccattgcaagtaaaatatgtatttagttaacaaaatcattaagtttaatttttatatagattttatcacaatattttc

SEQ ID NO: 552460 - DNA, 878 bp, Homo sapiens
ctgcattttggaaacagatttgggtgatgtgagaaagatgtactcaaaagaaaatttaagtggatagaagcttaaaaaaacccaaagggtcaaaatatgcaaatgactatattctaatgactttagtaaagggataagagaattctagaagacataaaatagatatgacaatggatgcaactctaattaaaagtctgaggaaggacttgcacacctccagtgagtcagagcagccacctctccggtggttccatggtgtaatggtaagcaccctggactctgaatccagcaaccagagttccagtctcagcgtggacctttacctgaagtccaaataaaatctcttgctttggaagcccaaaaaggcaaactttggggtggaaagggagtgcctctgacaatacaaattatgtacgactataattttttaaagttgtattgtttctcacagactatagaaatctcgaaaygtgagatgctaaaaagaaataatttgtaatcagtactttcaaataaattaaatataactttattaaatagtatcattagagtaataaagcataataaaatgaatctgagggaggctaatgagaacaaattctgccatttttattaggcaataccttcaagtcaagttgaaagataacttttttttggcttcaaaaatattaaaagcatataagtttgctattagtaatttgttagtaattatttattaataaatatcttatgaatattatttgcaatattattagtgtatctttaaaatacttttaaagtgacatttttctcattgaaatccattgcaagtaaaatatgtatttagttaacaaaatcattaagtttaatttttatatagattttatcacaatattttc

SEQ ID NO: 552461 - DNA, 980 bp, Homo sapiens
aacccagaagtgaagttcaatattgctaaattttttttttcattgtgtcagagaagtgtagcatgattttatatctaaaaggaaagaaaaattctgatgatatcatccagataatgaaatgatcacaaagcaaagcttcaggaaatataagctattttataagttttttcagtaaatcttacaggttagaaaaagtcacaagacagaaagmattctgcctgtgtccaatctttacaagtatgacaagtatttgaactgaatcagatttgggcactgtcaactataaacatagcattttctttagcttcttgtagaaaaaaatatccagtacctctttgtatagtatcaattttcaaatgaacaaaaataccgcacaatcttaactattccattcacaaatttatagaggagaaaatatttggtgtgttaaatttttcatgctgcactgaacaaagaagcagttagttaatatctgtagtgagttattttatattcagaacaagtgactaagacatttaaggtagatagaaatattttactaaggttaattgccatctgaaaaatttataatctatgaaattcagtccaaaactaggttgctgtgtattttttggctgctttgagtttaaaaaacatacaacattgggttatttactttttttttccttccccttggttttttgggcgtttaggctagcttccagggtcctaggataattcacattaattatttttagacaggataattataatatctaaaaaacatattaatttaagagatagtttaacttagacatataaatttatctaattgttttgccaaatatctgcatatttattcatataaattaccctgtgtttttctaatatttgtagtcattttaaaagtagtgagaggagagaagtaccattggtgacctcaagagacatgaaagattgaattctgtcctggtctgaaaaataagaaagcaaaacttctg

SEQ ID NO: 552462 - DNA, 980 bp, Homo sapiens
aacccagaagtgaagttcaatattgctaaattttttttttcattgtgtcagagaagtgtagcatgattttatatctaaaaggaaagaaaaattctgatgatatcatccagataatgaaatgatcacaaagcaaagcttcaggaaatataagctattttataagttttttcagtaaatcttacaggttagaaaaagtcacaagacagaaagcattctgcctgtgtccaatctttacaagtatgacaagtatttgaactgaatcagatttgggcactgtcaactataaacatagcattttctttagcttcttgtagaaaaaaatatccagtacctctttgtatagtatcaattttcaaatgaacaaaaataccgcacartcttaactattccattcacaaatttatagaggagaaaatatttggtgtgttaaatttttcatgctgcactgaacaaagaagcagttagttaatatctgtagtgagttattttatattcagaacaagtgactaagacatttaaggtagatagaaatattttactaaggttaattgccatctgaaaaatttataatctatgaaattcagtccaaaactaggttgctgtgtattttttggctgctttgagtttaaaaaacatacaacattgggttatttactttttttttccttccccttggttttttgggcgtttaggctagcttccagggtcctaggataattcacattaattatttttagacaggataattataatatctaaaaaacatattaatttaagagatagtttaacttagacatataaatttatctaattgttttgccaaatatctgcatatttattcatataaattaccctgtgtttttctaatatttgtagtcattttaaaagtagtgagaggagagaagtaccattggtgacctcaagagacatgaaagattgaattctgtcctggtctgaaaaataagaaagcaaaacttctg

SEQ ID NO: 552463 - DNA, 534 bp, Homo sapiens
caaatattgactatcaataactctggcactctatgccacataatgggggcttaaaaatatttgtcaaattcctgttttctaactcaagctttacaagcctcagtttctgcatctctaggtaggggatgatatcgacttcacgggaatgttatgagcactaaacaaacccacatctggaaatattaaccaatgcctggcatggagtagagagttckataatgaacacaacttgatctgctattccatttggatacctaattaggcgttattaatttatccgcccatctcttaacctctgcatagattcatcaagcactcattttatgcttattgtcccaagcacaagctatactcattcatatctccatactttagcttataatgtgtttccatcgaaatgtcttttttatattcctttttggccacctaaatgttgttattattttagaacaaacttaaatgtcacttttttcatgatgtcttcccttataactctcatgttctctttcttttatctgtttctgttactatgtg

SEQ ID NO: 552464 - DNA, 656 bp, Homo sapiens
ttttactattttcaggattattttcatcaatagaaaagcagctaatatacattttataaaataaaaagacattcctccaaacaaaataaattcctccttttttacctgccgacattctttgttatctttgagaaaaagtcattgaaaacattttcttctcaatctttccaattccctctcttcccattctttctaaaacacacttaaatcttatttttgcctttagcatttcactaaaactgctgttgtccctgtgacagtgatagggtgaattatttgctcatgatttgttctcctttcctttttcttggcatggctcaccacctactggtgttggtcttggctaagtggtttactttggtcaatggaatgtggaagaatggcctgtgtgtgagttttgagccaaggtaagtttctaccagccttcttgagayatgagggaggcatactgttggtagccatagctccttgagctccttcaatcctgtcccaggattataatgtatgaagtagacctaaactagacctcatatgtggcttatgagaatgattttctgagttgtcttatcttttatgtatcttcatacccactgtctatttccagcaattgaatcctgtgataatttacttggtgtctgtagataacaatagacctg

SEQ ID NO: 552465 - DNA, 675 bp, Homo sapiens
tgaatgtgacgtgttgtcttgacctgtgaactagccatttcttgcttcgtggactacagaacagaagatgctagtctaaagatgagatggaaataagaaaatgcacagagagagacagaaatggagaaggaagaaaggggaagagaaaagagaaaaaaaagggaagagggagaggagagatggggagaaggggaaagagggagggagagagcgagagagagagagagcacttacaactttctagttttgtttctagatccttcctaaggaatagtgcccctaaagtgtctgaaatacacacctgaatccttataataaacaccactttctgataaaattaactttacttctactgcttcctacctaataggggccctaataagaatggggmagagatgtttctattacggtaaaggccaagtttaaggatgcccaaatagacagcatgtggagttccaggtagagatcagagcagagacacaaagccttaagcattagcagcacataggtgaggattaaatgccgattaaaaaaaaaaaaaaaagccactccaagtgaatttggagtgagctgtttcaggagacgagcataaacccctgttagcagtttctgcacaagaaagaaggaagattctgaaactgctgtaaatcagtatgttgctaaaatacagccctc

SEQ ID NO: 552466 - DNA, 556 bp, Homo sapiens
ttttaaaataaggatagtatcttctctacataaaatttactttcatttttatactaactgaatcctatgaaacaactgtctttggctactataaattgctctctttcttacattatgtattttacatgtacctatttccccatagaaaatagattttaaaaacacacacacagaatatagtgaatattaagtatattaatttataattacttgggtaagaaccacacaggagagagagaaagaggaagaagagatctaatcaatgatacatctataaatmtcatatatatatatggtctgattttttaaaaagtatacggatggcaaatacagacagcctggcaaataaaatagcagattttcacttatacttcccaactgtactgctaccattgagtaattcaaaatctcttagactaacaggagttcttaaccttttttacaccatgaaccccatcaacaatctggggatgtcaacgaaccctttttttccaataataatttaacatttgtaaataaaatgcatataataaaggatatcaattaatttttaaaa

SEQ ID NO: 552467 - DNA, 1286 bp, Homo sapiens
ccaaaacccattactggatttgggctaaaccacttgaattcaaatcctgggaattcacctctctgaacatcagtttcaacatgggatcttggtggcaactaaagtaaatgaggttgtttgtatgtttgacaataataaggactcaaatgaagtttttgtcatcatcatcaccatcatcatcatcaccattactcttagttcatgcacacacattttttatttgcaattcttaggctgtttctatcccagctattcycacttcagcacagcagtcttactctgtggctgagaccctgggaaaaccagttccttgtctcagtagccaggacccctgcaccacaggcctcagcaattaccagctgtgatttgaagctagggagatcctcatgcagctgctggaaggaaagacgaatcctcattcttaccactgtaactccatcagcagatatgtacatgggcattacaaacaataactgagaacctgttactgtcaaacctggagatttaattctatggtattactccaaaaaatgagttcagacaatagtacctgcttacagagcagtcttttctaagctcactgaatgtatcaaattcatctcttcatcctaccacaatgccttcattacttggtaactgcaagagagactaaggactcttacatttagtgaacactagtgatgtttgaataaggggaagaaagtctgactttatgccctggataaaaggcaagtaaggacaggcagaccagctttttccagtttccaattattctattcatatttcactggcttctaggctttctcgcttttaagatacagaaacatctatggttgtttaaacaagaattactggtaaaagacctataagcttatgtcttcacattttgagaaacaaagcaaggtaacttcccatgagattagttattttttaattgttgtattctttcctcatggttatacataacattgaaattttcaggaacaagaagcccctaaagggcacaactgatcattggctttcagggcaaactgtgctttgtaaaaatgcattcaaagctaaggaggaaagaccagatcctttaaaaaataactgaatatgcttttctgagtaagccccaatactgtttttgtgatcgacagcaaaacaggaacctattactgcccacaaataattttagaaatagtggttgatgcatgccgtaattataaagtttgcttgtgtcccagtggcacttggggttctaatttttggctgacagtttcttaatcaagttttcacaacaa

SEQ ID NO: 552468 - DNA, 1261 bp, Homo sapiens
tgcaaatgtctattttaaaagggcttgtaattacaagtaattatatatcaacaaagtacaataagtagtcacaattatactgccattactagtaataatttactttttctactaaaaattcttcgatatataattataatgatttattcaatgtaatagttataaaataaacatcagaaacaaaaaataataactacaaatgagacagactcactgagattaaatatcagtaaacttcaataagtacatctgcgaattaaatcaataactcctgtcttcaaatctagtgaactattctcmaccataaaaagtatcacagaccgctgaccacagtccaaatgttaagttgaacccacaggagagtaatgacgctcataatggaagtgtgataacactacaatgtatcaaaatcttctcatattaggggccaaacagattcctgtcaaatatgaaaatacaaatactttttccttatctggaagggattaggaataaggtcagctgagtggggaggtgggagacctttcaagaaaagagtaaatactgtatgccactaaacaatgaaatagagaaacagaaaaaccactgagtggacaaaggtcactgaggcggcagatattgagacaaccatgtatctgtcactcctctgataggttcttgaactacctggaaactggacaaattttaagcaataatacaagttgccaggttttaagaactacctataagacaacaattaaaacatgcatcattagggtggccctcctactacagactagagcaggttgccttctgtatgcaggcctgccaccttgagcccctgtatcataacttttatctcactttatgacaattaataataaagaataattgataataagagctatattcccggttacacactaaatgctgaaagggcagggcccatgtctgtgttgtgtgctgctacgttcccacagctcatagatacatagtaagacacccaataaatacttcctgaatcaaacacaaagtagatatttactgcaatattgttaactgatatcatctccagaggactaataagtcaggcaaactttctccctctccatttcctgagttacctcaagagagcttagaaaggctaaacacctacctaatagttttcctttgttccttacattctaagccaatgatatctgtattcacatctggggttgtcagttgagagacaggtataacccctagcaaaggtggctagagatgagatatgtaaagcatg

SEQ ID NO: 552469 - DNA, 652 bp, Homo sapiens
gttagcaatcccaattcaaataattttgtctataagacatacacagatgtgtgtgtgtgaagatatgtgttacagtttatttataatactgaaaatctggacaacccaaatggtcatcaataagagactagttaaataaatgatgatatgtcrtgcaaggagaattatgcacctcttagtcattttggcaaagtaaaaagatctttataatatattcattaaaaataacagtatatataaaatgaatgacttcattggttttaaatggattacacataatttaatatccttttgtgtgtgtaaaaagttctagaaagattcattaaaagttgtttttatattggtgggggtagagctagggcatacttgaaatgggaaaagtttcaattttcattttgtatctttctgtactgtttgcgtttttaaatcatgagcataaatttttaaaaacaatatttaaaaagttgaaaagatgtttctctgaaaaagtatagtttaaaatggaatctctttaacattaaaatacaaatccatacgcagaaactatagtaaaatggaatcaatacattaataattttttatcctctatgaccaactagagtctatcccacagatgtaatagaagtttaatattagaaaatctgtcaacaaa

SEQ ID NO: 552470 - DNA, 571 bp, Homo sapiens
tttgagtcattaggctatgtatggtatgatactataygttatacgatgtatatatacctatgtgtgtacttctgtaagtacatatttatgtatattttaatttttccggtcgacacattccatggtatatgtgactgctggcatcagaaaggcaatctctctctcttcctctctctctctctctctcgcacacacacacacacacacacactcacacacattcaacatggagctatttaatgcttgtgtctgtagactatatttaaatacacatccatgctcttgtaacaaaaatgtcactttctatttggccccttgcagttatgacacacctttgcccccattatctcatttgactcatggatatacacttgtttcctcctgtagatgcagtttaccaccccatcttccaggtaaagtgattcctgaaatgtatcagcacctctaacgtgaaaacaaatgcagcccaatctgctgctgtctgtgtctgcccttgtgctcacagacccactccaaaatgtctgggtgcagataggtccagacctggaggacagaatccctgccagcatgg

SEQ ID NO: 552471 - DNA, 571 bp, Homo sapiens
tttgagtcattaggctatgtatggtatgatactatatgttatacgatgtatatatacctatgtgtgtayttctgtaagtacatatttatgtatattttaatttttccggtcgacacattccatggtatatgtgactgctggcatcagaaaggcaatctctctctcttcctctctctctctctctctcgcacacacacacacacacacacactcacacacattcaacatggagctatttaatgcttgtgtctgtagactatatttaaatacacatccatgctcttgtaacaaaaatgtcactttctatttggccccttgcagttatgacacacctttgcccccattatctcatttgactcatggatatacacttgtttcctcctgtagatgcagtttaccaccccatcttccaggtaaagtgattcctgaaatgtatcagcacctctaacgtgaaaacaaatgcagcccaatctgctgctgtctgtgtctgcccttgtgctcacagacccactccaaaatgtctgggtgcagataggtccagacctggaggacagaatccctgccagcatgg

SEQ ID NO: 552472 - DNA, 571 bp, Homo sapiens
tttgagtcattaggctatgtatggtatgatactatatgttatacgatgtatatatacctatgtgtgtacttctgtaagtacatatttatgtatattttaatttttccggtcgacacattccatggtatatgtgactgctggcatcagaaaggcaatctctctctcttcctctctctctctctctctcgcacacacacacacacacacacactcacacacattcaacatggagctatttaatgcttgtgtctgtagactatatttaaatacacatccatgctcttgtaacaaaaatgtcactttctatttggccccttgcagttatgacacacctttgcccccattatctcatttgactcatgratatacacttgtttcctcctgtagatgcagtttaccaccccatcttccaggtaaagtgattcctgaaatgtatcagcacctctaacgtgaaaacaaatgcagcccaatctgctgctgtctgtgtctgcccttgtgctcacagacccactccaaaatgtctgggtgcagataggtccagacctggaggacagaatccctgccagcatgg

SEQ ID NO: 552473 - DNA, 1281 bp, Homo sapiens
gataaccctccaaacagattcatagtgatgtctgacttactcctatcctaaatttgtctggattcaaatgtattaaatccaatagtgttttttcatgatttctgttagaaatgagatttatgctactgcaaccagtgccagacaatgccttgatcttgcccccacaaaatctctactctctctcttcatgcttcctaagagatgtagaaacacaccacacacaggcagtgaccaatgtgaaaaaaataccattttgtcataacttgagtcacagyctaattccctaatacaggcatgtgtcacctaacaacagggataaatttggagaaatgtgttgttgggtgatttcatcattatgcaaacatcagaatgcacttacacaaccctagatggtatagtctacctcacccctaggctatatggtataacttattgctcctaggctacaaacctataaagcacgtaactgtactgaatactgtaggcaataacaacttaatggtaagtattcatgtatctaaacatatctaagcatattaaaggtacagtgaaactacagtcttataaccttatgggaccatcatcatataaggtgtccatcatcgactataaggtcattttttggtgcatgactgtacagagctttctggtaaaagatagtttagtgccggcagcccaggccagaatctaatgcaggacctttactttttcctaagtctaaattcaaatcttttggccagtcccataataaatgaattcatggcgatgattgtctaactcaggcaaacatcaagagaggaaatttaaagaaatagcccatcccctaaagttttaccaggctcaacgtatccacctggctcctagaagcaatcaagttgaagagaaggggcataggctcatggtcctgatcacagtaaacacagttgaacgaagtcttaagctaggatcattcattcattcaacaggttttgagcatctattatagaccagacaccaataatagagatataaattgtcaattacctctatggagaagtggagccaacctcgggaaagttgaagcaatggcccttatatctacgacacacaagctactttttcagtgatgaagataactcatccacgaataagatttggacttatcgtcaaggaatatacaatccaattggaaagaaaataaaaaatactaagtaaacataaggatgaagctgtcattccctttaattcagtcatcccacttttagattctctcttaaagtaatccaaaacaccaaaacattt

SEQ ID NO: 552474 - DNA, 535 bp, Homo sapiens
aaaataatcccaccctgggcatagcctggctcttgtttgaaatgtgtggtacttctatgtgacaagatatagaataagtcattggaagaaaaactgtcctattactatattttatataaaagtgtatcttgtgttataatgggcctggtatacagagggtgcttagcaaatcttccgcagagctgaaactgagctgaagctacggcccccttctctgcttgctctcctttattctctagagtgctgcttcccaatgcgtggtccatggaccaagcagcttcagcatcacctgagcacttgtcagaaatgcagcacctaggcgccgcaccagacctgttgaataggaatctacattttcacaagattccagrtgatttgcatacacagtggcatttgagaagcattaatccaggggcttctttgcagtcagtgatggtgatttgccaatcattagcatttcagaaaccccaggccgaaaccatacatttatccttagctaggtcggtatcaagtttctctgctttcatccagaatc

SEQ ID NO: 552475 - DNA, 535 bp, Homo sapiens
aaaataatcccaccctgggcatagcctggctcttgtttgaaatgtgtggtacttctatgtgacaagatatagaataagtcattggaagaaaaactgtcctattactatattttatataaaagtgtatcttgtgttataatgggcctggtatacagagggtgcttagcaaatcttccgcagagctgaaactgagctgaagctacggcccccttctctgcttgctctcctttattctctagagtgctgcttcccaatgcgtggtccatggaccaagcagcttcagcatcacctgagcacttgtcagaaatgcagcacctaggcgccgcaccagacctgttgaataggaatctacattttcacaagattccagatgatttgcatacacagtggcatttgagaagcatyaatccaggggcttctttgcagtcagtgatggtgatttgccaatcattagcatttcagaaaccccaggccgaaaccatacatttatccttagctaggtcggtatcaagtttctctgctttcatccagaatc

SEQ ID NO: 552476 - DNA, 1297 bp, Homo sapiens
tactcagttgaaacaaatgcagttgtctagaaattcctctgcatttgttcatgaggcaattaaagctgatgggagaggcagtgattatggtgttaatgattaaccaaaagtagatctgtccaaagattccttttgtcgtggatctatttttcctgaccttatgtaagcaaaaagtactcatgtggctgggttccatctgtatacataatttcaaacatgctgtagtttagtttcaaataggggtattgttaaaattatttgcaatcaaataactcagcaaccaaagatgaataaaatgtaaactcttttcaagttgttcacaagggagatgagatataaaatcacttgttatgttctctctgctataaatatatttaaggaacaaagcaktctagaagctcagctaaaggaacaatgattgtcaggtgggggattcgaggaaggcttcctgagagaggaactactccagacattgaataatgttattaccaagtccccgctgttcatttgatgggtcataaactgatagaaatgaaagttttgtttttggtttttgctttcttttaggagtcaatatagagaggaagggaagtgagatgacagcacctagaggtctatcaagttgttgctctaaattttgcaagtgacaaagctgcctatggtggttgtaaagtctgacaggctcttagagaaaggatgaggaatgtattgttcttgggctatattgctaagaccaaaagaactatcagataagaaaaaaaaaaatgaactacagacatgttcctggaccatgcttgctgtctcaccctcattctaaatggtgcttgctgatgagagatgaaaaagaggaaggacagagattcaactcaaccaatagtattggtcctgcctgctttgtacaggcattttggtgtttgtatccaatgtgactctctccaaatatataggctcctcaggtgtggacaaaatgcatgaagggctttggatggaggtttcacactggaaatatgtccatctttctctgccaaggataagctaccaacaaagctgtcttccttccccatacttgggccttgatttgcactcccttcccacgataacctctctcttgtctctggacaggcacaatgacctgccagccttctgcttagtggccagcttttactaatttccccttccatctacctttcctaccctaaaaaccacattaagcagagtaccaaggacctctctacagcccttgaggatgggaaattatgcctgcctctcttaaaagagatctagatgctcctggcca

SEQ ID NO: 552477 - DNA, 637 bp, Homo sapiens
tactacatagattaatacacactgttgttatctgctagtgaaattaatactctacattatttgcagcaaattactcagaaacctagtttcatgttacttccctgctcaaaaccctctwatgcagtggttcttaaacttaagtgtgagtactgggcctctcctctggggtttctgaatcaggagatgtggagcagggcctggaactttatatttctgacaagttcccaggtgatgcttatgctgtttgtctgagaattgcatgttgtaaatcactactctagtgacttttcccttgcaataaagtccgtactccttattcttgacctacaaggccctgcctgagctaccccctgttctccctgccctcattggcataagtctgtattcctgatgtggcgtttttttctggtcatggaatagtccaagttcattaccacctctgggcctttgatgaaatgtcttccttcagatgtttcaagtggctgtggcttcttcagtctcagctcaaaagtccccttcaccctgaggtgtctttcctaatcatgatcagccatcctcccctcatcacttccataattctttatcatatcgctttatataccatgctcatttgtgtgctaccagcctctcttctctg

SEQ ID NO: 552478 - DNA, 637 bp, Homo sapiens
tactacatagattaatacacactgttgttatctgctagtgaaattaatactctacattatttgcagcaaattactcagaaacctagtttcatgttacttccctgctcaaaaccctctaatgcagtggttcttaaacttaagtgtgagtactgggcctctcctctggggtttctgaatcaggagatgtggagcagggcctggaactttatatttctgacaagttcccaggtgatgcttatgctgtttgtctgagaattgcatgttgyaaatcactactctagtgacttttcccttgcaataaagtccgtactccttattcttgacctacaaggccctgcctgagctaccccctgttctccctgccctcattggcataagtctgtattcctgatgtggcgtttttttctggtcatggaatagtccaagttcattaccacctctgggcctttgatgaaatgtcttccttcagatgtttcaagtggctgtggcttcttcagtctcagctcaaaagtccccttcaccctgaggtgtctttcctaatcatgatcagccatcctcccctcatcacttccataattctttatcatatcgctttatataccatgctcatttgtgtgctaccagcctctcttctctg

SEQ ID NO: 552479 - DNA, 637 bp, Homo sapiens
tactacatagattaatacacactgttgttatctgctagtgaaattaatactctacattatttgcagcaaattactcagaaacctagtttcatgttacttccctgctcaaaaccctctaatgcagtggttcttaaacttaagtgtgagtactgggcctctcctctggggtttctgaatcaggagatgtggagcagggcctggaactttatatttctgacaagttcccaggtgatgcttatgctgtttgtctgagaattgcatgttgtaaatcactactctagtgacttttcccttgcaataaagtccrtactccttattcttgacctacaaggccctgcctgagctaccccctgttctccctgccctcattggcataagtctgtattcctgatgtggcgtttttttctggtcatggaatagtccaagttcattaccacctctgggcctttgatgaaatgtcttccttcagatgtttcaagtggctgtggcttcttcagtctcagctcaaaagtccccttcaccctgaggtgtctttcctaatcatgatcagccatcctcccctcatcacttccataattctttatcatatcgctttatataccatgctcatttgtgtgctaccagcctctcttctctg

SEQ ID NO: 552480 - DNA, 637 bp, Homo sapiens
tactacatagattaatacacactgttgttatctgctagtgaaattaatactctacattatttgcagcaaattactcagaaacctagtttcatgttacttccctgctcaaaaccctctaatgcagtggttcttaaacttaagtgtgagtactgggcctctcctctggggtttctgaatcaggagatgtggagcagggcctggaactttatatttctgacaagttcccaggtgatgcttatgctgtttgtctgagaattgcatgttgtaaatcactactctagtgacttttcccttgcaataaagtccgtactccttattcttgacctacaaggccctgcctgagctaycccctgttctccctgccctcattggcataagtctgtattcctgatgtggcgtttttttctggtcatggaatagtccaagttcattaccacctctgggcctttgatgaaatgtcttccttcagatgtttcaagtggctgtggcttcttcagtctcagctcaaaagtccccttcaccctgaggtgtctttcctaatcatgatcagccatcctcccctcatcacttccataattctttatcatatcgctttatataccatgctcatttgtgtgctaccagcctctcttctctg

SEQ ID NO: 552481 - DNA, 1009 bp, Homo sapiens
gctggaagccatcattctcagcaaactattgcaaggacaaaaaaacaaacaccgcatgttctcactcacaggtgagaattgaagaatgagaacacatggacacaggaaggggaacatcacacaccagggcctgttgtagggtagggggaggtgggagggatagcattaggagatatacctaatgtaaatgatgagttaatgggtgcagcacaccaacatggcacatgtatacatatgtaacaaacctgcacgttgtgcacatgtaccctaaaacttagagtataataaaaaaattaaaaataaataaataaataggcatgtgtttctatgtctatttttctgcttactagctttgttatcatggaaataacactcaacctgagtttattatacatccatagagataataatacttaattcgcgggactgttgtgagaatcaagaaaaacggcatttaaggtacctgamaacatacaagacatatattattaagtaatggaacagggagggaactctaggtctgcctgactccaaaattcgcccttttcaccaccttattacattgacaatcaagtatatttttgcatcaaaatttagttaagtttatattcttattcttatgaatgataattttgtagtttatattaccttttcaaattatataaagtggtttacagatgcatcatggaaaaaggcaatcaacactgagcatcttccaggtaggatgctaaaccctttatatttacatttaattttctcaaacttataagataagtaggtattaacccacttttacagtctaggaaactaagactcaaattaattttcccaagtctttacaactcttgatcttagccaaaaggtcaagaaacaatacccaagtctttaagattggaagggaacagatctaagattcaccttcaagtcaatctgattttgaagcctggtttcttcagtacatacccctgctcagtgcagcccatatttctttgttcacccagaataagat

SEQ ID NO: 552482 - DNA, 1053 bp, Homo sapiens
caaatccccacaataattgtgctctccctcccccaagaacacagaatctctctccatgctgcattgccactgctgtggggatgggggagggatggcatcagtgatttaagattgtctttcctacactcttcagtgcctctttcagtggtgtgaatttaaaacctggatttttggttcttatgacggtacatttttgtgtggatagttgtacagtttggtgctcctgcagagaagatgattggtggaggctctatttggccatcttgccatcaaggattcttctctaagattcatgagacttaaaagcaacgtttcacaarggtctcattgggtctctgctcaaatctgccttgataactgtgtaaaatatcaccaccactggttcttcctaacactcttaccaagctttatttttctctatagcacttaagacctggtgtagcatatatttaattgtatttttattcattatctgcttctccttattagaacgtaaactccacgacagcatgcactatggtggttttcttcacttctctatcctctcagtgcctagcagagtggacaatcattatttttaaaaattatttgttgaatcaataaatataataggcaaccaataaatgtcattttcattctcttccccttcttttatgttagatgagaagttttattatctttaaattatttgaaatagccttatcaagagaaaattcagttgttatctatgaacacttaaataaactggtcagttaactgaaataactaataagttatatgaaacaactgttcaattcataaaattgaatttcatatcttcatccctttgttcatggtttttatgaattgtgcccaaatgatttggatcattgctaaggaccaataactgctgggtggttccaattctccctttctaaatgggggtttttgtggcaaatatcctgtttcttctctacagttgtataccgggtgggtgaatgagagggcagataacttgtctgttagtttataggtgaccacaagacaatgaattatatctgaatgtgataaaag

SEQ ID NO: 552483 - DNA, 1053 bp, Homo sapiens
caaatccccacaataattgtgctctccctcccccaagaacacagaatctctctccatgctgcattgccactgctgtggggatgggggagggatggcatcagtgatttaagattgtctttcctacactcttcagtgcctctttcagtggtgtgaatttaaaacctggatttttggttcttatgacggtacatttttgtgtggatagttgtacagtttggtgctcctgcagagaagatgattggtggaggctctatttggccatcttgccatcaaggattcttctctaagattcatgagacttaaaagcaacgtttcacaaaggtctcattgggtctctgctcaaatctgccttgataactgtgtaaaatatcaccaccactggttcttcctaacactcttaccaagctttatttttctctatagcacttaagacctggtgtagcatatatttaattgtatttttattcattatctgcttctccttattagaacgtaaactccacgacagcatgcactatggyggttttcttcacttctctatcctctcagtgcctagcagagtggacaatcattatttttaaaaattatttgttgaatcaataaatataataggcaaccaataaatgtcattttcattctcttccccttcttttatgttagatgagaagttttattatctttaaattatttgaaatagccttatcaagagaaaattcagttgttatctatgaacacttaaataaactggtcagttaactgaaataactaataagttatatgaaacaactgttcaattcataaaattgaatttcatatcttcatccctttgttcatggtttttatgaattgtgcccaaatgatttggatcattgctaaggaccaataactgctgggtggttccaattctccctttctaaatgggggtttttgtggcaaatatcctgtttcttctctacagttgtataccgggtgggtgaatgagagggcagataacttgtctgttagtttataggtgaccacaagacaatgaattatatctgaatgtgataaaag

SEQ ID NO: 552484 - DNA, 301 bp, Homo sapiens
tatattccatgtttaaaaaaataatcatgtgccctgctttttagagaacaaaatgcataacttaaatggaaagtttcaacaattatcaagtctaytgttctctaagctatggattttaaatttaggttttaagcatattttattcagtctgatttccctcttcatttccacctatgttcaaaagcaaattgttttctaattgtctatagaggatcagggctccctcagtgcatcttcaattatttggaatttattttatatttgttctctaagaatgtctatatattcactgaaaggttga

SEQ ID NO: 552485 - DNA, 1096 bp, Homo sapiens
ttaaaataacaatggaaatagaaatttaaatttcaaacatattgtgtaaaactatttgataatgacctcacaacacatttgtagaactacaaggatccagaaagcccacttttggtgaaaagatgatgattctaacgtggtcatggtgagtttgaattgtccataacactagccacatatatgcttttcttattattcttaagatataacaatcatctctaaagatattcagcttacatataatagaaaacatatacattaaaataaaaaattttaaaaacaatcctcaaattgatggtgatatctctttctcattctctcatccatttttctgtgtacttaaatatttatattctaatttggcaaatatataagactgcatcagtattagcaacatatattgattttaatatttctggaaaaaactggcaatatttgtctctttgtaatcgacttctcaatttatttaatatagatttatcctaaagggatatttagatataactggaaatattcatagtatctgaatatagaagtatacatagagaataaatatcacaaacatgactatataaatgtaaatattatttaaaatgtttagcagtagccaaataaattatgacagagtacaatatagtcattaacataattctccagaaatatatgtaataatgccttatccatttattgtatactttatataaatttatggctcctatatctcctatatgctagactatattaaatattggttatgcagcactgagcaacgyatatttggttaacattctttccaaattatatatgtcaggagggaaacaattaaataagcatcagataaataaacataaataaaaatattcatgggtatgctacataaagaataatcaaatcttgaagcttatgaaaagtataatataaatatttttaaaagtctatattaacatatttttagaagacagactgtaaggcaaggtgaaatagatgtaactgcaggaaagaccttgccttttcttatagtatagtaccattatgtgaatgcacacgtatacatataataacatacatatgcagacacatacattatctgggaatc

SEQ ID NO: 552486 - DNA, 1096 bp, Homo sapiens
ttaaaataacaatggaaatagaaatttaaatttcaaacatattgtgtaaaactatttgataatgacctcacaacacatttgtagaactacaaggatccagaaagcccacttttggtgaaaagatgatgattctaacgtggtcatggtgagtttgaattgtccataacactagccacatatatgcttttcttattattcttaagatataacaatcatctctaaagatattcagcttacatataatagaaaacatatacattaaaataaaaaattttaaaaacaatcctcaaattgatggtgatatctctttctcattctctcatccatttttctgtgtacttaaatatttatattctaatttggcaaatatataagactgcatcagtattagcaacatatattgattttaatatttctggaaaaaactggcaatatttgtctctttgtaatcgacttctcaatttatttaatatagatttatcctaaagggatatttagatataactggaaatattcatagtatctgaatatagaagtatacatagagaataaatatcacaaacatgactatataaatgtaaatattatttaaaatgtttagcagtagccaaataaattatgacagagtacaatatagtcattaacataattctccagaaatatatgtaataatgccttatccatttattgtatactttatataaatttatggctcctatatctcctatatgctagactatattaaatattggttatgcagcactgagcaacgtatatttggttaacattctttccaaattatatatgtcakgagggaaacaattaaataagcatcagataaataaacataaataaaaatattcatgggtatgctacataaagaataatcaaatcttgaagcttatgaaaagtataatataaatatttttaaaagtctatattaacatatttttagaagacagactgtaaggcaaggtgaaatagatgtaactgcaggaaagaccttgccttttcttatagtatagtaccattatgtgaatgcacacgtatacatataataacatacatatgcagacacatacattatctgggaatc

SEQ ID NO: 552487 - DNA, 2089 bp, Homo sapiens
ttgaaatgaaatataatttgagggagattcttgaaacccagtgacagaacctgagaattttcccatgacttacaagcaattctgaaagcaaggtcagaagatactgtgctatattcagctcttttattttctaagcacttcacagtgaaggaattgttcctatctcagttcatatttttactaaactttattctctcaacatgtgttgtggagaataaccctcacttatgacctgtgatgaattggttaaaacatgagctctgtgagtcagaaagaattggtttcaattcttggttctgccactttgctatgtgatcttgaacatatttgtatagagaagatgatcatacccactggggtagcatatgttaaggatgaaatgagataatatatgtgaaaacacttatatcccagtacctggtgcaaagtagccttttaataattttgaggttctatatttcattgatagtttagaaattcaaagagtagaaaatttgaaatttcaaaatattaattctcagacaaacacacatgagtacacacatacacacttaaattatgttaattcctggtgatacatggggcaagttcggagaagttcatgtttaattttagagaggttcatatttacatattattcttccactgtagaagtttgcactgatgggagtacttgcctagcttttcagaataatgcacatagtaactcagaatacctttcttgatgccaactgtcagagaaaaaacactgcaaaaattcaaagcatctaagaggtgctgaagaggattaaaagaggcaacgtatgtggaagcattaagcccatgcctgtgtcaacagtagctatttttgttagagaaacattatgttgattgagaagatggacagacccagattcccacccagctccaatacttaccacataaaaagagctaacattgatatmgcaagccctgtgctccaggtacaatacgagcattttacgatgaactcatttaatagtctcagtgacctaatgaggtaggtgttcttgtttctcagggcttgtcaggagaataccacaccaataattggaaaagagaatctaactggttaaccggttgtaatgttttaatgaggtaatgaaaagggtaaaaagaagggtagaaagagagctgtaaggtatcaggtaggtagcaagcaattccagggagcagctgccgtctccagggctgagggagcaaaggaaagagctgggattaccaacacttcctggacacttagaggaagggccccacagagctgaaattcagacctctgaggagggggcgggtgccagtatccctgaggggcacataatgaggctgattctggaaaaaggagggggcgggtgccagtgtccctgaggggcacataatgaggctgattctggaaaatctacaaactggctcggtggctctgtaggaagaagaaaaggatggtactgctgaggcgaagttcataagaagcacacgggaaggagcaagtcccctgttcgtcctcgggctctgcccctctcgctagcgcccctactggcagatattacaagaagcagctgactcagccgaaatgtggttctcagagttccagccccaagcatcacaaagcagataacagaaacgtgggcttggagatgagcgatgataatttagcaactggcacaattattagctccatttttcagatgaagaaaccaaggcacaaatatattaagctacgtttgtccagggtcatacagctaggaaaaggcagcggcagaatttaaacctagtcagtctggatccaaaagtttatgcccttaaccccttaaacaagtgactatggacagaaacacttttctgacttttttaaaatggagacaatacttcttaatgtgtagggctgtcgtaagggttaaacaaaacaatataaaatatgtgccaatcatacttcttggtacatagtaggttctcagtaaatactaattcttgttaaatatatttttcttgctttaagtatgagaggttcattttgccttggtgactttatgtgtagttttgagagtatctatattgactttgccttggagtggtt

SEQ ID NO: 552488 - DNA, 1015 bp, Homo sapiens
gtgaaaatttcatatttctcatacattttttcaggaaaaaatgtttgcaaatatcatctgagatatttaaaatcttactatctatgaaaacctacctttaaccaccatttgcatttaaaatagattttgaattttgtgacaagatgtatatatggattttgtatttgttaatgacatgttttctgtattttactgagttttcatacttcacagagtagcctcctctgagcaaagacttaatcttctcctcagtatcctycagccaaattcatttctctcaaatgttctttttatgttagcctaaaaaaccccattgtttcataaaaacttagcatttacttgttgcaagacagtttggacttggtttatctaagattccactgtatgggttattgatgacagaaatattggagagccagagccagatcctattatttgtaacaattgttctgcgaatgttttttcatcaggcttcagaaaactgccagttctctggggccctttgatataactaggttagtgccacaaacaggtagtagtgcactggctttgagcttcgagtgtctgcaaagcaagataaaatctaggcagtttgatggcctgtatttccagctgtctgcctcctttgtgcatggagaaataaggttgacaccctgattattttcgttttccagaaagactatgggaaatgtgctcttttaaattacaatggcagttttacattaaatcttttgttaaggtctttacatttagtctccataaatcttgataggccacttaggtaggtgaactaagaatatgacatgcagtaatgcaacatgaggggcccaatgaggatttacagagattaaaatgttttgaaaatgtgttgaaaataaatgtacataaaaaagacacaacttaaaagtgttcagttttggtaagaaaaggaaaaataactgatttatatcctgggccatggacaaatatatataacatatattgaaatctcaaagaatgaattccctgtgggaaa

SEQ ID NO: 552489 - DNA, 1015 bp, Homo sapiens
gtgaaaatttcatatttctcatacattttttcaggaaaaaatgtttgcaaatatcatctgagatatttaaaatcttactatctatgaaaacctacctttaaccaccatttgcatttaaaatagattttgaattttgtgacaagatgtatatatggattttgtatttgttaatgacatgttttctgtattttactgagttttcatacttcacagagtagcctcctctgagcaaagacttaatcttctcctcagtatccttcagccaaattcatttctctcaaatgttctttttatgttagcctaaaaaaccccattgtttcataaaaacttagcatttacttgttgcaagacagtttggacttggtttatctaagattccactgtatgggttattgatgacagaaatattggagagccagagccagatcctattatttgtaacaattgttctgcgaatgttttttcatcaggcttcagaaaactgccagttctctggggccctttgatataactaggttagtgccacaaacaggtagtagtgcactggctttgagcttcgagtgtctgcaaagcaagataaaatctaggcagtttgatggcctgtatttccagctgtstgcctcctttgtgcatggagaaataaggttgacaccctgattattttcgttttccagaaagactatgggaaatgtgctcttttaaattacaatggcagttttacattaaatcttttgttaaggtctttacatttagtctccataaatcttgataggccacttaggtaggtgaactaagaatatgacatgcagtaatgcaacatgaggggcccaatgaggatttacagagattaaaatgttttgaaaatgtgttgaaaataaatgtacataaaaaagacacaacttaaaagtgttcagttttggtaagaaaaggaaaaataactgatttatatcctgggccatggacaaatatatataacatatattgaaatctcaaagaatgaattccctgtgggaaa

SEQ ID NO: 552490 - DNA, 823 bp, Homo sapiens
atggctatcttttctatcagctccttaagggagagctttggataaagtagagcagttttcaaacttgtaaaggtcaagtaaagcattttccatactaaataactttaagccattgcctatataagtagcatttcctaaagtctcataacttctctttttttttcttttttttttgagacagggtctcactctgtcacccaggctggaatgcagtggtgtgatcttggctcacagcagtctcgatctcctgggctcaagagattctcccacctcagcctcccaagtagctgggaccacaagtgcatgccmctatgcctggctaatttttttgatttttagtaaagacagtttctctcctacattgtccaggctggtcttgaactcctaggctcctctcactttagcctcctaaactgcggggattacaggtgtgagccaccacactcggccttatataacatattttatataattacatattgtaattctaagctgcatgaatttcaaagatgggactaccatggtgcaaagaaacgctgtgttccaggtgtggccctacagctacttagtggtaagcatcactgaagtttgctctcctgacattaagtcatcaagtaactgcttctccagtagttcttaaaagcagctatgtgctgaagatacagagataataaggactgacagaaaatacggttttcctaaccacggtctcagaagctagaactacactaaaaatgtcatgtagagataataaaattgtatctttaaaaggctctgagtcattctgtaaaaccttgagattacacattacttgatctgctgt

SEQ ID NO: 552491 - DNA, 1144 bp, Homo sapiens
tgcaaattttactggtaaatcccatacttcttcagttttaaacaagatatatttccatttgatgtatcaatgtgagaaataaagaaagaaaaagtttaaaattatttcatgagaaagaaggaattttgatgccaccatgataaatgggaacatcaaatattggcaaaaaataccgttctgattatttttatacaacaaaagttttagcaaaataaatatattgaaatttcaataatttttaccttttacaaacctttccaatagcaaatgaggggtttttaaaaatttaatttggggtttcaaaaaactttaattttctaatctgtaattgaaatgcttttacaaaatcgttctaagtcataattacctgtttaaagggttatgacatactaaaaattatcaaacwtaaaagtctaacatactaaaggaaggtctattattttttcagatagtatttaaaagtttgggattttattttaattttgtaaagaataaaatcaccactttaaatcagtcaagcatttcagacagcatcattatgttaatacatgtaaaaataatgaacaatagctcttttattattgtgataatacaaaatgattcatatttattaaaattcaattgatgtaatttatcaatttaaaattttaaatgctcttaaaaataaacaataggctaaaattaattttcattctccacaagataaacgcactatactaatttgataaatttaaaaatctctgagaaaatccttcataatacaattgtcttttccaaattagcaattgtgaatgcttgagaaataaatctaatgattaaatgtgttaataccactttctgctattattttcaataataatagcagagtatgaagagaaatgaagaatgagaaatgagatttcgtatgaagaaatgagaaatgaagcaggtattttccttatgaatttcttaatatccatgaaactgaaaatgctatataaataccaattaaaacatcacaaaccaataactttatatattaccgtaatataatttcattattgtttaaaacaaaacgtgatggattatgattcatctaacaatataaaaataagaaaagctaggactttgtttcttttttaacaacttcagttactttaatata

SEQ ID NO: 552492 - DNA, 1144 bp, Homo sapiens
tgcaaattttactggtaaatcccatacttcttcagttttaaacaagatatatttccatttgatgtatcaatgtgagaaataaagaaagaaaaagtttaaaattatttcatgagaaagaaggaattttgatgccaccatgataaatgggaacatcaaatattggcaaaaaataccgttctgattatttttatacaacaaaagttttagcaaaataaatatattgaaatttcaataatttttaccttttacaaacctttccaatagcaaatgaggggtttttaaaaatttaatttggggtttcaaaaaactttaattttctaatctgtaattgaaatgcttttacaaaatcgttctaagtcataattacctgtttaaagggttatgacatactaaaaattatcaaacttaaaagtytaacatactaaaggaaggtctattattttttcagatagtatttaaaagtttgggattttattttaattttgtaaagaataaaatcaccactttaaatcagtcaagcatttcagacagcatcattatgttaatacatgtaaaaataatgaacaatagctcttttattattgtgataatacaaaatgattcatatttattaaaattcaattgatgtaatttatcaatttaaaattttaaatgctcttaaaaataaacaataggctaaaattaattttcattctccacaagataaacgcactatactaatttgataaatttaaaaatctctgagaaaatccttcataatacaattgtcttttccaaattagcaattgtgaatgcttgagaaataaatctaatgattaaatgtgttaataccactttctgctattattttcaataataatagcagagtatgaagagaaatgaagaatgagaaatgagatttcgtatgaagaaatgagaaatgaagcaggtattttccttatgaatttcttaatatccatgaaactgaaaatgctatataaataccaattaaaacatcacaaaccaataactttatatattaccgtaatataatttcattattgtttaaaacaaaacgtgatggattatgattcatctaacaatataaaaataagaaaagctaggactttgtttcttttttaacaacttcagttactttaatata

SEQ ID NO: 552493 - DNA, 598 bp, Homo sapiens
atttgtttgtaaatatggatatttcgaatccttttctttttttaagagttcatttttgttttttattgttttttttcaatcagaaatgtctcaaattttttcaactgatttttagacctgttgagatggtcattttaaaartgtgatctgtcaatattttagtatatttcccaatataaaatgaagcattttgggttgatcattgttatggactgaattgtgttccccctcgaaaagatatgttgaacttctagcacccagtactgcaaaatgtgatctaacttaaaaataagatctttgtggatgtaattagttaagatgaggttacacttgagtaaggtaggactttaatacaatatgactagtgtcattataagaagatgatgaaaaaacaactatctgatgagaaggcagagactggcattattcagctgcaagccaaggaatgtttaggattgccagcaacaccaaaagcttagtaagccttggagcagattattccctagagctgtggagagagcatggtcttactgacatcttgattttggacttccagactccagagctgtgagacaataaatttctgttacttaaagcc

SEQ ID NO: 552494 - DNA, 899 bp, Homo sapiens
caaatcatgagtttgagggaccacaatgttaagtgtctgaaatatgcttcatgatkatatagattttctatgtggaataaataatgtttgagtaaatcaattttttgcttacagaataaaatactgtgtctgacaatattaaatttcatccacagcctacacattagcataatgtggattttccaagctacttttatacatgaaataatataagctgtaatgagtgaaagtaagcacggatttttcagcagtactttccagaaattttgatggaagatcagctttttgtagctggagaagttggattaaaaaatgaccacagagaaattgaaagatgtccagtagaaggtctgtagacttcattccaattcagcatatccatgaggtcaccaagaaattaagtcaccaagaagttaatttcctcaagaaaggacccttgaagaaagttgctattattaagtcgattagggtgtagtggcaggaaaaaaagtaaggactgatttctaagaaacataaaaatgaaaacattaaagaaaaaccctaaatttcattgaagaataaattgtgggactgagccacagaacaaaactgaatatttatatcatcaccacatgtatagttagtgatatatctattttctgggagtctgtattttaaaattaggtttattgaggtataattcgtatggagtaaaatttaatctttttgtgtgttcacttttattaatttggacaaatattcaaaatagtataaccaccactacaatcaagatgtagaacattctcatcaccctcaaaaggcccctttgaagtcatataattatagagtatgttgctttctgatctgggccttgttacacttattatactgcatttgatagccataatgtcattgcatta

SEQ ID NO: 552495 - DNA, 899 bp, Homo sapiens
caaatcatgagtttgagggaccacaatgttaagtgtctgaaatatgcttcatgatgatatagattttctatgtggaataaataatgtttgaktaaatcaattttttgcttacagaataaaatactgtgtctgacaatattaaatttcatccacagcctacacattagcataatgtggattttccaagctacttttatacatgaaataatataagctgtaatgagtgaaagtaagcacggatttttcagcagtactttccagaaattttgatggaagatcagctttttgtagctggagaagttggattaaaaaatgaccacagagaaattgaaagatgtccagtagaaggtctgtagacttcattccaattcagcatatccatgaggtcaccaagaaattaagtcaccaagaagttaatttcctcaagaaaggacccttgaagaaagttgctattattaagtcgattagggtgtagtggcaggaaaaaaagtaaggactgatttctaagaaacataaaaatgaaaacattaaagaaaaaccctaaatttcattgaagaataaattgtgggactgagccacagaacaaaactgaatatttatatcatcaccacatgtatagttagtgatatatctattttctgggagtctgtattttaaaattaggtttattgaggtataattcgtatggagtaaaatttaatctttttgtgtgttcacttttattaatttggacaaatattcaaaatagtataaccaccactacaatcaagatgtagaacattctcatcaccctcaaaaggcccctttgaagtcatataattatagagtatgttgctttctgatctgggccttgttacacttattatactgcatttgatagccataatgtcattgcatta

SEQ ID NO: 552496 - DNA, 679 bp, Homo sapiens
tatcattatttcattcatttaatgattcttgatttggtgctactagtgctaattgttgatataaaagtgatttacaagcaattcatttaattaacttaagaaccccatggggtagaagatatccatatcccaattgaactcayttaaactttagaaatatcactggatagaggctagcaatattcccattttataaatgaagaacttaaagccaaaaaaaaaaaaaaggtaatgttcctaaagtcatccaccaagtaagtggtagtgattgtttctgaacccaggagtttggctctagagtcgataaccttaactagtaaccataataagtattacttctcattctgatttaaaaattacctactaaaatagatctttcttagttgagttgaaaggctcattaaattgccataaatggcattttgaagatgatttatctgcccatcctcacctcatgaagaccaagtagcattttcattgagattacgtatcacaagtcaagactaattaaagctatgaaaaaactacacattatattcacatcgtaagtactcgccataaaacaagcagtcagaatggaatgtgcccatgcagcccacttctgatgtttatcattccgctttacctaaaggatttggaaattattctgtcctcttgcgctgtaaactcacatttattt

SEQ ID NO: 552497 - DNA, 679 bp, Homo sapiens
tatcattatttcattcatttaatgattcttgatttggtgctactagtgctaattgttgatataaaagtgatttacaagcaattcatttaattaacttaagaaccccatggggtagaagatatccatatcccaattgaactcatttaaactttagaaatatcactggatagaggctagcaatattcccattttataaatgaagaacttaaagccaaaaaaaaaaaaaaggtaatgttcctaaagtcatccaccaagtaagtggtagtgattgtttctgaacccaggagtttggctctagagtcgataaccttaactagtaaccataataagtattacttctcattctgatttaaaaattacctactaaaatagatctttcttagttgagttgaaaggctcattaaattgccataaatggcattttgaagatgatttatctgcccatcctcacctcatgaagaccaagtagcattttcattgagattacrtatcacaagtcaagactaattaaagctatgaaaaaactacacattatattcacatcgtaagtactcgccataaaacaagcagtcagaatggaatgtgcccatgcagcccacttctgatgtttatcattccgctttacctaaaggatttggaaattattctgtcctcttgcgctgtaaactcacatttattt

SEQ ID NO: 552498 - DNA, 637 bp, Homo sapiens
ataaaataatacatatttatttatttattttaaattttagaaatacaataagaaaacaaaggaaatatcacccttaagttccaccatatggaggacatctacaaatattgtaaataattttgtgtctttamtatgtgtatatgtctatattcaaatacacacctatatatacatatacataggttatatataaacatttcacatcattgaaattttaaaatttggttttctattttctctttataagttagtgtttcaccatgaacttattaaataaatgatatacttaaatatatgaagaatatcttttttacattatatttacagaattcccacaaaattatccacgtgataacttatgaaataatgctaacatagacaccttcattcaaaatttttttaaaataaaaatgttattttcaaaatggcatctttttaacacagatgctcaccacaggaccagggatgccccgaagaccttctggaccaggctttcctgcaggtccctgaggaccgactgggccggtttttccaggaggaccttctgcacctgcttccccctgttagaaagtaaaatatgggagcacattagtgatgagaaaatacttttattattttattaaatgtactgaaaaaa

SEQ ID NO: 552499 - DNA, 637 bp, Homo sapiens
ataaaataatacatatttatttatttattttaaattttagaaatacaataagaaaacaaaggaaatatcacccttaagttccaccatatggaggacatctacaaatattgtaaataattttgtgtctttactatgtgtatatgtctatattcaaatacacacctatatatacatatacataggttatatataaacatttcacatcattgaaattttaaaatttggttttctattttctctttataagttagtgtttcaccatgaacttattaaataaatgatatacttaaatatatgaagaatatcttttttacattatatttacagaattcccacaaaattatccacgtkataacttatgaaataatgctaacatagacaccttcattcaaaatttttttaaaataaaaatgttattttcaaaatggcatctttttaacacagatgctcaccacaggaccagggatgccccgaagaccttctggaccaggctttcctgcaggtccctgaggaccgactgggccggtttttccaggaggaccttctgcacctgcttccccctgttagaaagtaaaatatgggagcacattagtgatgagaaaatacttttattattttattaaatgtactgaaaaaa

SEQ ID NO: 552500 - DNA, 637 bp, Homo sapiens
ataaaataatacatatttatttatttattttaaattttagaaatacaataagaaaacaaaggaaatatcacccttaagttccaccatatggaggacatctacaaatattgtaaataattttgtgtctttactatgtgtatatgtctatattcaaatacacacctatatatacatatacataggttatatataaacatttcacatcattgaaattttaaaatttggttttctattttctctttataagttagtgtttcaccatgaacttattaaataaatgatatacttaaatatatgaagaatatcttttttacattatatttacagaattcccacaaaattatccacgtgataacttatgaaataatgctaacatagacaccttcattcaaaatttttttaaaataaaaatgttattttcaaaatggcatctttttaacacagatgctcaccacaggaccagggatgccccgaagaccttctggaccaggctttcctgcaggtccctgaggaccgactgggccggtttttccaggaggaccttctgcacctgcttccccctgttagaaagtaaaatatgggagcacattagtgatgagaaaatacttttattattttattaaatgyactgaaaaaa

SEQ ID NO: 552501 - DNA, 2183 bp, Homo sapiens
gcaggataagaagagaggagcaggaactgacaggtgagcaacgccagcaaactgcaagtatttttcatgagaattctagttctattccgtttctatatatatatttgggcatttgggtgtaccactgtagccagtgttagtcttaagcaaaatggcataatatagctctccttcttaccttctgtcttctcctcttgttacctctggataattagtacccctcaacactttatttaaaactcattcttactcctgcacccagtaaactcctaaacattcagtatctcacccccatttgtgaaataaaaacagctaatctggcataattcttatatgtgaagaactaatcctacaaaactgatgtatttctcctctgggaattatttgcattttaaagaacatctccttaaaaaagaaaaaagaaaaatactcccctatgagaattaagtcttactagtagttcaggcatcatataaagcaggcaggaagatgacccagaataaaggcattccctaatgccccaaaaatcataagaagaggttattcaagcacccctactctgcctcttcataatccctagcccaccactcgtacccaatatctctgcccactaacattaactattcttggagactggaaactcagaggacaaagagcatctttaatatctttgtattcactatatagcatctagtaaataccttgtatattgttcttaactatgttctttaatttaatgttcttatttcattttgggaggctcagaaaacaatatcctaaaatacactgttttggacttcaaactaacagcacctgggagtagcaaatgctgggagggctttctcttatcttcccttatctgactatgagaagttcctttacaaggaacacaatcatcagccaggggaggttagctcacaggaaaagagactaaaggtctaacacgttgctcagagagacttttaccacaggctacaatctatccttcagagggctgctacctgagagacttcatctacataataagacaaacctttggttttagtgcatttcttcccctcactctctcatagcttgtcaccctcaccctccaggagccccagcccctattcctctctgtatgatataaaaacttcagtcatcttattcttctttgagtcatattttatgaggctcccatgcatatgcacatagtaaacctgtatgccttttcccctaataatctgtctactgtcagtttactccagagactcaaagtagtgaaccttcatagagaagcaggaaaatcttaactaataatttcttttgcaattttttttttttgagatggagtcttgctctttttgcccaggctggagtgcagtgacacgatcttggttcactgcaacctccacctcccaggttcaagctattctcctgcttcagcctcccaagtaggtgggattacaggtgtgcacccccatgcctggttaaattttatatttttagtagagacagggtttcaccatgttggccaggctggtctcgaactcctgacctcaagtgatccacccacctcagtctcccaaagtgctgggattacaagcatgagccactactgcgcccagcctgccaattatttttttttataacttgttctacttagaagtataacaagattactcccgaaaggaagaatataatcatgtattataagaaaaatgcattttatgaaagcactttaaacaaatgatttgtacagagagttaaaaatgaaattatttatttaaaaaatgataataatagagctgttggcaaaataaacagggtctaaataataccagaaagagtaaaatcaatsattatccattgaatacctaaaaactgtgggagactaacagagtgaagttgctcaagaagttaacatctcagggaaccaaaacaaaggcatgtacacttcttcatcacagtgagtcaagtgatatcttgagacaacatgagaggtaacacagagtagtgtacggctaactggccagtgccgggccaactgttcaaggaaagcagatattgctgagagtgaagatgaccagggagagctctctaggatgagatctgagacttgataccacttgctcttcacagtcacctgtgtgaaaaagcactagcacaagccggtctaagccaggataaggccctgctgggaa

SEQ ID NO: 552502 - DNA, 2183 bp, Homo sapiens
gcaggataagaagagaggagcaggaactgacaggtgagcaacgccagcaaactgcaagtatttttcatgagaattctagttctattccgtttctatatatatatttgggcatttgggtgtaccactgtagccagtgttagtcttaagcaaaatggcataatatagctctccttcttaccttctgtcttctcctcttgttacctctggataattagtacccctcaacactttatttaaaactcattcttactcctgcacccagtaaactcctaaacattcagtatctcacccccatttgtgaaataaaaacagctaatctggcataattcttatatgtgaagaactaatcctacaaaactgatgtatttctcctctgggaattatttgcattttaaagaacatctccttaaaaaagaaaaaagaaaaatactcccctatgagaattaagtcttactagtagttcaggcatcatataaagcaggcaggaagatgacccagaataaaggcattccctaatgccccaaaaatcataagaagaggttattcaagcacccctactctgcctcttcataatccctagcccaccactcgtacccaatatctctgcccactaacattaactattcttggagactggaaactcagaggacaaagagcatctttaatatctttgtattcactatatagcatctagtaaataccttgtatattgttcttaactatgttctttaatttaatgttcttatttcattttgggaggctcagaaaacaatatcctaaaatacactgttttggacttcaaactaacagcacctgggagtagcaaatgctgggagggctttctcttatcttcccttatctgactatgagaagttcctttacaaggaacacaatcatcagccaggggaggttagctcacaggaaaagagactaaaggtctaacacgttgctcagagagacttttaccacaggctacaatctatccttcagagggctgctacctgagagacttcatctacataataagacaaacctttggttttagtgcatttcttcccctcactctctcatagcttgtcaccctcaccctccaggagccccagcccctattcctctctgtatgatataaaaacttcagtcatcttattcttctttgagtcatattttatgaggctcccatgcatatgcacatagtaaacctgtatgccttttcccctaataatctgtctactgtcagtttactccagagactcaaagtagtgaaccttcatagagaagcaggaaaatcttaactaataatttcttttgcaattttttttttttgagatggagtcttgctctttttgcccaggctggagtgcagtgacacgatcttggttcactgcaacctccacctcccaggttcaagctattctcctgcttcagcctcccaagtaggtgggattacaggtgtgcacccccatgcctggttaaattttatatttttagtagagacagggtttcaccatgttggccaggctggtctcgaactcctgacctcaagtgatccacccacctcagtctcccaaagtgctgggattacaagcatgagccactactgcgcccagcctgccaattatttttttttataacttgttctacttagaagtataacaagattactcccgaaaggaagaatataatcatgtattataagaaaaatgcattttatgaaagcactttaaacaaatgatttgtacagagagttaaaaatgaaattatttatttaaaaaatgataataatagagctgttggcaaaataaacagggtctaaataataccagaaagagtaaaatcaatcattatccattgaatacctaaaaactgtgggagactaacagagtgaagttgctcaagaagttaacatctcrgggaaccaaaacaaaggcatgtacacttcttcatcacagtgagtcaagtgatatcttgagacaacatgagaggtaacacagagtagtgtacggctaactggccagtgccgggccaactgttcaaggaaagcagatattgctgagagtgaagatgaccagggagagctctctaggatgagatctgagacttgataccacttgctcttcacagtcacctgtgtgaaaaagcactagcacaagccggtctaagccaggataaggccctgctgggaa

SEQ ID NO: 552503 - DNA, 337 bp, Homo sapiens
atatataattttacaactctatttacatagcaaattcctacttattaaggactgcatgtggtgtcataaaggaaaaaataatattagagtccaagggtgacatttatgagctaatattggggaatagtttatggattactagaaatacctcctggctgtgtaactgacactgagggagaggttgtgtgagattttcagggattttgatgaatattatgttcttagtatcagtacaaatctacaagattttcrttaatgtacagagcaaattctcctaacacatttaatagcttaaaattctgaatccattattaaatgttgtctgggtaaaaaaaat

SEQ ID NO: 552504 - DNA, 685 bp, Homo sapiens
tagtagatataggaagaccttgataattttccattttaatagttcttacttttgtatcataacaagacagtacacttggatgttttatctgtttaattttttgagaatgatagttcaatttagtttgtgtagtcttcccgatgagtatataaaccgttaacagatatttcacaaaattaagaatcacttctaagagcaaatatttttaaactatttaactctgcaattgaacacactgacacttttccctacaacactagtcatgtactgtaattctgtaataaaaaaactattattttacttcagcaatgtctctggtaacaccagttatgtcaacttgagaaaatatcttaaattatccaattttctgtatattctccccatcccctttttttgagatggagtcttgctttggagtgcagtggagcaatcttggcytactggagcctccacgtccttggttcaagtgattctcatgtctcagcctcccaagtagctgggactacaggcacgcaccaccacacccagctaactttctgtatttttagtagagatgaggtttcaccacattggccaggctggttttgaattccttccctcaagtgatctgcccgcctcggcctcccaaactgctgctgggcttataggcatgagccaccgcaccaagcccatttcgcctcatatg

SEQ ID NO: 552505 - DNA, 876 bp, Homo sapiens
tatattgttagaaataccagaattaaatttagtggggtttttttttgaagcacacttcccattgaaataattgcaacatctctctaaaataggagttagttttgagtttcatctgagtcacaaattgtgtaatcttagcctagtaactttatgcctgctttcttatttgcaaaatggagataattttaatttccatcatttcataacactgttttaagtatcaaatatattcaaagtggaactatctcacaatcacgagatagtgggctgaagttaggtataaatttgatgaccatcaattctcaggatgtctatcacccttcttgtcatatcttcttttttctccaatacattttttwaaaattgggacttaactcacataccataaaacaaacacttttaaagtgcataattcagtagtttttggtatattgaaaatgttgcaaaactaacagtagtaactaattctagaatattttcatctgcaccaaaacaaacttgtatctattagaagacgcatcctataccccttactccaggccctggaaatggctaatcaattttccgtcttgatatactttccagtttttgaaatattatataaataaaatcatacaacatgtgatcttctgtgactggcttgtaaaccttgtagcatgtttacaaggttttcatggcttagcatgtattagtatttaatttcttgtattttacctgaataatatttcattgcatggatatcttatattttttcatgcatttaccaaagtatagacaaaaattgctttcctctttttggctattacgaataatgctatgaatattcatgtacaagcatccgttttgtcacatcttttcattacacttatatgccag

SEQ ID NO: 552506 - DNA, 647 bp, Homo sapiens
aggggaatttgcattttttagacctttttaaaatttcattttatacactggagttttgaggtctttggtttttaaacacatgacagatagtcattagcctaagaaaaatgtgctcttcaactataacagggtgtattgcacactctgagatttatcatcatctactggtattttacacttctgttagaggtttaaagtgtggttattaacacttgtattataaactttgaagaagcycctagggtacttcatcagttaggcaagttgaaatagtaaataattcaattgctgggatagaaaagacaagctcctttcatagactttaagaatcgaaacaaaattgttgtcctcatgttagaagtttaagtctcataattaagctcctcgccctatgaccatggatgctgattgtccagttgatgttgaaagcagctgctgattcataagatccaggtggcacagagtggagtcctataatgaaaactggtaaaagactctgcctgcttcagggtattaaaaccatacactaacataaattaatgattcataactattctaaatggttaaatgtgtaaaaagtaacagttttaatatgaaaaaatgattgtgattatgctattctctggcccttttcttaacccttgggg

SEQ ID NO: 552507 - DNA, 605 bp, Homo sapiens
tatgctagtttctctgctactctaagtatcttatgtagtcaattaattaatttaaaaatctatgtcagcaaagcataaagtgtagaacaatttaaccaaatgcaattaaaaaataactaggcatgccactaaatctacagttgataataggatgagaaaaatgcacaatagatgctgacatggaagttagatgaaaactttgaatggcacgtaaaccacaaaggtgcattttcatttcacaagcaaagtctcatttggaattacacagcagagctcatttttatgtaatacatcatattgcatagaattgttttcacactgatttccatgattcttttcaacattctttttagactcatcagtgcacatactctcaaakaatctggttaaacttgtcttatctaaaattctaatgttacttgaaataaagtggaaagaacaactctgtgtttacacttcaaactgtgtcttaaagtacaccccaaagctagttgttccatattgtaatacacaggttttgcttcagaggctgattacttttattgattaacattgcatttgatttattagcttttgcctgcttagagaatgcctgatttttttca

SEQ ID NO: 552508 - DNA, 555 bp, Homo sapiens
agttttatgtcttatgatgttaattttatagtccttcccacaaagaaataatgctttcttcttactatccttaaatacaacagacctctcaaaactttgccacttagtgaaattcaatcaggtcacctacttcagttatgttaccttaaccttaaaaaaagttttaactttgccattattttccatggcctaaatcacctgcttcaaaatgtttcagaggaaatgctgaattttgcacagtagccatttcaaataacagaataatatatctatcagtactctgttctctctcatattctgtgctattgaaatctacctgctgtttaaattccatagcctggcactctgatattaaccttgagccccaaactccacaggatttaccaaacatacagacaatgtcctattaacttactctttgccttcctttctctgtatctctcagataygagcttgtaattttctgtggtggggcacttgtatataatagcttgtgccatctaattgaatgaggggtttaaagaacattaagcacttagagggaaattgtgctgg

SEQ ID NO: 552509 - DNA, 583 bp, Homo sapiens
tataattctcaagctcacaagaatgtatttttctatgatctgacactgctctgtttcgctgattcacactctctgcctgactcctgagggtattcaagtttgtgaccctagtcaagtccagaaagtgacccacacagacctcagagtccacatcacacccaccttagcctttcaaattacattcgtttccattcggggtggtgggcagagaaggcactggcattcttttttaaaattaaagtgtgctcctggtagagaacagcagttttcataacataactctttgaatggatgagtttatcatcaccttattctttattcagcgtgcttgccgcttataccatagagatcatgagaaamcgggaagaatgacagtcacattttaaaacaaagtgttccttaattggatgggtcaaactagggtgccacagatgacaagagaactatgacatgaccataccagggaaaatacgaggacgggaatctcgtacggggagatacagagacccacaggcaacctcgtctacacagcacgttctcaccttccactgtttaagcacaagtcacctgcttggaacgccag

SEQ ID NO: 552510 - DNA, 595 bp, Homo sapiens
gaggcaggcagatcacttgaggtcaggagtttgagaccagcctggccaacrtggtgaaaccccgtctctactaaaaatacaaaaattagccgggcatggtggcacacgcctgtagtcccagctacttgggaggctgaggcagaagaatcgcttgaacccaggaggtggaggttgtagtgagctgagatcgcaccactgcactccagcctgggcgacagagtgagagactctgtctcagaaaaaaaacaaaaaacaaaaaaaaacaaaattagctgggcatggtggtgcacgcctgtaatcccagctactcgggaggctgaggcaggagaatcgcttgaacctggtgagttagggaggaggttgcagtgagcaagatggcatcactgcactccagcctgggtgacagaaggaggctccatctcaaaaaaagaaaaaaaagaaaaccaggatgtgccagtctgtgtctctaagagggagggcaagtacagagacccttgtgggaccctaaaatcagtatcagcggaaactgaaggtcacgttcctccccctcagattgaggacaggaggaggctggtctgtggaaccgaagcaaacc

SEQ ID NO: 552511 - DNA, 624 bp, Homo sapiens
taaattaaaaatttttgatgtattttgaatatcatcactttaataaacaaataattaggttgaaaagcaaataataaagacttaatttactagctttttagatagatgaccttatagtcatatggtaggatgtgtttcattttgtagatttgtgaatttttgatactatttatattattcaaaccatgatgtttataactttatatataagcttggaaatgcatattgactttgacgtcaccctaagctacagtcttcatgagcgacctgtcattaaagatttgcccttagtgatttaacctatataagtcttggtaaagtgtttaaaataaacataagtatagwcttttaagagctgaaggcaattaatatatataatttggaaaaataaataaataatacaatcaaacccaaacagccagccagagttggatggaaggaataatgtttgtgtcttttgttaagagctagacatgctctaggtaactaatcaaaaaccaatatatttcagtgtttgagtgctagagcttctggttcctgacagtaaagtctttatcagagattttttttttcatagttttcatttggcttccttaagtaatttttccttgtgactatgaaagg

SEQ ID NO: 552512 - DNA, 646 bp, Homo sapiens
tactactgcatgctaagcacacagcaacaaaaagaagcactgcagaaatggttgtgaagctttatgagagtaaaaacaaatgaagaggggaaaacacaacaaccattragaaataaggacaaagaaggcattgagggaaagaagcacagaaaaaaagattatccctgaaagaaaatctgttgactaaaaaaatctgttctaaatacttaatttaaaaatgtctattctaggccaggtgcggtggctcacgcctgtaatcccagcactttgggaggccaaagcgggcagatcatgaggtcaggagatcgagaccatcctggctaacatggtgaaaccccgcctctactaaaaatacaaaaaaattagctgggcgtggtggcgggcccctgtagtcccagctacttgggaggctgaggcaggagaatggcatgaacccaggaggcggagcttgcagtgagctgagatcgcaccactgcactccagtctgggtgacagagtgagactccatctcaaaaaaaaaaaagaaaaatttctattctaacacactgtcatttgggaggcctacaaaaacatttccttaaaaaattaccatgacttcaactatattttaaaaaagccttgacacttggaaaagactatgataata

SEQ ID NO: 552513 - DNA, 646 bp, Homo sapiens
tactactgcatgctaagcacacagcaacaaaaagaagcactgcagaaatggttgtgaagctttatgagagtaaaaacaaatgaagaggggaaaacacaacaaccattgagaaataaggacaaagaaggcattgagggaaagaagcacagaaaaaaagattatccctgaaagaaaatctgttgactaaaaaaatctgttctaaatacttaatttaaaaatgtctattctaggccaggtgcggtggctcacgcctgtaatcccagcactttgggaggccaaagcgggcagatcatgaggtcaggagatcgagaccatcctggctaacatggtgaaaccccgcctctactaaaaatacaaaaaaattagctgggygtggtggcgggcccctgtagtcccagctacttgggaggctgaggcaggagaatggcatgaacccaggaggcggagcttgcagtgagctgagatcgcaccactgcactccagtctgggtgacagagtgagactccatctcaaaaaaaaaaaagaaaaatttctattctaacacactgtcatttgggaggcctacaaaaacatttccttaaaaaattaccatgacttcaactatattttaaaaaagccttgacacttggaaaagactatgataata

SEQ ID NO: 552514 - DNA, 603 bp, Homo sapiens
taaaacacttagcgaagaaaatactgtaaatatgaggtacagaaacttagtatttcaattgtacattatgtccagttaggaaaagagaaaaataaaatatagagaaaaggttaagcagaaagaaaggaaaaagcaaacacaaagacagaagaaaaggaggcagtatgagctggagagactcattcttctctagtgctctgaaaatttacgttccattatttattgaaaattctttcagcagcactttttgagcatctaactaaatataatattacaattcataagagatatgtacaaaatgagactacaaggagggtgatgggacttatagttggcctctgaaatttacatataaacatagcccacagctttcaagtttttttttttaactcaatatatctttgattaggactactattagctaaggctaacttttatttttttttttaakaaatccaagactacatcctacatctagaatttcaccatctctgttatattaaggataccaattcatacaggaatcttcctgttaatgtcagtaagcatctgaaaattagtggttctatgcaaaaatactaactgggagactgtttttcatta

SEQ ID NO: 552515 - DNA, 930 bp, Homo sapiens
gaggagcaaaggaaagccgtgcacagatattgctttgaccttaaaatatttgttaagtgaggcaagaaagaagccaggagtcttctcacaaccgttccaggtcagcaatttctaagatatttctatcaaggtaattggtagaaaatataaatgcgtgctggccctgactcaagaattaaaccatcgtaacatatacatacacaatttggaggacaggcagttatcaaacagtctataaactcaagtggggcatcagctcaattaatacctgtctatctggcttcagctggtaaggaatcataaagatgttcaaattttgatttttggtgaatgtatttcacaaagctaccatttcataaggacaataaggttcactatatcacaatacacgacaaaatttacaaatgagatgacagctattttaaatacattttgtaaaggcattttccactaactataaaatccagtgagacaaaaagataattacactatagttaccatcaagacttttagactgtagttgaagttcaaaaggttgatttaaaaaaaagataacatgaggcttaattatatatgaagagtatttgattagatacagaaaacattagtaagtgtggttttcttcctcttgaaaactagctttacgaagtaataccaactccaattaaattttgacctactttaattcctcatcaatggcaccataagctggtacactcaaagtaaaccagttactttggccaccaaattaggccacctctgtttctaaaataactaggatacaacggagtagcatgcatttagttactatacagtatygtgcaaacttacagactttaaaaacatttcctccatttttccaaagttctgtttcttaggactttgattttaaacatgtctaccttagggttctaaataataatgtctcct

SEQ ID NO: 552516 - DNA, 888 bp, Homo sapiens
tataactccaaaaagatcacaatcataaaaatatttactaagaagtctccaattattttgtaaactatgttccactttatctttttgtttgtttgtttgttttttgagacagagtcttgctctgttgctcaggctggagtacagtggctcaatctcagctcactgcaacttctgcattcacacatatgcatgcacaarcacacagccacattttttccttttggagaaactctcagaagtggcaatgcaggatcaaaaactatacacatttcagatttcaagaaagtctgtccatcttgcctgcaaaacgtataccaatttgcagtcccaccaacagtgtgcgagggtgcttgtaccttgaaactttcctttcttctttattccctatagaaactagtacagttgttggcacatagtcagcatgctactgcatgtgcttggatgagggaatgaaagtatccatttttaaacagctatcgacatacagagttgtggatatttacatatatctttataaatggcatattacatacctcagattcaacaagcatcccaaatagatttataatatttaaaacatgaaattctccaggcttccataaattgtgattgtttaaatataacttgtggcttctgagcaaaggagactaagttgtgtaatccttttggtattttttagagtatacacttgtattttaaaatctttaaacaaatgtagcatctctataattttcattaggcgctctctactacaccaaaaatacaattataatgtctttacactttgaaatgttaactgtcttttcaagctaatgagcaagtttctctgatcacaaagcattctctgcaagcaagttctgtttagaagctccttaactcctagggggc

SEQ ID NO: 552517 - DNA, 888 bp, Homo sapiens
tataactccaaaaagatcacaatcataaaaatatttactaagaagtctccaattattttgtaaactatgttccactttatctttttgtttgtttgtttgttttttgagacagagtcttgctctgttgctcaggctggagtacagtggctcaatctcagctcactgcaacttctgcattcacacatatgcatgcacaaacacacagccacattttttcctttyggagaaactctcagaagtggcaatgcaggatcaaaaactatacacatttcagatttcaagaaagtctgtccatcttgcctgcaaaacgtataccaatttgcagtcccaccaacagtgtgcgagggtgcttgtaccttgaaactttcctttcttctttattccctatagaaactagtacagttgttggcacatagtcagcatgctactgcatgtgcttggatgagggaatgaaagtatccatttttaaacagctatcgacatacagagttgtggatatttacatatatctttataaatggcatattacatacctcagattcaacaagcatcccaaatagatttataatatttaaaacatgaaattctccaggcttccataaattgtgattgtttaaatataacttgtggcttctgagcaaaggagactaagttgtgtaatccttttggtattttttagagtatacacttgtattttaaaatctttaaacaaatgtagcatctctataattttcattaggcgctctctactacaccaaaaatacaattataatgtctttacactttgaaatgttaactgtcttttcaagctaatgagcaagtttctctgatcacaaagcattctctgcaagcaagttctgtttagaagctccttaactcctagggggc

SEQ ID NO: 552518 - DNA, 598 bp, Homo sapiens
cccgcccccacctgtcctcagacttccagcccccatgratggcttgcaacaccccatcccagctctgcagctctgctaactcctgagcccttgtttcaaggctgggcaggtgtccctggctgaatgtggcaggacagggaccctcctcctccagcaacctcctcttatctctgtccttagctcctgggacccatccagccacctgttccccttctacatccactctctccccagcctcacccatagcctcgtgggccaggatgtctgatcgtctccaccgggagcccccgcaggtgaagatgactgctcggatgaattctcggccgcaaagcctgaccccgtaaggcgctgcccgggcctcagctcccggccacagctccccggtcagcacccataccgccaggagcagcagcagcatgtacctggccatgctggacggagatgctttgaacgtgagagtgggccagtgtctctgctgcctcttggccccccatttatacatcgtggctcccccacactctgcctgaagaaagctgagtgcctcccttatcttctccagcagaggggagacaggcacggcccccccaacccgaccttt

SEQ ID NO: 552519 - DNA, 598 bp, Homo sapiens
cccgcccccacctgtcctcagacttccagcccccatggatggcttgcaacaccccatcccagctctgcagctctgctaactcctgagcccttgtttcaaggctgggcaggtgtccctggctgaatgtggcaggacagggaccctcctcctccagcaacctcctcttatctctgtccttagctcctgggacccatccagccacctgttccccttctacatccactctctccccagcctcacccatagcctcgtgggccaggatgtctgatcgtctccaccgggagcccccgcaggtgaagatgactgctcggatgaattctcggccgcaaagcctgaccccgtaaggcgctgcccgggcctcagctcccggccacagctccccggtcagcacccataccgccaggagcagcagcagcatgtacctggccatgctggacggagaygctttgaacgtgagagtgggccagtgtctctgctgcctcttggccccccatttatacatcgtggctcccccacactctgcctgaagaaagctgagtgcctcccttatcttctccagcagaggggagacaggcacggcccccccaacccgaccttt

SEQ ID NO: 552520 - DNA, 921 bp, Homo sapiens
tttactgccatgcttgcaggtcctttcttgtccttagcctcccaataaagagaacacttctttatagacattaacctgtaaaaatatccatatggccttcagtcctccttgcactgacctaagagttagctgctttgccctcctaaatagctctatggccctaggctttaggagctctacttcattcactgtcattaactacctgtttttctgtcctgttaattttgtctacttattcaattaatcaccagggtcgaaagatggctgcaaattcttgttacttctgctattgtgcgaagggaatctaattcctctcacagattccttgaatctgtgttggacttttttggtacaccaataaagtgtggcagaaatgacactatgccagctctgagcctagcctttaggatgactagtccttttggagccctgagccattattcaagaagaccaaccctgaggataccatgctttgaggaagcccaagataaattagaaatcatgtttaggcactccagtttacatttccagttgagcccagctttccacccatctaggctatgacattagacatgtgaatgaagctgcttagatcctccataccagctcatatgctaactaaatatcacctgaatagcactgaatgacccttagcaataccatgtagaactgaagaatcacccagccaagtgctgcttgaatttctgacccataaaatcataaaatataataaagcagtaatttgttataaagcaatagataacccaaacagctgttttttctgtttctagcagtggatctaagccttctctttcaagtggccaagtggcagacctgatgcctttattcctcctcaagcctgtgtgttttatatctgcttttttcaaaagccaraagcatggcattatctcttccagtttc

SEQ ID NO: 552521 - DNA, 536 bp, Homo sapiens
catcacagtactaatcatggtactctgtttctgtttataatttaaactccttgaaagagatgttcttacaagagaagctgatatactcttcatatctcaacaactggcacaacttctcccgtgtactaggctctaaattaatacttgttaaatatatttttaaaacacagtaaaaaaacttgctgtaaacaaactctatattgtaattgctacataccgcttctagggaatgaggtgtaaaagcataaacatctcatcgtaagcatttgtttattttcattcatatttttagtagcaattttatattgtaaaaaccagtgagtacaatttcacaacccttctctcaaggagaaaggggaaacttactagaataatagacaagttgaaaatagtttaartctcatttgttgtcgtttatcaaaggacctgagggataaatgggtcttcaacaacttcaacgaaatcctcataaaatggaaaatagtaaaaatcttcaatcaaactgcctaaataagtacccccaactacactctttg

SEQ ID NO: 552522 - DNA, 536 bp, Homo sapiens
catcacagtactaatcatggtactctgtttctgtttataatttaaactccttgaaagagatgttcttacaagagaagctgatatactcttcatatctcaacaactggcacaacttctcccgtgtactaggctctaaattaatacttgttaaatatatttttaaaacacagtaaaaaaacttgctgtaaacaaactctatattgtaattgctacataccgcttctagggaatgaggtgtaaaagcataaacatctcatcgtaagcatttgtttattttcattcatatttttagtagcaattttatattgtaaaaaccagtgagtacaatttcacaacccttctctcaaggagaaaggggaaacttactagaataatagacaagttgaaaatagtttaagtctcatttgttgycgtttatcaaaggacctgagggataaatgggtcttcaacaacttcaacgaaatcctcataaaatggaaaatagtaaaaatcttcaatcaaactgcctaaataagtacccccaactacactctttg

SEQ ID NO: 552523 - DNA, 536 bp, Homo sapiens
catcacagtactaatcatggtactctgtttctgtttataatttaaactccttgaaagagatgttcttacaagagaagctgatatactcttcatatctcaacaactggcacaacttctcccgtgtactaggctctaaattaatacttgttaaatatatttttaaaacacagtaaaaaaacttgctgtaaacaaactctatattgtaattgctacataccgcttctagggaatgaggtgtaaaagcataaacatctcatcgtaagcatttgtttattttcattcatatttttagtagcaattttatattgtaaaaaccagtgagtacaatttcacaacccttctctcaaggagaaaggggaaacttactagaataatagacaagttgaaaatagtttaagtctcatttgttgtcgtttatcaaaggacctgagggatawatgggtcttcaacaacttcaacgaaatcctcataaaatggaaaatagtaaaaatcttcaatcaaactgcctaaataagtacccccaactacactctttg

SEQ ID NO: 552524 - DNA, 536 bp, Homo sapiens
catcacagtactaatcatggtactctgtttctgtttataatttaaactccttgaaagagatgttcttacaagagaagctgatatactcttcatatctcaacaactggcacaacttctcccgtgtactaggctctaaattaatacttgttaaatatatttttaaaacacagtaaaaaaacttgctgtaaacaaactctatattgtaattgctacataccgcttctagggaatgaggtgtaaaagcataaacatctcatcgtaagcatttgtttattttcattcatatttttagtagcaattttatattgtaaaaaccagtgagtacaatttcacaacccttctctcaaggagaaaggggaaacttactagaataatagacaagttgaaaatagtttaagtctcatttgttgtcgtttatcaaaggacctgagggataaatgggtcttcaacaacttcaacgaaatcctcataaaatggaaaatagtaaaaatcttcaatcaaactgcctaaataartacccccaactacactctttg

SEQ ID NO: 552525 - DNA, 1038 bp, Homo sapiens
agccaaaggttttgttttggcctctgtactgatctgtgttcctgatcctaattcctatctgtctaatgcggaggtgatcaagtgtggctgcaggcctttgttttccaatggtgctatattctgctttcaaatacttcactgaacccagctatcttgcaaaccttcagtggtgctgtccctggatgggggctacmaaagtgagacttggtgaagatcttgctcttcggtgctgaaaatggatgatggactttggctgtgatccaggcctaagatggtgcttgtcctatatccacctagtcttcaactggggctataatcctgtcctggaaaaagaactctgaagaaaacctgggtcgggggaatgattcataaggaaaacggtctgcatttaagttctggtttgaaagtagccaagggactgatggtggacactccagatgtggttggaagcataagtggggagactggctggttgagttttatttgttattttctgtatagaaagattcagatatatcaacacttggaattgttacccatctgcagaactgacttctcaaataaagatgctaaaaataaaaaaaaaaaaaaaaaaaagaaagaagccagacttaaagggctgtatgctggatgattgcatctgtatgacattctggaaatggcaaaattataggaacaaaactcagatcagtctttgccaggggctgagagtagagtgggagatttaatacaaggggggatgaagagaccttcttgggtaatagaagtattagatagcttattaataatagcaattacatgactgtatgaatttgttaaaatttatagaaatgtgtatcttaaaagggtgaatattacaatttataagttaaacttcaacaaacctaaaacaaaacaaaaacaaaataggagtgttatggtagtgcagtggttctcaaactttagtgtgcatcatagtcacctgaagagcttgatgaaacagactgctgagtctgactgggaatcattgtgattcagtgactttgggtgaagacctga

SEQ ID NO: 552526 - DNA, 595 bp, Homo sapiens
tggattgcaccaagattaaaaaaaagcagaagaaaaaaaccaagagaaagaaaagtgaaagaatgtctttgtgagcctagcttcctattttccttaaacttatttgcaacaatgttgtttctcatgcttgccacttacataattttattttctaatatccatattttattcagattttacatcttagaaacagaaaatccttttgtaaaagatgrcatcttagaaaaatgaaatgtagtaaactagtaccctagaactaaagtcatatctcatttgctaatcatctatttcatatgagttttaattatattttcaattgcttcccatgcctatattttgtttttcaattaaaatggtaaatccttcaaggtagacagtccccagtgggtcctagtcactttacagacactgttttattctgaattcttttaattacactgtgtgatatattactcccatttactaacaaggaaattgaggctcagggaggtgaagtcactaacctaagatcttatagccaacttaatagcagaatcagaatctcactgatgagcgcagggttgtggcagtacctctctgcaaggatgtaagggtg

SEQ ID NO: 552527 - DNA, 628 bp, Homo sapiens
cctttcgtcagcgttttggccctattggtcattttatgcttcatagatttttttaaaaaagatatttagacttcccactttttacggtttttcagaacttgtctttccgcacattttgagacgttcacagtaataactgaaggttatgcaataaccgaaggttatgtattagtaatacagatgccaggcatccactttgctaaggggctcctagacttgagaaggattggaggaggggattcatatataaggtgataaagaatcttggtgctggaaattagaatcaagagaaataataattggatgttaaacttaaccatttagacggcttatttttccactgggctatgacaagctctataagtagaacaggtctggtgttgcccaccattgaatcccatwtcttgcacagtacctgggacatagctgggactatataaatatctagttaataaattaataagtgaatgaaacagggaaagaaccctgcctatcttgttctttatagtattcctagaccatagcatagaacctgatgctagtagatgctcaataaataatatagacttggatgtcttcctggagcttaaaatatcaaaatgttaggttttgtgaaattcagccgcta

SEQ ID NO: 552528 - DNA, 1618 bp, Homo sapiens
gtggaacaggtgggccaccactaccatcttctctcatttcagtcaaatctctattatcttctacaggtagattcttgcaacaaaaacagtcaaaatctttaaaaagtaatttttggatttctataagctacttggtgattatccttcaacaggcacaaatctgttcagaggaaagaactgggctttggaagggagagagtatggctcctttcacatttctaaatggtacgctgccagtgcccctcaggcaaaaagaatctaatcaggtttattatctaacaaggaggtatctrattatctaatatagatgattctgtatctaatacagaatttataaatatttaagtagtcgtatcagcctcaacattataaaacatcaatctgagaggggttagcactgttacttgcacatttaatgaacagaaaagaaattagcaacatctttctgctgtgaaatccactgaactattagtcaattgcacataatgagaaagaaaacatgaaaagtatgacaaagtgctattcaaaatcacggtgaaataaaaatgaccttaaaattttatttttaaatatatttcctctacctttttctttatcctatattcctccccctatttacttatttcaagaataaagtcagaaagttcattttctttattgactttaccctctactttgaaaaagcacccatggctgctagcagaaatactacaggggttttaagactatcaatctatttcacatcaagaacaaagccattcagataaaaatctagcaaacaattctattttttcccattgaagacatttttattttctgtttaaggatcccttctcaggcctaaaaatgctatgggctacatttaaggcaagaggaaatgaatataatcccacacaaattttctaatagcccttctcttagccttgttacatgacctcttaagaatactcattctttttcatttcaacgtatgtttccaaaattaattcattaaatatgaattgccatccatcagacttttataatactataccaagagtgaaaatgttgatcttcatattttgaccttttttcatgttaattcttgattccagaggaagagcctttttttgatgatgttaattgcattaaaacaagtttgatgtgagtgtatatatgttcaatcacatatgtattgaggatctgtgacttgtaggaagaatattatacacatcatttcattcaattttcacaacactttgaaatagatactttgttcctacttaagggatgggagaaatgaggtaccaagtccctctgttagtaggtggtggagcttggattacaggacacttggattactctctttctactatgcactcttataagatgggcttgttctagtggaaatttacatatctcatatagacacagcaaaaaatattatgtgtgaagtgcagtgctacttgatggcgagaagtagaaaatagttgacttctatccattatttccaaagccgatgtgtagctgaattcaaaatccattactggcatggtatattcactgtcagatgggaagatattggccattagtaaggataaataatttacctgagattcccttgagcactcaaggtcag

SEQ ID NO: 552529 - DNA, 1351 bp, Homo sapiens
ttgtttctccgatgacaaaagaagtacctattcattgttgaaacttggaaaaatacaaagcacacaaaaataaagattaaaactaaaattatacataatagatttatgttgattaatatagtagagaatatcaaactgtgatgtaaagagagaatatggcctcattcacacttctaccccacacctggcaactgcagggcctcagggagataaatatcttgcaaaaagctraagatcatccttagcttcttgcagaaatgctgcactgtctctaacacatgtatagtttttaaaaatgcaatccaggccagctccagggtggtctgttctctattatttatgtatgcatgattcattttacttaccaccagctgtaatcccttctccccacccctagcaggcctattatgcaagtcccttccccctcctgagagcagctagggaggcaaactcattttcccatctatctgggtgaaatttaattagaaagccaaatctggaagaacagaacacaaaataaccacattaaataaaaataagagatggctctgaacttgactttaagccaaaaaatcaaagaactgcagtaatttgctgaatcatagatctaaatactcatttttgtcttctaacctctaagcccaactgaaagaggcttctaaagaaaaaaaagaaacaaacaagtactagatgaacacaaataacatttagaagtcataaaaggacaacaaggactctggctttctattccatctaaaacaataccaggcacatagtaggtactgtatgaaaattggatgaatggatagatgggctaaaagaccatacttcttgttttataatggaatgttaatcagaaaggagatgagaggaggttgagcagctgacggagctttctgcagtctcatggccacttgagaaacagcaattgtagttcagggtccatgagagatggggcccaggcgataccctagacttccagttaggacccaaaggagagagattggaagctagaaaacagccgtaaagtgctgtaagtcattgccagtgtagaattctatgcccagaataaacaagagacagagaagaatcaacttacccaaaatcagtcacaaaattaggtagtgggagacccaggactaaaatccaggcctcctgaacgtttcagggcccttttcactaaactgcactgggttctttgccccatatatatgttttttaagccactaaataaaaagaaaataaaacatctcagtattctccaaagaggagcagaacaaatttatcttacaagtttggattgttcacaaattgcatcccgaaactacttgggctcaccacttccctcagt

SEQ ID NO: 552530 - DNA, 617 bp, Homo sapiens
tgcaattcttttactgggtataaataccaaagccatgatcaatatgaccattaaggagcatatwcaagggtaggcagtgtatagttgtttatttgctagggagttgaggcaacctgtgtgtctgtccttgagtgagcttatagaaagtggtggatggatatcatagaatactatgcagaagatacagaaatgctgatggttttggaaaatgtagttgaaatgacaatgtaatctataaaatagcattatgtattcaaacttaaaataagcatgcacaataatacattttctacagaaatatgtaaatataaggatttgcacaaaatggtgaaaatggagataaaaggaaaaaatcaaacaagcatataaacaaattgataaataataaaaagccttaggctgatggaaataatgtgtatgtttgaggagtatgattaacttaagctttttcacctgaggcttaactaggaaaagaagaaagactagaattttagccttcaatagggcaaatgaaatagaacttgaacagctgtggaacttgagataaaccttaggttgctgctgtttttctttctagaatgggaaatatttgggtctcaaatttcctcatgactttc

SEQ ID NO: 552531 - DNA, 617 bp, Homo sapiens
tgcaattcttttactgggtataaataccaaagccatgatcaatatgaccattaaggagcatattcaagggtaggcagtgtatagttgtttatttgctagggagttgaggcaacctgtgtgtctgtccttgagtgagcttatagaaagtggtggatggatatcatagaatactatgcagaagatacagaaatgctgatggttttggaaaatgtagttgaaatgacaatgtaatctataaaatagcattatgtattcaaacttaaaataagcatgcacaataatacattttctacagaaatatgtaaatataaggatttgcacaaaatggtgaaaatggagataaaaggaaaaaatcaaacaagcatataaacaaattgataaataataaaaagccttaggctgatggaaataatgtgtatgtttgaggagtatgattaacttaagctttttcacctgaggcttaactaggamaagaagaaagactagaattttagccttcaatagggcaaatgaaatagaacttgaacagctgtggaacttgagataaaccttaggttgctgctgtttttctttctagaatgggaaatatttgggtctcaaatttcctcatgactttc

SEQ ID NO: 552532 - DNA, 1398 bp, Homo sapiens
  misc_feature 528, 529, 530, 531, 532, 533, 534, 535, 536, 537, 538, 539,540, 541, 542, 543, 544, 545, 546, 547, 548, 549, 550, 551,552, 553, 554, 555, 556, 557, 558, 559, 560, 561, 562, 563,564, 565, 566, 567, 568, 569, 570, 571, 572, 573, 574: n = A,T,C or G
  misc_feature 575, 576, 577, 578, 579, 580, 581, 582, 583, 584, 585, 586,587, 588, 589, 590, 591, 592, 593, 594, 595, 596, 597, 598,599, 600, 601, 602, 603, 604, 605, 606, 607, 608, 609, 610,611, 612, 613, 614, 615, 616, 617, 618, 619, 620, 621: n = A,T,C or G
  misc_feature 622, 623, 624, 625, 626, 627: n = A,T,C or G
tgagagcacatagtttagcatttactatttctctaaaatcacagaagcaaagctgcagccatgaacccacttcatttctttcattttgccatttcatccaatctatcctaaccaagtaaatccaaatactaaggactgccaccacatggcatttaaaaatattttagacttctttctctcaactgctgggactattcacattctgagctggcctggaagttctgtatgattgcccaaacggacataaatggctggcaaggaaatgaacgccaaagagctcacccacttcactgtaagaactaaacttgcttttatgtctacaataatgtcccgagttcaagaagcaatttcattccctaacctaatgtggaatgttagtgtcatccttctttcatggacagaaaccagccaccccgatacacacacatactctctatacaagtcctaaggcagaagcactcaaaggctcagatccttctgccttaacttctttgatcttgctagaacctgaactgcaaaaagaattannnnnnnnnnnnnnnnnnnnnnnnnnnnnnnnnnnnnnnnnnnnnnnnnnnnnnnnnnnnnnnnnnnnnnnnnnnnnnnnnnnnnnnnnnnnnnnnnnnnccccttttttgagacagaatctcactctgtcgcccaggctggagtgcaatggcgcaatcttgactcactgcaacctccgcctcccaggttgaagcgattctcctgcctcagcctcccgagtagttgggattacaggcgcccacaaccatccctgactaattcttttgtacttttggtagagacaaggtttcaccatgtttgccaggtgggtctcgacctcctgacctcaggtgatccacctgtctcagcctcacaaaatgctgggattacacagataatwtagattcttaagagatgtgtattaaaagctcctactttaattatatttatatccaagtttttttctaattgtttgaaatttacatattttgctatgtattattggtacatacagattttctacttatattttcttcaaaaaatagcttttatcttaacaatgattccatttattttgatatatacttataactgttgatttcaattcacctgacattaatattgccattcatgctttcttttggttgagtttaccttgaatctcacgttatcttttacctttatctacctatctttatttgttttaaagtgttcttcctgtaaaaacaatgtatagtcagattttgattcaatgtgatagtttctctcttaacagaagtacgtaggctgatcacatttattataacaactgatatatgtgatttattccttctatctgacattgtgcttcatctttattttactgttggcctcccccagactttcttatct

SEQ ID NO: 552533 - DNA, 1767 bp, Homo sapiens
ggccaggctggtcattcacacacccctgagctgaaggtgtgtcacctcttggtccaagagaggagatgctgtgcttcctaaatgagtctccagaagctgttattagtgggactaatgaatgctgagaagagaaaggaaaaagccagaaatttcccctgagttcccacattggaacatgccatcctagctgagcctgtagctttcaactatttgagagggcaagcaagaaacaaaggcacctgaacccaattttaggtgtataagactcggtttgtttcctgtagctcatcatcctcttatgtcttctgaaaggaaaaactgatagaaagtgagggtgagagaatacacaacagcgggaaggacatcagttctccatcttttgtgagatcagtgacatcagatgttaatagaggcaaaatatgacagatccagatgacaactgctggcaggactgtggggctgttctagcaggaagctctcacttcgttttcctttaggacaagcacaccgatgcagagctggactatctgcacaaacaaataagttgtttctgaattgtaagtgctataaagaggattataatgaggatttgaacttcagagtctagcttaactttggatatgagaaagaaactaaccatcaccttttcaaacctgaattgtctctctttacttctccaatcaattacaaaggtcatggatatggagaaattggaacccggatggtttagttcatatgaaaatatataaaatatatttccacagcagaaagaaatcttgtcaaagcatttttgagtggatttttgttgctgttgttctgtttggtttgctttttcattttatctgctgcttcccaatgtcccatcacctaagggtcactttattgtacattatttcatccatggctctactactgggatcttcatatggtgcatttatggaaactcataaattttttgttttcatgrcacaaagtggaatttctaataacaataatgttttaaatactatcaatctcatcattatcattatcaataccaaaaactataaaataaaaacgtagtacaagtttttatactaagtttaatagccatattgatgagtgtttgcaacgcatcatgttccctgtaagcactttatctgtattgcccaaagtaagttttacagcaaaactatgaagccaacacttttttttaatcatcacattaaaaaacaaaaattgatactcagaagccaatgcctcaaccagtagaggcagctagtgtgtcctccccaacctgttccaggtccctctcagcaaacacacatcttctgttcctttcctctgcctgctgcgctctctccagcatttgcaactgctgctctgtattcttaatgctctgtcaggaaagctatgttttcagggcataatctccgtggccataagtggtgacctatccccatgtggctaacttccaccacctggctaacttctactcatgaccttagaataaaagtcgccatctcagagtggccactttcaacgtcccctcttttttttttaaaacagtttcactctgtcgaccaggctggagtgcaatggcatgatcacagctcacagcagtgtagacttcccaggctccagcgatcctcccacctcagcctccaaagtagctgggaccacaagcgcatgcaccacgcctggctaagttttgtatttttttggagatgagagttgccgaggctgatcgcgaactcttgggctcaagagatctacctgcctgagctt

SEQ ID NO: 552534 - DNA, 550 bp, Homo sapiens
tattcataacaatttctcctctcccaggcaccattattacatccatttcatagaggtggacactggagcacagagatgttaaatagtttgctaaaaacctgcaaggacacaaaactaggcacatcggcttacatccatgcttatcaccagtatataatacaatagaataataatgatacctcttactatgatatttccccattaaaytttgtaaataccaagactgccaatcagttactcttctgaaaggatgatggtctgtcacatccctaagttatttcatttaggaatgcaaatgtcgttcatgttctgtgtgtttccctgttctttctagtcatttcccagtttacttccccatcttttactcgttatgtcactgtatttaattactcagagctaaaagacaaattttcctactttcagtgaaatgtcagtgaaatctggagatattaataaaaaggttctgaccaaaaaagctctaacaggtttcgactcccaggtaggagggaaaaaaatccccaaacaaatacctgtggtttgaataatttgt

SEQ ID NO: 552535 - DNA, 644 bp, Homo sapiens
gagtttaaaggaaatatgtttacacaaccttcctggcgtcctttataattaaaacatacaaatgttgtagtgtgtgactgtgcagtctaaaaatgcaacagttctttttctaataaattgacatttaataaccaaagctttatgctgtatgaataataaattaaaactttcatttatgctttatattttccctggtggaggacaatttgtattcatcaaataagtctaaagttcagcgccttccctttcaataatatttattcatggtgtttcctgctaaaatatatatttgccctagaagggtgtattataatctttatttaattgatatgagcccaagaagggtattaagatattagaatatctaatgtattcaataaaatacagacaatggaatcatatttctttttttgtttgttttgccaaacaatttcaaagaacatgaaagaaggaaaatgaaaaacatctattaaacaaatatggctttgttgaagcacaacacaggtatagctttacttrtaaaattatttaacaatacatttgaggagatggttgattatctcattaatatgccaatgctcttgtagctttgtattaggtaggtgcaaaataatagcggtttttgccatttaaaatcaatgaca

SEQ ID NO: 552536 - DNA, 671 bp, Homo sapiens
tgggagcccgtttgcccactttcagacggggcaacagttcttgtcttgcccactttaagggaacactgtgacgttccaaggggctgacgggtgtgactggttaaatcccgcacccaagacagtggtcttgggactcctgtccctcctccccatttcccgctgcctcaggaatccttcgacctggcttaaggagaagagaggccagcggccgcgggaggggcagggaccttgtgccctgcacagcactagagaccagaagctccaggctggctttccagccttcccgcccactcaagagtcctgcggcgcgccctgcatagtggaaggactcgccgcgtgcggacgcgtaagggaggcccctggagtgcagcggyggaagaggggaaacgccgggactctggaaagcaggctgcgtggcgtctacttccaacgcacgttttaaaggcactgcgggcgcgagccggcgcagaggctggggccctcctccgcggagccgccgccctctggtggcggcgtgcgaaagttacagcagttcgctctgccccggctccccgcgcaggggttgagggactgggttgccactcacacatattctaagccaggggcccttagggagctcccaattgagacctgaaaccggcccgaaggggaagcctgacatggggaagcca

SEQ ID NO: 552537 - DNA, 1456 bp, Homo sapiens
ggagggcctccacctactggtcatccttctcaactctcctttcagggttgttggccaaggcagaacctgagctccaaataaccctgctttacctcccactttacctcccacttttcccctttcacagaggaattgcaaaaactgctcctggaacaaatggagctccgcaagaagctggaacgggaatttcagagtctcaaaggtacccactgccatcctgcctcaccccacctcatcaccgagccttccaccagggtgccccgacctactccgaaagccgggtgccaggcaactggtactaggtgccctgcaggagacaagaaactgtccttttccagggctgcaggcgaatggctgggtgggagttgggggtaggggtgaaagggggggccaggagtgagaaagtggagccgggagagggggctgtgcgtaacagctctcacttaatcaatttgcacagataattttcaggatcaaatgaagagggaattggcttatcgagaagaaatggtgcaacagctgcaaattgtcagaggtaagacgggagtcaggtgagctcgtgcacgggccgtaactgcctctcgtctggcaggagccgcaatgttggctcagtcatttggatttaaattgaaggtaatttaacaattatttttttatttaatatgctttgtatactctgattagcctcagaatggcaagcgagcccagcaaacggcttgcaggcatcattacatggagtgattgaacttcttatcgcggcaatttccatggtttctaaattaaaaatcgaggcgtaaaattacctgggaagtaatgcctaagtttgctttaattttggttagatccatctgcctttaagcgccatcccaggccatttccttcctccgccagtctgcagttaggagctccggtaccccctcccccatccctggagttgtttctgcgcggagcttagccctggggagaggaggaagcccgggctgtgaccccggcctttcggagggtggtctgcgtttcctcactggcccctccccttgtcttccagataccctgtgtaacgaactcgaccaggagcggaaggcgcgctatgccatccagcagaaattgaaaggtgcggaagccgggaaacaaagataggaggggtgctgggtgccggccgtgctgtcgactgaatgaatgaatagtgggactagtgaggaaggccacgatccacgtggatcaggatctgtgagggagaaaagtgggaactgattttaacgggaagattattctaggatggtgggggtaaaaagaaagagccccttgggctttggacgtcagaaaaatctgccttctrttaccaattctggctttgagcaggttgactcctctcttactgtgcctcagtttccttttctgtaaaatggggctactgaaccagagcagtggttctgaatcaccagcttttgtcctaccc

SEQ ID NO: 552538 - DNA, 1413 bp, Homo sapiens
aaacagaaaaacaacctgatgtaaaaatatggaacgcttcacgaatttgcgtgtcatccttgcgcaggggccatgctaatcttctctgtatcgttccaattttagtatatgtgctgccgaagcgagcacggtgtttcgtcctttccacaagatatataaagccaagaaatcgaaatactttcaagttacggtaagcatatgatagtccattttaaaacataattttaaaactgcaaactacccaagaaattattactttctacgtcacgtattttrtactaatatctttgtgtttacagtcaaattaattctaattatctctctaacagccttgtatcgtatatgcaaatatgatggaatcatgggaaataggccctcttcctgcccgaccttggcgcgcgctcggcgcgcggtcacgctccgtcacgtggtgcgttttgcctgcgcgtctttccactggggccggggaggcgcggagggttcagacgcgggctcttactcaaacgctgatccccgaaactaccgagcagtgtctgcgcgacgcgaaagcatttttggagcgaggggccatggtgcccatgggattcccacgggtgttggactcgggaccccgaaaaggttgcgagtcgctggttggacccttccctgcgcggggacccgagagacgtgaccctagcgaggcctggggccacccactgtgggctggaaggggccgacaggggttgcggcgggggatcgtggggagggttggccagggcgcgccttcagcttcccctcggcttctcggaactagctctctgcattcggagccaaggcgatgagggtgtctgctttgggacgcaaacttccagtagtggtggaagtctgggaagggtcaccaccgtttgagccaacatttagaaagagccaggcgcttaacctaaatggtatcatttcccccattttgcagtttagcaaacaggctctgggaggttaaaccatctgctccagtgatcctgccactggttaaagtagttgggatttggatgcgagtctggtttcaaagacctttttttttttttttttttttttttttttacgcagtggagtttggaaaagatttgagaccacaagtgcagcctccgctttccttgttagagttactccagaagccctgaccagctcagactttccttcctacttccattccttcaacaaatattgaacatctgtggtgtcagcacccgggcttcagggatgcgtgagtgggcagggttgctatggtcatggagctcggttccagcaggggagccaggcagacatgaaagagccctctggatgccgagacgtgtgctgtgaaagtgtggcatagaaagtgcctgggggatgatggccacttcagtggggcaagagagaaggtgacattggagctgt

SEQ ID NO: 552539 - DNA, 1413 bp, Homo sapiens
aaacagaaaaacaacctgatgtaaaaatatggaacgcttcacgaatttgcgtgtcatccttgcgcaggggccatgctaatcttctctgtatcgttccaattttagtatatgtgctgccgaagcgagcacggtgtttcgtcctttccacaagatatataaagccaagaaatcgaaatactttcaagttacggtaagcatatgatagtccattttaaaacataattttaaaactgcaaactacccaagaaattattactttctacgtcacgtattttatactaatatctttgtgtttacagtcaaattaattctaattatctctctaacagccttgtatcgtatatgcaaatatgawggaatcatgggaaataggccctcttcctgcccgaccttggcgcgcgctcggcgcgcggtcacgctccgtcacgtggtgcgttttgcctgcgcgtctttccactggggccggggaggcgcggagggttcagacgcgggctcttactcaaacgctgatccccgaaactaccgagcagtgtctgcgcgacgcgaaagcatttttggagcgaggggccatggtgcccatgggattcccacgggtgttggactcgggaccccgaaaaggttgcgagtcgctggttggacccttccctgcgcggggacccgagagacgtgaccctagcgaggcctggggccacccactgtgggctggaaggggccgacaggggttgcggcgggggatcgtggggagggttggccagggcgcgccttcagcttcccctcggcttctcggaactagctctctgcattcggagccaaggcgatgagggtgtctgctttgggacgcaaacttccagtagtggtggaagtctgggaagggtcaccaccgtttgagccaacatttagaaagagccaggcgcttaacctaaatggtatcatttcccccattttgcagtttagcaaacaggctctgggaggttaaaccatctgctccagtgatcctgccactggttaaagtagttgggatttggatgcgagtctggtttcaaagacctttttttttttttttttttttttttttttacgcagtggagtttggaaaagatttgagaccacaagtgcagcctccgctttccttgttagagttactccagaagccctgaccagctcagactttccttcctacttccattccttcaacaaatattgaacatctgtggtgtcagcacccgggcttcagggatgcgtgagtgggcagggttgctatggtcatggagctcggttccagcaggggagccaggcagacatgaaagagccctctggatgccgagacgtgtgctgtgaaagtgtggcatagaaagtgcctgggggatgatggccacttcagtggggcaagagagaaggtgacattggagctgt

SEQ ID NO: 552540 - DNA, 1402 bp, Homo sapiens
tctgcatgtaacaaaattatacttgtatgccatacatttatacaagtaaaaaggaaagtcaggctgagtgtgggctccttcccattccctgtgtctcttcccccaaccctcactggcttctcctggaagcacttgctcaccacatcacttgcaactgaaatcttggctcaggagaaccttatctaataaaacaatagatttaaacaacaaagtaagggtggcaggacatagtaggtgtgttatcaaaagacccatgtttgcagctctgccgtgtaacagctctctgacctggagcaaggagcctagagccccaagcctgtctttcctcatttgtgaaatgaaaataagtatgcctgggctgggcgcagtggctcacacctgtaatcccaacacttggaagtccgaggcaggtggatcatttgaggtcagagttcaagaccagcctggccaacatggtgaaaccccgtccctactaaaaatacaaaaamatttagccggacgtggtggcacgtgcctgtaatcccagctcctcgggaggctgaggcaggagaatcgtctcagcttgggatgcagaggttgcagtgagctgagattgggccactgcactccaatctgggtgacagaatgagaccctgtctcaaaaaaaaaaaaaaaaaaaaagaaaagaaaataagtatgcccactctgcttactatatgcttgttgggaggaccggatgagatcatggatgatggaagtatttgaaagctgccaggcaccatgcaaacataaggaagctaatttttaaatcggaaacaaaattataacctaaagctaaagtcaccgatagggtttcagaagaaatcaattcaacagcagttataaaatacagaaaacacacttcatatcttattctcctcttccctcttcctttcccacatttttcatacttccaccatccaaaatgtttgctgttcttttcaggattccacctgtgttggaacactgatagtgactagagaaagtgttgcattcacctcttggttactcgcagtttttcacctggttaaccatctttgccatgcctgcctgtgtccactgtccactcctgaagactgcttttcatcttattagccccttatttctttcatttcaagttgcattggatcttaaaacttcaggaaggaaataggcatctccctgagttgttataggtcatagttcaaatgccatacttcagattgtgtgaggctgccatgaattgacggaacacaataaaatagagttactaaaatgtatggcccagatggtggcttgattaaaaacatctcagtgtgtccaaaatatcatggcaggcatacacaattttttttccatgaaggccctacaagattcacgataagattttatttttcatgaggat

SEQ ID NO: 552541 - DNA, 525 bp, Homo sapiens
tggttgatgaaatctatagttccaataagatgttaaagaacacactatattaaaaaatataaattagggctacaaaattataaattgcacgtggagggcaaaagtctagagtatttgtataagatcaaagttaagttgtcaacttataaataatattctgcataaacaggaactgaaagagagcaggagtagcaatacttatgccagacaaaatagatttctagccaaaaacttagaaaaaagagataaaaaggccattatatcatgataaaggggttaatttgggaagaggatgtaacrattttaaacatatatgcaccctacctcagagcacccagatatataaagcaaatattgtaagatctaaagaaggaaatagacagtaactcaaaatagattaaagacttaaatgtaagacccaaaactataaaagtactagaagaaaacattaggggaatgctttatgacatcagtctaggaaatgatttttatataagaacacagaaacagaggcaacaaaagcaa

SEQ ID NO: 552542 - DNA, 617 bp, Homo sapiens
ccagcttgggcaacatggcgagaccccgtctctacaaaaaatacaaaaattagctggatatggtggcacccacctgtagtcccagctacttgggaggctgaggtgggaggattgcttgagcccaggaggttgaggctatagcaagccgtaaactgtacttcagcctgggtgacagagcaaaaccctgtctcaaaaaaaacccctaaaaactgtaaccataatctcaacaaatctaaaaatcctaaatctccaattactaaygataacaattcatgtaatgtatataggaaaataacttggagcaagatttagaagaagataaatatattaatatatttatcttctgattaatcctcagttgttatcaaacaattcttattccaatattggcttaaaaccctcttaaaattaccctaaatcttttaagatcaaaactcagtgtaaccttccttccctatcactccttatctttctattttatttatccgtttatcatctataatttctcttatttatcagaattaaggacttccagctaagttgaaattttaaaaaaaggctttgcattccagcttatccactttatttgatttgctcatctactagttggttagtac

SEQ ID NO: 552543 - DNA, 648 bp, Homo sapiens
cacctgtcatgtctgaaagttccagtggctccaaatcctcacaaacaatcaatattcattatttttgtttgttggttggtttcgattttagcctttctagtgaacatgsactggtatctcactgagatttcaatttgcatttccttaattagtaatgatttttggcatctttccacatgataatcaaccattcataggccttttgtatcttatgtctgctcaaaccttttgccaatgttttctgagttgttcttgttccagttttagtgttgaagagttctttatatattagatacaagtcttcctgtatccaatgagttacaaatattttcttccagtcagtggcttgtgttcttatttgcctaacaatagctttcaaaaaggaaaagtttctaattttgacaaagtccacttgataatttttatacattcttgatttttgtgcctatgaaacctttgtctatcccacagtccccaaaaatctcacctgtattttcttccacacattttacagttagcttttgtatttatgtctgtggcccattttaagttccctaattctttcacttaaacacatatggaacaaaacattagttgaggaatgccttacttaaggggagttaaggtattcaatacttacctttatgt

SEQ ID NO: 552544 - DNA, 1032 bp, Homo sapiens
tgctgtgtgtgtcaatagacacaatgatagaacttcaagttttaaaaaagggagagaaaacagcggacctagatgtctatgagggaccagataataaggggcaggaaataagtgccctgtgttcgattataccacacagcagggacagaagcccttttcaagatgataagcgactttttatttccctgaagccttgagcttaacaaggtggtgtgagctatgggagtgagggaaggaatcaacacagagttcttggtaaaggcaactcgggctgaaggttggggtggtaacagggaagacggcatgctgagaatgaagtcttcgggcaagtggatgtgagttggggtgcggatttcatagctgttcttttttctctctttctccatttcttcattgagattactccctcagtatcagaaataaagtcatcactccataaatgttatcttgtgttattgttactaaagctactgtaattaagaaaatgggcgcaagtaaagcaagtaataaaatttagagtgtaaaaaatgctagaaaatttgaagacagaagaccacctttttaatgggttacatgcgtaaaagagaaataagaaaggtacagagagggtcacaaagagagttggaaaaaatgggaaagacccagcaatgccaaagaccaagggctgatccaccagggaagatttttaaatggaaggggagttgttccacgtggccaaaacactgggagtaacattcatctttcaatatcatcgcagcagttgggaaaaatgagcactgacaatgaactgtcataaaaattacatacaaaatcttttctatgggaaattatagttatcaaggactcgtgggattcacaaagaaggtagccagagaaacttcaataagaggaaaaattatgcttgcttatrtcactcctgtaagatgtcatttgaacatttttaattgaatgtgagatttcaaaagaatggttctgttggtgaacaggaatggagggcatgcaaaatactgagatttgtcctagcccggaaca

SEQ ID NO: 552545 - DNA, 564 bp, Homo sapiens
cagctcacacaaagattgaagcccagctgtcaatcacatctgtctccacaattagattaagttgatatttcatgcttgtggccaccttccataggaaaaagcaagtcctctctggaagaggatattcacatgytaagcttcaaattgtctccaaaatatctgtattacatgtataactttcaaaaaaaaatgtaaagcaatagtcatagaaaaacaagaaaatcaaaagaccatagacatatactcacaggatattctaataacttaaatcacaaaatcaaatagacttcctgatagattaaacaatgattagacgcaaattagacgtaggtgaaggtcaaccagatagcttagggtagaacatataggacagcataaaatatatagactaaattggaaacaaaacattttaatatagaaaatattgtaaaatacatatttaatacggagaaaatttgtaaagtataaaatatggtatcccagaaggaagaatgaggaaatgagaagaaacaatatttaaataattcatgccctgaataatctgaaattggcagaagacataaa

SEQ ID NO: 552546 - DNA, 806 bp, Homo sapiens
tgcagttgaataaaaatgagctttttgttctgctagtttttaaagcaaccctaagcacagtcagaggaatacaagtatttctagatgtttcaaattattaacaattattcattccttctttctatgctaataaaaaccaaactcctaagggcaatcatagagactatgaattgttctgggraaactcgttgtcttttttgcagtcatgacactcagaggtaaagtaaaataggatgtgggtgaaatgttttctgtgtgcaggatcatttttaatggtaaggagtaggactgctggtacaggttgtactttgtagtaatgactcattcttataaatcatagttctgtaaacacttgagttgatgtgaaacttttcataaagcaagttttatgaaattagaaggcgtatgccttggttacttctgaaataaagtcctgaggctcctatgtcatgagccctggtgtgctgatgtagattcctgggcctctgccagtcctatcagatcagacaatctggaaatgtggccctggactgcgtttttgacagtcaggtcaggtgattcttgtgcgcaccaatatttgaaaaccattgttctggagttctcaacttagcagagatcttttaaaaatgacgcctagttccacccccgtgaggttctgaattaattggtctggtgtgtggtgtgggcatctggaattttaaaagctcctcaggtgatggtaatgtgcaaccaagtttaacaaccagtgctctaggacagggattggcatttctttctttttttttttttaaaacaaaagggctaga

SEQ ID NO: 552547 - DNA, 569 bp, Homo sapiens
aaaaatcacccaacctctccatgtctcagtttctttgtttgcaaaatggcaataataatagtgttcctgtaggagtttgttgtgaagattaaaggtgtgatagagagctttgctgagcccctggcccacatcaaatgctccataaatatcatctgttagtattttgctgtgtttattctttttggtgattgtttcagcttgatttgctagcatgagagtggcacctctgaaaggtaagcaaacctcttttcactgtctttcaaataaaagtttattaatgtttacctatcattcaccatggcaagcaaacttcgtattatagttttcagggcattagtgaccttgtttaccaagtgtgaatttcccagtatcttctctctaaagtcaggaaaacagtgaatagcaggtagagaggtgctgctttgggcagaggagctcactttgtttgagctacttccagtgcttcctgmccccttctctagacctccgtttcctactaccactatagctcctttggcccattgcccaaggcttctcttcttttccagtttttttacttctatctcctc

SEQ ID NO: 552548 - DNA, 557 bp, Homo sapiens
agaacaacagaaactatgcaccttcaactcctgacactgtgcctggtcttctccaggtaatcctggctttcaggaacagttcagaagggacagttcagaaacagttctgaagagaattggctaattatcagctatagactcgtgtatccacagctgcatagctgagttctcttacaatgcacttaatatgttcacctcatgtaagacgttgackggcagtagctaatgcaatgaaaacatgtaataatctactatataaagaagcctagaagtataggtttcagagttggtgaaggtggttctaccacgtcattaaaaacctagatctgtctctttgtaactatgtgacttggcacatacatcatttctaccatccactttcttacatgaataatgtaactacaacatgagaagcactcaataaatttttctatcatcatcatcatcattgttttaaacactactattttatgacaggtttgacttgttcaagagttctactaaagccagaataataatccattggctagataatccctaaagtttatttcatattt

SEQ ID NO: 552549 - DNA, 542 bp, Homo sapiens
atgatgctaaattcatccattcattcagtaaatgcttactgagtggctaccgtgtatcacatgctaactaagcactgagaaacaagacagaaacagtccctatttctatggagtttrggatattagggggagttggaaggacaaacaaagtctctggtagtgatgaaggttatatagggatttaaaatatgttgatgtgatagagtgagactggggtaggacaatgaaagttttctcagaggacgtgaatttaagctaagattcccagaaaactttatcaaagggaatatcattctttttccatccatccatccacccagccagccagccatgatgccatgagaacatggtttgagcaccaccactgtgccaggtgctgtgagggatacgaagaagtaaaagacttagtctttgccctcagacaattcagttaggaacacagacatacacacaagagaattgcgttaacatttgctttgaaaaattaatccaagcccagagagaaagatcactgtgggtggaaattatccgggagatgccac

SEQ ID NO: 552550 - DNA, 542 bp, Homo sapiens
atgatgctaaattcatccattcattcagtaaatgcttactgagtggctaccgtgtatcacatgctaactaagcactgagaaacaagacagaaacagtccctatttctatggagtttgggatattagggggagttggaaggacaaacaaagtctctggtagtgatgaaggttatatagggrtttaaaatatgttgatgtgatagagtgagactggggtaggacaatgaaagttttctcagaggacgtgaatttaagctaagattcccagaaaactttatcaaagggaatatcattctttttccatccatccatccacccagccagccagccatgatgccatgagaacatggtttgagcaccaccactgtgccaggtgctgtgagggatacgaagaagtaaaagacttagtctttgccctcagacaattcagttaggaacacagacatacacacaagagaattgcgttaacatttgctttgaaaaattaatccaagcccagagagaaagatcactgtgggtggaaattatccgggagatgccac

SEQ ID NO: 552551 - DNA, 542 bp, Homo sapiens
atgatgctaaattcatccattcattcagtaaatgcttactgagtggctaccgtgtatcacatgctaactaagcactgagaaacaagacagaaacagtccctatttctatggagtttgggatattagggggagttggaaggacaaacaaagtctctggtagtgatgaaggttatatagggatttaaaatatgttgatgtgatagagtgagactggggtaggacaatgaaagttttctcagaggacgtgaatttaagctaagattcccagaaaactttatcaaagggaatatcattctttttccatccatccatccasccagccagccagccatgatgccatgagaacatggtttgagcaccaccactgtgccaggtgctgtgagggatacgaagaagtaaaagacttagtctttgccctcagacaattcagttaggaacacagacatacacacaagagaattgcgttaacatttgctttgaaaaattaatccaagcccagagagaaagatcactgtgggtggaaattatccgggagatgccac

SEQ ID NO: 552552 - DNA, 542 bp, Homo sapiens
atgatgctaaattcatccattcattcagtaaatgcttactgagtggctaccgtgtatcacatgctaactaagcactgagaaacaagacagaaacagtccctatttctatggagtttgggatattagggggagttggaaggacaaacaaagtctctggtagtgatgaaggttatatagggatttaaaatatgttgatgtgatagagtgagactggggtaggacaatgaaagttttctcagaggacgtgaatttaagctaagattcccagaaaactttatcaaagggaatatcattctttttccatccatccatccacccagccagccagccatgatgccatgagaacatggtttgagcaccaccactgtgccaggtgctgtgagggatacgaagaagtaaaagacttagtmtttgccctcagacaattcagttaggaacacagacatacacacaagagaattgcgttaacatttgctttgaaaaattaatccaagcccagagagaaagatcactgtgggtggaaattatccgggagatgccac

SEQ ID NO: 552553 - DNA, 971 bp, Homo sapiens
agcatcatgaaattattgtaattgatcatagacaaactcagaacttcgatgcagaagcagtgtgcaggtaccttctctaatttaatatgcttagtaaatgttcactttacatcttaaaacgaatatcattatagatatctttagtttatttcaaatatttttaaaatatgcgttgatgtttttaagcagtgtatacagatgtctgtggtgaaagctatagctccttcctgtagatttctctctcctcttctacttttccacatttgagttgtactaaatttagaggtgtgagctgggctcccctgataacttcagggtattccccccaccctgtgtattgctcataaaaaacattaaaattcacacagttcgcattacacagatacggtttggatttaaactagctattttaatcttcattattctctcccaaaatgaacatcggaaatgtgtgaaatataaattttttcctgcctgacacagatgggtagatcccatagcaggcttcccagtcatggagtgaatgcagccacttttgcagcaacagaaaatcttccagggaccaaaaccccctgcttgtttatagaaatgcttgcactctggggaggaaacacaggcctgttcataaataaatgctcagtcataagagttagctctggatgaactgattcatttagcagaagtggaatgctttgaagctagatggaagaggtcactaattaaatgctagaccaagacagagtccarttgcatggggagctggaattttcttgaatgttagtaagtgaaataaaaggtgagaaaatggctttttagactttggtaccctgacaagaaattagtggattaagagaagtttcttatcgcaggcatcatcttgctattctttgatgattttcagtttcccaaagaagaatttttcttaagcatctgttttagatatgttttaatggcttcaaataatctcatct

SEQ ID NO: 552554 - DNA, 738 bp, Homo sapiens
ggatccaaaccctratttttgggagtccccgatagttgctcactcatttattcaacaaggacaggatcaaggtatcttgaagatccttttctgatcttctctgggcttccagcttctcccagcattgtcacttcacttttgggggcctcagtctcttcccctaagaacaaggagactcaatgcagtgacttttaagccctgctttgctggagcccttcagggagataaatcaggggaagaaaaaaaggtgggtcccatcctgctcgacttcatccgcagctgctccagattacatgattacaacattatacgtcatagtaggcttttctttcttactttttttttgagatggagtcactctgctgcccaggttggttttttttgtttgttttttttgtttttgttttttttgagacggagtcactctgttgcccaggctggagtacaatggcacaatctcagctcactgcaacctctgcctctcaggttcaagtgattttccttcctcagcctcctgagtagctggtactacaggcgtgagccaccacacccggctaatttttgtatttttttaaatagagatgggctttctccatgttagccacgctggcctcgaactcctgacctcaggtgatctgcctgcctcagcctcccaaagtgctgggattacaggcatgagccaccgcgcctgacctgtaataggcttttctataaggaatccttctctaaatattaagg

SEQ ID NO: 552555 - DNA, 1275 bp, Homo sapiens
tacaaacatcttcagaatttcaaaggtttatcaaaattctccaacactacttaatattcagtgatagattatgaccctaaagtaacaggaattctccccactgagcattcctgtcagaaaaacaattccctcaggatatttaggtgatttctttttgccttgaataccaatgaaaattctccagtcaatacctttacctaaattgttttggaaatcaagcaaagttcaaaatatatacaatatagttctataactgggaaaagctttagggacaaagccaccttgtatcacattttaaaagactaaaacccagaaatgtttrgtgacttacccaaagcatgcgtctgtctagtttatttaaactctaactctagaattatgaaggatagatgagtgatgaaagcagtttttaaaaaaatcaaacatggccatctcatgtacattgacatacatcaagtcaatataaagtcagaggagatttaaaatcattctatcatcattgtcactgctaaaactgagttttgatggaatttcagaaaagtcatctattattaaaataacttcttttccatagcatttcaccctatggacattttaattcagactctggcatttaacaagattataagtgatgctgtatttaagatgaaggaatgggtggtgaaattctaaatcagaacccacaatagaagagacattaggataaaattaaatatcagaactggaaaatgtactacagggaggacagacttggagaattttctgggaggttctttttagctgactatttcattattacacatacaaagttcttgtggcaatcttctctaaaggaaaaactgacaagacagagggttaagtttctttcaagaagtaaacactctagggagaaaaagaagaatgacacttctggttcatcaatagcatcattaagatgtgaacatcatcagtaaattccaccacgttttcagccttaatgtagatagtttttctaagccgtctcgagaaacacatggggtataaacgtttaaattatgccaaaaactaattaaaacagatatgttgtagatgtaattgaatgcaaccatattacccatttgagaggactggttttaaggtcggtctcactctttaatgcttttctacagctctaagatgtaagtggatgtctcccctacccaattcagagaagccctgaaaccgaagccaaaagatgcactgagaagtcattgtattatatgacttatcttctttaaaagccctggctatttgaca

SEQ ID NO: 552556 - DNA, 1275 bp, Homo sapiens
tacaaacatcttcagaatttcaaaggtttatcaaaattctccaacactacttaatattcagtgatagattatgaccctaaagtaacaggaattctccccactgagcattcctgtcagaaaaacaattccctcaggatatttaggtgatttctttttgccttgaataccaatgaaaattctccagtcaatacctttacctaaattgttttggaaatcaagcaaagttcaaaatatatacaatatagttctataactgggaaaagctttagggacaaagccaccttgtatcacattttaaaagactaaaacccagaaatgtttggtgacttacccaaagcatgcgtctgtctagtttatttaaactctaactctagaattatgaaggatagatgagtgatgaaagcagtttttaaaaaaatcaaacatggccatctcatgtacattgacatacatcaagtcaatataaagtcagaggagatttaaaatcattctatcatcattgtcactgctaaaactgagttttgatggaatttcagaaaagtcatctattattaaaataacttcttttccatagcatttcaccctatggacattttaattcagactctggcatttaacaagattataagtgatgctgtatttaagatgaaggaatgggtggtgaaattctaaatcagaacccacaatagaagagacattaggataaaattaaatatcagaactggaaaatgtactacagggaggacagacttggagaattttctgggaggttctttttagctgactatttcattattacacatayaaagttcttgtggcaatcttctctaaaggaaaaactgacaagacagagggttaagtttctttcaagaagtaaacactctagggagaaaaagaagaatgacacttctggttcatcaatagcatcattaagatgtgaacatcatcagtaaattccaccacgttttcagccttaatgtagatagtttttctaagccgtctcgagaaacacatggggtataaacgtttaaattatgccaaaaactaattaaaacagatatgttgtagatgtaattgaatgcaaccatattacccatttgagaggactggttttaaggtcggtctcactctttaatgcttttctacagctctaagatgtaagtggatgtctcccctacccaattcagagaagccctgaaaccgaagccaaaagatgcactgagaagtcattgtattatatgacttatcttctttaaaagccctggctatttgaca

SEQ ID NO: 552557 - DNA, 1275 bp, Homo sapiens
tacaaacatcttcagaatttcaaaggtttatcaaaattctccaacactacttaatattcagtgatagattatgaccctaaagtaacaggaattctccccactgagcattcctgtcagaaaaacaattccctcaggatatttaggtgatttctttttgccttgaataccaatgaaaattctccagtcaatacctttacctaaattgttttggaaatcaagcaaagttcaaaatatatacaatatagttctataactgggaaaagctttagggacaaagccaccttgtatcacattttaaaagactaaaacccagaaatgtttggtgacttacccaaagcatgcgtctgtctagtttatttaaactctaactctagaattatgaaggatagatgagtgatgaaagcagtttttaaaaaaatcaaacatggccatctcatgtacattgacatacatcaagtcaatataaagtcagaggagatttaaaatcattctatcatcattgtcactgctaaaactgagttttgatggaatttcagaaaagtcatctattattaaaataacttcttttccatagcatttcaccctatggacattttaattcagactctggcatttaacaagattataagtgatgctgtatttaagatgaaggaatgggtggtgaaattctaaatcagaacccacaatagaagagacattaggataaaattaaatatcagaactggaaaatgtactacagggaggacagacttggagaattttctgggaggttctttttagctgactatttcattattacacatacaaagttcttgtggcaatcttctctaaaggaaaaactgacaagacagagggttaagtttctttcaagaagtaaacactctagggagaaaaagaagaatgacacttctggttcatcaatagcatcattaagatgtgaacatcatcagtaaattccaccacgttttcagccttaatgtagatagtttttctaagccgtctcgagaaacacatgggktataaacgtttaaattatgccaaaaactaattaaaacagatatgttgtagatgtaattgaatgcaaccatattacccatttgagaggactggttttaaggtcggtctcactctttaatgcttttctacagctctaagatgtaagtggatgtctcccctacccaattcagagaagccctgaaaccgaagccaaaagatgcactgagaagtcattgtattatatgacttatcttctttaaaagccctggctatttgaca

SEQ ID NO: 552558 - DNA, 955 bp, Homo sapiens
cagttgaagacattaaatagtaaaatcacacacatatggatgtaggaatayatcagatttccttgggctcctttccttctgtggaagagcaggctagaaattctatgttatgaaccaaaatggtgtgttttagggctagctattgtatctattttacagaaagggtaaaccgagccacagaaagtttttaaaggctctaggagaatgtgtctagcgagttatagagctcatattatttccactacaccacagtgtccactttgcctgtcgtgcccaacggcagctgaatgaagccagcaccgtctccactggccatttccttccaagtgcccaacggcgggtagctccacatccaagggagggcatcccactccacctgtgcagttctcagaaatctctacctcagtttaagccactgatagaagaatactcttaaaagtattcttaaaagatcttatgggcccaagtccatctatgccacctgtatctcaggcagcttgggggagacaagaagcaccatgacagatttatttcttaatcttgtgagctttttccaaagaacttggtaagcaaataaagtatgttttatgaaatagataccatcttaactattctcagtctgactcaagaaattataagcccttaaaaatcaagctgtgagtatgctatgttatggaatttgaattttagtagaatatagtcagtaagatgagttgcatagctttctggtagaaaagacctaatggaaatatgtcacacattatctcaatcactggacactgtgatcaagaataccttccttgagagataacttacacatgctggtcactatgattaactatcagcatttagaccattagctgatcttaatggtcacgaatgaggaatagaagaaaccagtgtttgaaatacatagagcataggactggccaaccctataatcttgagggttcaa

SEQ ID NO: 552559 - DNA, 589 bp, Homo sapiens
  misc_feature 249, 254: n = A,T,C or G
cttggcaagcatatggtaggcattagattagtgttagtaaaaggagccgagaattaaaaaaaaaaaggaaaagtccttttatatcatttgggtgtgttgccttcgcttgctaaaagactagctgaaaattgaatgaaattaacaagcaggtgttagatggggatgcagaatgttagagaaggtgtatcgaactaaagaggtaataaagagttttgagaatgaggtttgaggaaaacgaatatgtgcgtntgcanatttgcacacacatatatttatctgacagtgcctgtctttacttttgcagtaaatttaagagctgccctcaaaggcaaattaaatggtgtccattgtgctatttacaagggtcaggagaggttcttgggcatgataggagatgtggtaggaataygacagggtaaagcagttaaggactaaggagtagggattccaaactgaaattgctaggtccacctgctacgtattaattatgcaagaattactgtttgttcagtgtcattgttgcatctcttaagagaaaaaagtatatttgggaaatgtctgacaaatctattcactaaaagaaagaaaa

SEQ ID NO: 552560 - DNA, 612 bp, Homo sapiens
gagggaaactgataatgtctaactaacacaattttaaattcagtaagaaaatggtttgttagatcatgtagctcacttactcgccattgaaaaatgctgtgagtgtttccatggaaatctgaattcaaaagatctttcctttaatcatattctgagaattacacggaaaatatctaaaataggctttytttttccttgaacattacctactctatattcaccctcagggttttttctctcaaatgaatcaaatataaagagaaccttgtagaatactgagttgggttgtggagttgacttatcaagtgctatttttctcattctcatcacagctcatagcgtgttgggaaaaaaaatgatgcctgaatagctcatatgggcaggtggtcagtataattgatttccagttatgtatggttaaaatttaataatagaaaaaacatcctccgtaaagggaagtattgagaatacatctataaaatgttttcttaagagtagaataagttaatctgtggataataggtgtgtgtgtgtgtgtgtgtgagaataatccctctaagtcacagatttttacaatactaatatttgaaacacccaagcaagggcacagac

SEQ ID NO: 552561 - DNA, 612 bp, Homo sapiens
gagggaaactgataatgtctaactaacacaattttaaattcagtaagaaaatggtttgttagatcatgtagctcacttactcgccattgaaaaatgctgtgagtgtttccatggaaatctgaattcaaaagatctttcctttaatcatattctgagaattacacggaaaatatctaaaataggctttttttttccttgaacattacctactctatattcaccctcagggktttttctctcaaatgaatcaaatataaagagaaccttgtagaatactgagttgggttgtggagttgacttatcaagtgctatttttctcattctcatcacagctcatagcgtgttgggaaaaaaaatgatgcctgaatagctcatatgggcaggtggtcagtataattgatttccagttatgtatggttaaaatttaataatagaaaaaacatcctccgtaaagggaagtattgagaatacatctataaaatgttttcttaagagtagaataagttaatctgtggataataggtgtgtgtgtgtgtgtgtgtgagaataatccctctaagtcacagatttttacaatactaatatttgaaacacccaagcaagggcacagac

SEQ ID NO: 552562 - DNA, 1622 bp, Homo sapiens
actagcattgattgagtttgcatcagcctaaagtgtgtttcccagattgtaactttgttgtaaaaaattaaatgttcccacatattcctcttcattgctggagacaattctctatgaatattacacatttctgcatgtccaggccctagagaaagacatttatatccaatgcaagatgttgctttggctgcaattttcactgtgaagaaaaattacctttttttctcagactcaggctgtatatatatgagttcatggggccaagcctggttctggggtgggcctggagccttgggccctggaggccagcctggaccttggcctgcaggggctggcctagagctggggtggtggtcccagagcttgggttttatttctatgttacactcaacatgctgtgatctctcatgtggattcctcagctcttgtgaaaggatttttgtgtgtgaagatttgttcaaattgatgtttctgtgaggggccgagatccagaaagtctcattttatcacttgctgacgtcacaccccacggctactgtggcttttatgttttgttagtattccaccatattgtggcaagcctgcaattcaattaatattaaaaatcaatctgaatgagataatctcttaacagatatcccactctgaaatatcagggtggcttctgttttgcttatgtcttgactttgctttaagacaggtcatagcctgtgcatctcactaagcttcacagtgacaaggacatgttctgagctggccagtgtgtggcacacacccagccacgcctgcagatgtctgctgaaaggcagctttatgaccacccttttgctttgtgcctgtagagctacgaaaaccgtagctcactgagactcagttaccgaaactatcaaatgacaaacaagtcaagggtttgagatttttccctcaaggacatatcttctgtgaggctttcagctttcttaaaaaaatattttatttgaagataaaactctgctggacacactggctcacgcccataatcccagcaatttgggagtccgacacaggcagatcacttgaggtcaggagttcaagaccagccttgccaacttggtgaaactccctttctactaaaaatacaaaaacttagccaggcatggtggtgcacacttgtaatcccagctactctggaggctgagtcargggaatcctttaagcccgggaggtggaggttgcagtgagccgagattgtgccactgcactccagcctgggcgacagggtgagactcagtctcaaaaaaaaaaatacaaaataaaaaaataaagagataaaactgacttgttatatgcctgttaaaatgggtctcctccttatttttggtgtgtgcgtgtgtggttttttttttttttggcttcctctgttcattttcactcatctcccctttccctcttcagaggaccagatttgcccatcttctttcaagcagatgactgagtcaatcccacattacatatgaggaaactgaggtaagagtggaaataccctgaaaaaacaattttcttcctctgttaaaaggagataactatttttttccatagaactgttgtaaagatcagagctaatgtattcaaagttcctagtg

SEQ ID NO: 552563 - DNA, 1622 bp, Homo sapiens
actagcattgattgagtttgcatcagcctaaagtgtgtttcccagattgtaactttgttgtaaaaaattaaatgttcccacatattcctcttcattgctggagacaattctctatgaatattacacatttctgcatgtccaggccctagagaaagacatttatatccaatgcaagatgttgctttggctgcaattttcactgtgaagaaaaattacctttttttctcagactcaggctgtatatatatgagttcatggggccaagcctggttctggggtgggcctggagccttgggccctggaggccagcctggaccttggcctgcaggggctggcctagagctggggtggtggtcccagagcttgggttttatttctatgttacactcaacatgctgtgatctctcatgtggattcctcagctcttgtgaaaggatttttgtgtgtgaagatttgttcaaattgatgtttctgtgaggggccgagatccagaaagtctcattttatcacttgctgacgtcacaccccacggctactgtggcttttatgttttgttagtattccaccatattgtggcaagcctgcaattcaattaatattaaaaatcaatctgaatgagataatctcttaacagatatcccactctgaaatatcagggtggcttctgttttgcttatgtcttgactttgctttaagacaggtcatagcctgtgcatctcactaagcttcacagtgacaaggacatgttctgagctggccagtgtgtggcacacacccagccacgcctgcagatgtctgctgaaaggcagctttatgaccacccttttgctttgtgcctgtagagctacgaaaaccgtagctcactgagactcagttaccgaaactatcaaatgacaaacaagtcaagggtttgagatttttccctcaaggacatatcttctgtgaggctttcagctttcttaaaaaaatattttatttgaagataaaactctgctggacacactggctcacgcccataatcccagcaatttgggagtccgacacaggcagatcacttgaggtcaggagttcaagaccagccttgccaacttggtgaaactccctttctactaaaaatacaaaaacttagccaggcatggtggtgcacacttgtaatcccagctactctggaggctgagtcaggggaatcctttaagcccgggaggtggaggttgcagtgagccragattgtgccactgcactccagcctgggcgacagggtgagactcagtctcaaaaaaaaaaatacaaaataaaaaaataaagagataaaactgacttgttatatgcctgttaaaatgggtctcctccttatttttggtgtgtgcgtgtgtggttttttttttttttggcttcctctgttcattttcactcatctcccctttccctcttcagaggaccagatttgcccatcttctttcaagcagatgactgagtcaatcccacattacatatgaggaaactgaggtaagagtggaaataccctgaaaaaacaattttcttcctctgttaaaaggagataactatttttttccatagaactgttgtaaagatcagagctaatgtattcaaagttcctagtg

SEQ ID NO: 552564 - DNA, 1622 bp, Homo sapiens
actagcattgattgagtttgcatcagcctaaagtgtgtttcccagattgtaactttgttgtaaaaaattaaatgttcccacatattcctcttcattgctggagacaattctctatgaatattacacatttctgcatgtccaggccctagagaaagacatttatatccaatgcaagatgttgctttggctgcaattttcactgtgaagaaaaattacctttttttctcagactcaggctgtatatatatgagttcatggggccaagcctggttctggggtgggcctggagccttgggccctggaggccagcctggaccttggcctgcaggggctggcctagagctggggtggtggtcccagagcttgggttttatttctatgttacactcaacatgctgtgatctctcatgtggattcctcagctcttgtgaaaggatttttgtgtgtgaagatttgttcaaattgatgtttctgtgaggggccgagatccagaaagtctcattttatcacttgctgacgtcacaccccacggctactgtggcttttatgttttgttagtattccaccatattgtggcaagcctgcaattcaattaatattaaaaatcaatctgaatgagataatctcttaacagatatcccactctgaaatatcagggtggcttctgttttgcttatgtcttgactttgctttaagacaggtcatagcctgtgcatctcactaagcttcacagtgacaaggacatgttctgagctggccagtgtgtggcacacacccagccacgcctgcagatgtctgctgaaaggcagctttatgaccacccttttgctttgtgcctgtagagctacgaaaaccgtagctcactgagactcagttaccgaaactatcaaatgacaaacaagtcaagggtttgagatttttccctcaaggacatatcttctgtgaggctttcagctttcttaaaaaaatattttatttgaagataaaactctgctggacacactggctcacgcccataatcccagcaatttgggagtccgacacaggcagatcacttgaggtcaggagttcaagaccagccttgccaacttggtgaaactccctttctactaaaaatacaaaaacttagccaggcatggtggtgcacacttgtaatcccagctactctggaggctgagtcaggggaatcctttaagcccgggaggtggaggttgcagtgagccgagattgtgccactgyactccagcctgggcgacagggtgagactcagtctcaaaaaaaaaaatacaaaataaaaaaataaagagataaaactgacttgttatatgcctgttaaaatgggtctcctccttatttttggtgtgtgcgtgtgtggttttttttttttttggcttcctctgttcattttcactcatctcccctttccctcttcagaggaccagatttgcccatcttctttcaagcagatgactgagtcaatcccacattacatatgaggaaactgaggtaagagtggaaataccctgaaaaaacaattttcttcctctgttaaaaggagataactatttttttccatagaactgttgtaaagatcagagctaatgtattcaaagttcctagtg

SEQ ID NO: 552565 - DNA, 465 bp, Homo sapiens
cagtgagcccagatagcgccactgcactccagcctgggcaacagcaagactccatctcaaaaaaaaaaaaaagaaaaaaaaatggttatggccaagtttaattctttgggccatagtttaccaaactcctgatttagatgattagcaatagtcctacaaastctgaactctgtatatcaaggcagtatataattaaataactgattttaattactataggacttcaatgaaaggagagaatgctatcagttgaaatagttttctgaagagaaaatggggccagagacttcaggaatcagcaatatatttactgtctgttaaattaatcgccttttattacgtgctaatcaagttctgctttatttcatatgacaagagtggttttgaattaagtaactctcagacaattgtttcagcaaatgatttagttctcatttccatgcttacgtataagttctttcactc

SEQ ID NO: 552566 - DNA, 618 bp, Homo sapiens
tcataaaacagaagcacaaaagagaacaaaaaggaatgaaaagaaatggcagtatttttccaagggtgccaaacaaatgggaattggtagcaaaagctgagtaccaagctgatagtcaataaccaaggatctcaatacaaagagaacagagttgaagcccaactctgttctctcacagacactgtgtcaacacagacttgacaggcctcaagaagcaaggcacaagaggcctccatagatagcgcacttgatcaggktccaaagtccatagtgatgagcagttaagaatgtgtctcagtggagcttctaggaaaattacagaaatacagaccaggcatggtggctcatgcctataaacccagcactttgggaggctgaggcaggtggatcacctgaggtcaggagttcgagaccagcctggccaacatggtgaaaccctgtctctacaaaaaatacaaaaattagacaggtgtggtagcacatgcctgtagtttcagctacttgggaggctgaggcaggagaatctcttgaacctgggaggcagagattgcagtgagcccatatcgtgctgctgcactccagtctgggcgacagggcaagattcagtctcaaaaaaat

SEQ ID NO: 552567 - DNA, 703 bp, Homo sapiens
cgtttttcagtttcctataatgcacatcttaacttttaaaaaataaaggttattttaaaagccaaaaagaaaaaaaaagatctctaacctgttggctggttaaaatttgagaaaattagacaaatgcttacttttccctttttggctgacaaacaaaagcccagtgaggtatcctcatctgtagagatttatgtcctttgtggggggcctgcttctccctcaagatagagtaaaaaaaaaatcagtggtgtcacttgggctcaaaaggacagaagacttgacactggagtttgagggtcccagaggggctcagccacatagaccttcctgccccacccttcctaccacagccctttttaggagctgcccctacccccacaagactgtcctttgttgctgaactattaattacttaaatagtcattgatcacctaccctytgctaggcccaggagtcctgtgagatgggctcttcccttagtcctcattcccactggctattgacaccatcccccgctacacccccaattctactatccccttccagcccgacacaggacttgcctctctgagcctctgacctctgctttctcccagcatctattttggttcttcctccttggctcagtaagtacatggacaatcccagaccagccttaaaggcagccaccccccatgttggcctcagcctcaggggcagggga

SEQ ID NO: 552568 - DNA, 703 bp, Homo sapiens
cgtttttcagtttcctataatgcacatcttaacttttaaaaaataaaggttattttaaaagccaaaaagaaaaaaaaagatctctaacctgttggctggttaaaatttgagaaaattagacaaatgcttacttttccctttttggctgacaaacaaaagcccagtgaggtatcctcatctgtagagatttatgtcctttgtggggggcctgcttctccctcaagatagagtaaaaaaaaaatcagtggtgtcacttgggctcaaaaggacagaagacttgacactggagtttgagggtcccagaggggctcagccacatagaccttcctgccccacccttcctaccacagccctttttaggagctgcccctacccccacaagactgtcctttgttgctgaactattaattacttaaatagtcattgatcacctaccctttgctaggcccaggagtcctgtgagatgggctcttcccttagtcctcattcccactggctattgacaccatcccccgctacacccccaattctactatccccttccagcccgacacaggacttgcctctctgagcctctgacctctgctttctcccagcatctattttggttcttcctccttggctcagtaagtacatggacaatcccagaccagccttaaaggcagccacmccccatgttggcctcagcctcaggggcagggga

SEQ ID NO: 552569 - DNA, 590 bp, Homo sapiens
aaattacatgaaattcagacttcaatatctgaatttagaatacagccatactcattygtttacatattgtttatggctgctttcatgctacataggtagaattaagtagttataccagagatcttaatggcctgtaaagcctgaaatattttctgcctggctccttactgaaaatgtttgtcaattttaatactattatatttaacaattactggaatgctttttttcctgcgtgattgtgttatatattattagattcatttatttactcaattttagggagaaaggaattttttttaaatgttggaaattggcagtgatcgaattttagaattagaaggatatttagtgttcctgtagtcccacactgtccagtaggataaccactagccaaatgtagccatttaaattaaatataaaaaattcttggctgggcgcggtggctcacgcctgtaatcctagcactttgggaggccaaagcgggcagatcacttgaggtcaggagttcaaaaccagcctggccaacatggtgaaaccccgtctctactaaaaatacaaaaaaattagccgggtgtggagacaggcgcctg

SEQ ID NO: 552570 - DNA, 590 bp, Homo sapiens
aaattacatgaaattcagacttcaatatctgaatttagaatacagccatactcattcgtttacatattgtttatggctgctttcatgctacataggtagaattaagtagttataccagagatcttaatggcctgtaaagcctraaatattttctgcctggctccttactgaaaatgtttgtcaattttaatactattatatttaacaattactggaatgctttttttcctgcgtgattgtgttatatattattagattcatttatttactcaattttagggagaaaggaattttttttaaatgttggaaattggcagtgatcgaattttagaattagaaggatatttagtgttcctgtagtcccacactgtccagtaggataaccactagccaaatgtagccatttaaattaaatataaaaaattcttggctgggcgcggtggctcacgcctgtaatcctagcactttgggaggccaaagcgggcagatcacttgaggtcaggagttcaaaaccagcctggccaacatggtgaaaccccgtctctactaaaaatacaaaaaaattagccgggtgtggagacaggcgcctg

SEQ ID NO: 552571 - DNA, 640 bp, Homo sapiens
taaaacattgattctgaaactttttggcctggggttcgttttatatgattaaatattattgcctagagggaaccaacaccctgaattaagaatttattatgtccattcccttttaaaacattttattacatatgtgtatggtcataaataatatgtagaatttgttttcatgtcctaaaattgtatataaattgttttacactctacatattttgcaactttcttttgtctggtcacattacatttttgaggtcagtccttattgacacaggaagctctggttttctatcaaatgactggatctcaaagtctcttcataatgataaataaataattaaaataaagaaaaattattgcaaattccaaagagcttttatttaagtcagttgtgtcttttgatatttactattttagaaataaaaactaaaatattttaaaaacaagcatgcggccgggygtggtggctcacgcctgtaatgccagcactttgggaggccaaggcgggcggattacgaggtcaggagatcgagaccatcctggctaacacggtgaaaccccgtctctactaaaaatacaaaaaattagccgggcgtggtggagggcaccggtagtcccagctactcgggacgctgaggcagag

SEQ ID NO: 552572 - DNA, 678 bp, Homo sapiens
tcacttatgtgtttttggcttttttctttcacttgtcttaaaaaatttaaatctcaggccgggcgcggtggctcacgcctgtaaatcccagcactttgggaggccaaggcaggcggatcatgaggtcaggagattgagaccatcctggctaacgcggtgaaaccccgtctctactaaaaataaaaaaaaattagccgggcgtagtggcaggcgsctgtagccccagctactcaggaggctgaggcaggagaatggtgtgaacccgggaggcggagcttgcagtgagccgagattgcgccattgcactccagcctgggtgacaaagcgagactccgtctcaaaaaataaaaaaaaaaaattttacatcccaacaattttgtttatatagtaaaaaggaaaatatttttgttatgtattcctttcctgtctcgtggcactgtgtgctatttggatctagtgtggtcctagactaatcctgttctcacatgggaacagttagagcccttacagctcttattttgcaaataaatgtatgaagtttatccaagtatttgaaaggaaattctgaagatagtggtgcattgaggaaagaccatctcattataattaaaatagttttaaaagtatatttattatgagtttttgtaaatcctgtgtctctacaatacatacatacaa

SEQ ID NO: 552573 - DNA, 564 bp, Homo sapiens
  misc_feature 561, 562: n = A,T,C or G
cactggctgcattttgtagtcttccatcttagtcttataacttctctcatacaataagtgtttattcagtccttattgtgttgcagtgctgttctggtttctagaattggagtgtacaaaataggtccctaatcacacagaacttacatgtgtgtcggagagggaggagatagagatattaaataagtgcattgagcatgcaataataatctattttctctccttttagatttcaaaatattcaatyggcatataaaaattgtatatattcagaggtatacaatgggatttgacatttatatatacatactatttatattctcttatagagaaacatgaactgagacactgggattcaagtgtttcttcatttgtacaatgggaataataatatcctttctgatagagttctgaggaacagtgaaaatgtacatgggaaaagagtaaaatataaagtactatataaattttaggcattattcttatttttgagagcaaacagagaggcattaaaatttactctcatattcaggtagaattataaaaattttccactcacannaa

SEQ ID NO: 552574 - DNA, 564 bp, Homo sapiens
  misc_feature 561, 562: n = A,T,C or G
cactggctgcattttgtagtcttccatcttagtcttataacttctctcatacaataagtgtttattcagtccttattgtgttgcagtgctgttctggtttctagaattggagtgtacaaaataggtccctaatcacacagaacttacatgtgtgtcggagagggaggagatagagatattaaataagtgcattgagcatgcaataataatctattttctctccttttagatttcaaaatattcaattggcatataaaaattgtatatattcagaggtatacaatgggatttgacatttatatatacatactatttatattctcttatagagaaacatgaactgagacactgggattcaagtgtttcttcatttgtacaatgggaataataatatcctttctgatagagttctgaggaacagtgaaaatgtacatgggaaaagagtaaaatataaagtactatataaattttaggcattattcttatttttgagagcaaacagagaggcattaaaatttactstcatattcaggtagaattataaaaattttccactcacannaa

SEQ ID NO: 552575 - DNA, 561 bp, Homo sapiens
atcagaggggctctctgatggaggcaatacttcactgtttctacagagatggtgcagacttttgagtctgaaatttaaaaccttcttgaactttcctaatgaaatgaattaagtcaaggtttggttgatggaatagcaaggaacaatttccaccttttctgtgtggtatttgaggtccttctattgcctatcaggctcacctgctcacaagagccactctggaaacatttgctaagcaaaactgagttctactccacttctctcctccacctccagggaagagcaaaaggcatgagagagaaaagtggaaaggattcctgttcaactcaagtcctgaaccaagtccaccattcttatatctactaarcaagaggccaacatttccaccagagcatgtcctcacatcttgcttaatgttggaaagctgagtgcacagaacagctctaggcaacaccaactgaaaatgtttctcatagtttcatattttaagttgatgcttaaaatagtaaacacatattttatatttaccaataactttaggtttcagaagtactctttagc

SEQ ID NO: 552576 - DNA, 1246 bp, Homo sapiens
ttgcctttgaccaaagggatatgaatagtttttgctggaaataataatagataggtctgtgaaattttgccatcctttagtgtcaaacactgaaggaaatgatatagagatatttatcacaataaatatcattggcaaggagtcaatataataaatatttaattcggtttattttaatcttctaacaacaaccatatgaatttcaatcaaactttgaaagataacgagtgggagaatttctgcttctgggacgatggagcagagatatttttccttattccaaccattaggtaacctgggtattatacatcaaacaagcataagaagactcagaaagytggagagaaaacacatgtgccagtaaactccagacttgaagaacaagttggtgagttctctggattttctttctgcctcttctatccagaaaggatactggagaagatggcaatccttaagttcccatgagagcagaaaaaagaatgctaagaaagcctcctttctttatttagccaaaggactaggattagggcaacctagaaagactaaaaaacacagaaaacttttagacaataatcactctatcccagcataccactgcagaaaaaaccatcctcatcctgataaggaaagtttgaatgaaaagaatacatttccatcttttccaggtagcactgagacacactcaagtcttccctctgacagggtagcattagaaatgtgtaagtagggaaccagagattttatccctgccaaatggtaacacctctcctcactccatggtgtcagtggatatcaggaggtatgtctgtacatttaccccaaccatcagtaacaagctattcctccactttctctgtaatgttttatcaggtaaggactcgtccagagtcaagacttttgccactactcagtaataatgagaccatatccttccctgtggtgttggtggaggccccacatgcggaataataacgaagagctacccttgctcccaggcaggatggtatcacctgaagtttaatagggagcttgaactataagagtggaccagatcgcttaagtgtgaaaatattcagtaaaaagcagaggtctaaaaagcctgacttcaaaatttagtcaggctacacccaacctgtggtaacaaggatcttctcttcatttcagatgtgagtggaggctgtgaaaaacttgtacttgtatgctcacctgacagtaataatagggtacacatgcgtacccacta

SEQ ID NO: 552577 - DNA, 1246 bp, Homo sapiens
ttgcctttgaccaaagggatatgaatagtttttgctggaaataataatagataggtctgtgaaattttgccatcctttagtgtcaaacactgaaggaaatgatatagagatatttatcacaataaatatcattggcaaggagtcaatataataaatatttaattcggtttattttaatcttctaacaacaaccatatgaatttcaatcaaactttgaaagataacgagtgggagaatttctgcttctgggacgatggagcagagatatttttccttattccaaccattaggtaacctgggtattatacatcaaacaagcataagaagactcagaaagttggagagaaaacacatgtgccagtaaactccagacttgargaacaagttggtgagttctctggattttctttctgcctcttctatccagaaaggatactggagaagatggcaatccttaagttcccatgagagcagaaaaaagaatgctaagaaagcctcctttctttatttagccaaaggactaggattagggcaacctagaaagactaaaaaacacagaaaacttttagacaataatcactctatcccagcataccactgcagaaaaaaccatcctcatcctgataaggaaagtttgaatgaaaagaatacatttccatcttttccaggtagcactgagacacactcaagtcttccctctgacagggtagcattagaaatgtgtaagtagggaaccagagattttatccctgccaaatggtaacacctctcctcactccatggtgtcagtggatatcaggaggtatgtctgtacatttaccccaaccatcagtaacaagctattcctccactttctctgtaatgttttatcaggtaaggactcgtccagagtcaagacttttgccactactcagtaataatgagaccatatccttccctgtggtgttggtggaggccccacatgcggaataataacgaagagctacccttgctcccaggcaggatggtatcacctgaagtttaatagggagcttgaactataagagtggaccagatcgcttaagtgtgaaaatattcagtaaaaagcagaggtctaaaaagcctgacttcaaaatttagtcaggctacacccaacctgtggtaacaaggatcttctcttcatttcagatgtgagtggaggctgtgaaaaacttgtacttgtatgctcacctgacagtaataatagggtacacatgcgtacccacta

SEQ ID NO: 552578 - DNA, 1246 bp, Homo sapiens
ttgcctttgaccaaagggatatgaatagtttttgctggaaataataatagataggtctgtgaaattttgccatcctttagtgtcaaacactgaaggaaatgatatagagatatttatcacaataaatatcattggcaaggagtcaatataataaatatttaattcggtttattttaatcttctaacaacaaccatatgaatttcaatcaaactttgaaagataacgagtgggagaatttctgcttctgggacgatggagcagagatatttttccttattccaaccattaggtaacctgggtattatacatcaaacaagcataagaagactcagaaagttggagagaaaacacatgtgccagtaaactccagacttgaagaacaagttggtgagttctctggattttctttctgcctcttctatccagaaaggatactggagaagatggcaatccttaagttcccatgagagcagaaaaaagaatgctaagaaagcctcctttctttatttagccaaaggactaggattagggcaacctagaaagactaaaaaacacagaaaacttttagacaataatcactctatcccagcataccactgcagaaaaaaccatcctcatcctgataaggaaagtttgaatgaaaagaatacatttccatcttttccaggtagcactgagacacactcaagtcttccctctgacagggtagcattagaaatgtgtaagtagggaaccagagattttatccctgccaaatggtaacacctctcctcactccatggtgtcagtggatatcaggaggtatgtctgtacatttaccccaaccatcagtaacaagctattcctccactttctctgtaatgttttatcaggtaaggactcgtccagagtcaagacttttgccactactcagtaataatgagaccatatccttccctgtggtgttggtggaggccccacatgcggaataataacraagagctacccttgctcccaggcaggatggtatcacctgaagtttaatagggagcttgaactataagagtggaccagatcgcttaagtgtgaaaatattcagtaaaaagcagaggtctaaaaagcctgacttcaaaatttagtcaggctacacccaacctgtggtaacaaggatcttctcttcatttcagatgtgagtggaggctgtgaaaaacttgtacttgtatgctcacctgacagtaataatagggtacacatgcgtacccacta

SEQ ID NO: 552579 - DNA, 1393 bp, Homo sapiens
gcccttcatgatktctggaagcaatattgatgactggttaactgaggtcacttctaggagtttgtttcaaaaaagcaactgaacaaatagacaagaatttatatacaaaaatatatcatgatattgtttataatagcaaaagttttaaacactataaacatgaattttttaaagtatggcacattttatatatcatgaaaataattgtataaatctatatttaataatgtggaaagttaccctaacaatgctttaaatcctcatcaagactacctcaggattctcagaggctgttacatatagaaggagtaatttcaaacagattcataagcatttgggtaaagcattaagccaaagaccaatgattgtattcagaaagcttaagtgaacaaacatttactacgcacctatagtgcaccacaaccatgcccagcatgagggagacaaagagaatccctggtcccactgctacagcccttgccccagagaaagggaacccctctgtgcactgttggagcccctcccaacagcgatgtccagggtcatggtatgttactgtttcctgtaataaaactgtgtgctttgagtcagggttgttgggaataatgtgaaactattcttgttttcttcttcatcctgaataaatcagaagtaaaaagaattcatttactgatttatatattcaaatattcattcagaaagttgtccaaatactcattggacccaaatgtgaaacataatctccccaaaatctaggaaatgagcaattggtgatttgctcaatccaagcccatccagagggtagactttgctacaacacactacagacccgacttgagatggagagataggaatggaagggagacactttttgtctctcagggacctgcacatccagtgacacacccctgatctcctgccttgtgagatccacaatttgagtaaatgcagagttgtggtcgtccagtctagccacccccaagagaaaccccctgacagctccctttccccaggagaaccttgaccttagaggttggcactgcaccagtcaaggccgcccttggcccctccactgactgagcccttgactgaccaaatgctctcatagagctgccgttagccacgccagggcatcagcagagagaagggtgctggtttctatctgggttcaaagcctggctctgccacttgttaaaaagtctcttattccctgcgattctcagctttttcatcttcagaacagaaacaaataaaataacttcataagattggtacaaagaattagctggatgagaaagcgcatgcctttaatcccagaactttgggaggctgaggcaggagactcacttgagcccaggagttcaagaccagcctggaaagtatagtaagaccc

SEQ ID NO: 552580 - DNA, 1393 bp, Homo sapiens
gcccttcatgatgtctggaagcaatattgatgactggttaactgaggtcacttctaggagtttgtttcaaaaaagcaackgaacaaatagacaagaatttatatacaaaaatatatcatgatattgtttataatagcaaaagttttaaacactataaacatgaattttttaaagtatggcacattttatatatcatgaaaataattgtataaatctatatttaataatgtggaaagttaccctaacaatgctttaaatcctcatcaagactacctcaggattctcagaggctgttacatatagaaggagtaatttcaaacagattcataagcatttgggtaaagcattaagccaaagaccaatgattgtattcagaaagcttaagtgaacaaacatttactacgcacctatagtgcaccacaaccatgcccagcatgagggagacaaagagaatccctggtcccactgctacagcccttgccccagagaaagggaacccctctgtgcactgttggagcccctcccaacagcgatgtccagggtcatggtatgttactgtttcctgtaataaaactgtgtgctttgagtcagggttgttgggaataatgtgaaactattcttgttttcttcttcatcctgaataaatcagaagtaaaaagaattcatttactgatttatatattcaaatattcattcagaaagttgtccaaatactcattggacccaaatgtgaaacataatctccccaaaatctaggaaatgagcaattggtgatttgctcaatccaagcccatccagagggtagactttgctacaacacactacagacccgacttgagatggagagataggaatggaagggagacactttttgtctctcagggacctgcacatccagtgacacacccctgatctcctgccttgtgagatccacaatttgagtaaatgcagagttgtggtcgtccagtctagccacccccaagagaaaccccctgacagctccctttccccaggagaaccttgaccttagaggttggcactgcaccagtcaaggccgcccttggcccctccactgactgagcccttgactgaccaaatgctctcatagagctgccgttagccacgccagggcatcagcagagagaagggtgctggtttctatctgggttcaaagcctggctctgccacttgttaaaaagtctcttattccctgcgattctcagctttttcatcttcagaacagaaacaaataaaataacttcataagattggtacaaagaattagctggatgagaaagcgcatgcctttaatcccagaactttgggaggctgaggcaggagactcacttgagcccaggagttcaagaccagcctggaaagtatagtaagaccc

SEQ ID NO: 552581 - DNA, 1393 bp, Homo sapiens
gcccttcatgatgtctggaagcaatattgatgactggttaactgaggtcacttctaggagtttgtttcaaaaaagcaactgaacaaatagacaagaatttatatacaaaaatatatcatgatattgtttataatagcaaaagttttaaacactataaacatgaattttttaaagtatggcacattttatatatcatgaaaataattgtataaatctatatttaataatgtggaaagttaccctaacaatgctttaaatcctcatcaagactacctcaggattctcagaggctgttacatatagaaggagtaatttcaaacagattcataagcatttgggtaaagcattaagccaaagaccaatgattgtattcagaaagcttaagtgaacaaacatttactacgcacctatagtgcaccacaaccatgcccagcatgagggagacaaagagaatccctggtcccactgctacagcccttgccccagagaaagggaacccctctgtgcactgttggagcccctcccaacagcgatgtccagggtcatggtatgttactgtttcctgtaataaaactgtgtgctttgagtcagggttgttgggaataatgtgaaactattcttgttttcttcttcatcctgaataaatcagaagtaaaaagaattcatttactgatttatatattcaaatattcattcagaaagttgtccaaatactcattggacccaaatgtgaaacataatctccccaaaatctaggaaatgagcaattggtgatttgctcaatccaagcccatccagagggtagactttgctacaacacactacagacccgacttgagatggagagataggaatggaagggagacactttttgtctctcagggacctgcacatccagtgacacacccctgatctcctgccttgtgagatccacaatttgagtaaatgcagagttgtggtcgtccagtctagccacccccaagagaaaccccctgacagctccctttccccaggagaaccttgaccttagaggytggcactgcaccagtcaaggccgcccttggcccctccactgactgagcccttgactgaccaaatgctctcatagagctgccgttagccacgccagggcatcagcagagagaagggtgctggtttctatctgggttcaaagcctggctctgccacttgttaaaaagtctcttattccctgcgattctcagctttttcatcttcagaacagaaacaaataaaataacttcataagattggtacaaagaattagctggatgagaaagcgcatgcctttaatcccagaactttgggaggctgaggcaggagactcacttgagcccaggagttcaagaccagcctggaaagtatagtaagaccc

SEQ ID NO: 552582 - DNA, 544 bp, Homo sapiens
cccggacaggaacgaacagatgttggaaccatatgataatagtgtggcagtgtaaaaaaaacctgtgcatttatatggcacacctggtgtttatgatacttttgcaacttttataactacggcatctggccttttgctgctgttctttaattttcaaatacccaggatcttatgtctcttgcagtgtagacatgtccatcaggaagaaaaaaaaggcagtaaacatgtcatgaatcttgcagagagaaaccactgcctctctacaaggaacttgcattaaagtcattagtgaaatttaaaaatatgaggaaacatttagatcagcttttctcagcacttcttaacaggcaaagaggatttactcaaggattcctggataatctatctgcrctacaaattttcccaatattttaaatttgcaataaataatttatggggaatatctgaaataaatatagcaccataggatctgtgttatggcacttgcattctatttgatccaacatgatgtaggttgaggcaaatggagataatataatttgat

SEQ ID NO: 552583 - DNA, 623 bp, Homo sapiens
cataaaaggcataagcctccaatggaaagtaaatatgagaggtgagcargtaatattaataaaattttgggagctggaaagcttatggccaagtaatacgtgattttaaaataaaataaaaaaaaggcctaatcctaaactggcaatgggaaaagagaaacaatttacattggcaaattttatattaagaaacaattaacagcctgggcaacatggtgaaaccccatctctacaaataataataaaaaaaaatcagctggacgtggtagcgcatgcctgtagttccaactactcaggaggctgaggtgggatgatcacctgagcttgggaggtcaaggctgcagtgagccgtgatcgtgccactgcactccagtctgggcaacagagtgagactctgtctcaacacagacaatgtgaaaaacaattagatctaacaaatatcctcttcttctgaatgcattggagaaccagccttcctacaccttgacagaagattgtgaatttattttctgcagaaggtaaaatagaggttctgggaagggaatgccagtcacagtggagggttgggtactatactgaaaacagaagtattaagtcaaaatgtacactgggtactgtaatga

SEQ ID NO: 552584 - DNA, 854 bp, Homo sapiens
gggaggccaaggtgggcagatcacctgaggtcaggagtttgagaccagctggccaacatggtgaaaccccgtctctactaaaaatacaaaaattagccaggcgtagtggcacactcctgtaatcccaggtacccgggaggctgtggcaggagaatgatttgaactggggaggtggaggttgcagtgagcctagattgcaccactgcactccagtctgggcgccagagtgagaacccatctcaaaaaagaaaaaaaaaaagtctgcaataactgtctctacctccccatctcctagccattttgcaagatactgcgcctcactgcagctgttcctgaggaggccagactaggtcatttacttgtttgctctcaaatccattctttgctttctccctttcaactctattttgcagtgaacactgccattgtccgctggcttccaggtaggttcaactacggggtgcactagcagaagatcggaggggaggaggagaagagaagccagkgtatttctctctttctctcctacttttgttgttatctttggccatggctgtgtcttctctttggctacagcccctcacaaagccctttctgtggtatcagttactgtaggacaatcccatagcactctaactttagctggggtgaccccagatctagactagggtaacatccctcctctcattgtcctgcagccgtagggataatgatagcttcttgctgttaataatctctggattggtttatcattccctatttggcttttcagtttttccatcactggtgtaaccacttcgctgtattgcattttctttgtttgaaatacctggtactgtggactggattgtgtg

SEQ ID NO: 552585 - DNA, 854 bp, Homo sapiens
gggaggccaaggtgggcagatcacctgaggtcaggagtttgagaccagctggccaacatggtgaaaccccgtctctactaaaaatacaaaaattagccaggcgtagtggcacactcctgtaatcccaggtacccgggaggctgtggcaggagaatgatttgaactggggaggtggaggttgcagtgagcctagattgcaccactgcactccagtctgggcgccagagtgagaacccatctcaaaaaagaaaaaaaaaaagtctgcaataactgtctctacctccccatctcctagccattttgcaagatactgcgcctcactgcagctgttcctgaggaggccagactaggtcatttacttgtttgctctcaaatccattctttgctttctccctttcaactctattttgcagtgaacactgccattgtccgctggcttccaggtaggttcaactacggggtgcactagcagaagatcggaggggaggaggagaagagaagccagggtatttctctctttctctcctacttttgttgttatctttggccatggctgtgtcttctctttggctacagcccctcacaaagccctttctgtggtatcagttactgtaggacaatcccatagcactctaactttagctggggtgaccccagatctagactagggtaacatccctcctctcattgtcctgcagccgtagggataatgatagcttcttgctgttaataatctctggattggtttatcattccctatttggcttttcagtttttccatcactggtgtaaccayttcgctgtattgcattttctttgtttgaaatacctggtactgtggactggattgtgtg

SEQ ID NO: 552586 - DNA, 1673 bp, Homo sapiens
actgctgcctagatcttgatttttcaactcttatacctacaacggctgctttttaaaaaggcatcttaaaacaggtctttcatttaagttctttctacagcaaaggcagggtaattagtagctaaatggcttacaaattgagctctcttcaaacactaaaaatattacctaaactaatatatctgaactgcacttgacttttaattgctaaaattctcgtgttagataaaactcaggaattgatcccatagaaagtaactttgtcggccaggcggtggctcacgcctgtaatcccagcactttgggaagccgaggtgggcagatcacgaggtcaggagttcaaaaccagcccggtcagcatggtgaaaccccatctccactaaaaatacaaaaaattagctgggcaaggtggcacacgcctgtagtcccagctactcgggaggctgaggcagaagaactgcttgaacccagcaggcagaggttgcagcgagctgagattgcaccactgcactccagcctgggtgacacagggagactccatctcaaaaataataataataataataataacaataataataataataatttcgtctctagtgattcttacccaacataaaatgagacgtagcttggtttcttcccttgttctgataaaccccaaactactttattattttaaaaaatgaaagaacaagtgaagactggatattaaattttaattataaactattttaaacagtaaaattaaaagtccattagtctattagaataatcacagtaaatacatcatgttaataaaagaaatgaatttttcattttttttacagcaaatcagacaactcaataacttttgaaaacaatccatgaaaacgaatgttaaacctggcactgtatttcatttgagggcatggaaactttacagtgacttaagacaaaatattctatacagcggagttgatcaaaataaatgctttttaaacacaaatttagtatcttcaatatcttcaaatttaaaaataactttcataaagtgatttttttttttttttgacacagagtctcacactgttggagtgtagtggcacgatctcagctcactgcaaccactacctccaggattcaagcaattcatctgcctcagccaccctagtagctggtattacargcatgcaccaccacacctggctaatttttgtattttcagtagagacagggcttcactctgttggccaggctggtctcgaactcctggccccaagtgatctgcccacctcagtctcccaaagtgctgcacaattacaggtgtgagccgccaaacctggcccataaattgattttaatgaagtttattccctgagccaatatttctttatttatttttactcctatcaatctaaaattcctggtgtcttatgccaaggaatccggtcttcactagaatactttatttttcttttcttttcttcttttttttttttttgagatggagttttgctctgtcacccaggctggagtgcagtggtgtgacctcagctcactgcaacctccgcctccggattcaagtgattctcctgcctcagcctcctgagtagctgggattacaggcacacgccaccatgtctggctaatttttgtattttcatagagatgaggtttcaccatgttggtca

SEQ ID NO: 552587 - DNA, 797 bp, Homo sapiens
cataactcacaaactattttccacatagccacatgactgagctttttaaaaacaatcacatctgcagcaatcatccaatgttatcttttctcactaagaggaaagtcaaagttcttacaatgttctacaaggtcccaagttttgggagctaccctttgttctctctacccccactaaaataatcttcttgctacctcacatacttcctcagcctatttcagtgtttcagaaagtaatagtatgggatctcagtggctgcagagattawtttgtagagttttagcatctttacattattgaactttccccttcaatgaatgagttatatatttttctctcttttttctaaacacatcctataatgatgttttattaagtgttcaataaagagcctgcccatttttattgtatttgtctttatgtactttatagcttttgttgttattgttaatgggtacccatttttttccaattatattttttaattactatctgtctatatcagggttttccaactttgacacaagtgacattttgagccaggtaattaattgttgtgaggggctctcctgtgcattgtaggatgtttaaaagcatccctggcctctacatgctagataccaatagcattactgcagttgcaataacttcaaaaaccaaaatgtccacaaatatggccaaatatcctgtgaagcataaaattgtccctggttgagaagaattcatctttatgaaagtactgatagttttttaaaagccacaaaaagcctattcttgtttgttctaaatatttccca

SEQ ID NO: 552588 - DNA, 797 bp, Homo sapiens
cataactcacaaactattttccacatagccacatgactgagctttttaaaaacaatcacatctgcagcaatcatccaatgttatcttttctcactaagaggaaagtcaaagttcttacaatgttctacaaggtcccaagttttgggagctaccctttgttctctctacccccactaaaataatcttcttgctacctcacatacttcctcagcctatttcagtgtttcagaaagtaatagtatgggatctcagtggctgcagagattaatttgtagagttttagcatctttacattattgaactttccccttcaatgaatgagttatrtatttttctctcttttttctaaacacatcctataatgatgttttattaagtgttcaataaagagcctgcccatttttattgtatttgtctttatgtactttatagcttttgttgttattgttaatgggtacccatttttttccaattatattttttaattactatctgtctatatcagggttttccaactttgacacaagtgacattttgagccaggtaattaattgttgtgaggggctctcctgtgcattgtaggatgtttaaaagcatccctggcctctacatgctagataccaatagcattactgcagttgcaataacttcaaaaaccaaaatgtccacaaatatggccaaatatcctgtgaagcataaaattgtccctggttgagaagaattcatctttatgaaagtactgatagttttttaaaagccacaaaaagcctattcttgtttgttctaaatatttccca

SEQ ID NO: 552589 - DNA, 797 bp, Homo sapiens
cataactcacaaactattttccacatagccacatgactgagctttttaaaaacaatcacatctgcagcaatcatccaatgttatcttttctcactaagaggaaagtcaaagttcttacaatgttctacaaggtcccaagttttgggagctaccctttgttctctctacccccactaaaataatcttcttgctacctcacatacttcctcagcctatttcagtgtttcagaaagtaatagtatgggatctcagtggctgcagagattaatttgtagagttttagcatctttacattattgaactttccccttcaatgaatgagttatatatttttctctcttttttctaaacacatcctataatgatgttttattaagtgttcaataaagagcctgcmcatttttattgtatttgtctttatgtactttatagcttttgttgttattgttaatgggtacccatttttttccaattatattttttaattactatctgtctatatcagggttttccaactttgacacaagtgacattttgagccaggtaattaattgttgtgaggggctctcctgtgcattgtaggatgtttaaaagcatccctggcctctacatgctagataccaatagcattactgcagttgcaataacttcaaaaaccaaaatgtccacaaatatggccaaatatcctgtgaagcataaaattgtccctggttgagaagaattcatctttatgaaagtactgatagttttttaaaagccacaaaaagcctattcttgtttgttctaaatatttccca

SEQ ID NO: 552590 - DNA, 715 bp, Homo sapiens
cgacatggaggacgactcactctacttgggaggtgagtggcagttcaaccacttttcaaaactcacatctyctcggcccgatgcagcttttgctgaaatccagcggacttctctccctgagaagtcaccactctcatgtgagacccgtgtcgacctctgtgatgatttggctcctgtggcaagacagcttgctcccagggagaagcttcctctgagtagcaggagacctgctgcggtgggggctgggctccagaatatgggaaatacctgctacgtgaacgcttccttgcagtgcctgacatacacaccgccccttgccaactacatgctgtcccgggagcactctcaaacgtgtcatcgtcacaagggctgcatgctctgtactatgcaagctcacatcacacgggccctccacaatcctggccacgtcatccagccctcacaggcattggctgctggcttccatagaggcaagcaggaagatgcccatgaatttctcatgttcactgtggatgccatgaaaaaggcatgccttcccgggcacaagcaggtagatcatcactctaaggacaccaccctcatccaccaaatatttggaggctactggagatctcaaatcaagtgtctccactgccacggcatttcagacacttttgacccttacctggacatcgccctggatatccaggcagctcagagtgtccagcaagctttg

SEQ ID NO: 552591 - DNA, 606 bp, Homo sapiens
ttacacatgagcaagagcagtttagggaaacgggtgccttcagtttgttttctccatctagaaaagggctgcctttgtggaatgctggccctggggagaagcctcatttctatagcaggaattgatacagttttaaattcygattggtacacggagctacctgtcctcatttcaagcacttctggtttgttctgggttcagtgggtgagcaatgagtagaacgctggggaggaggatttggagcgagggtggttttgatccacagagggagctgtttttccatcaatgtcttgactgtgattcagaatgggcttctccgctcaagatgggaatactgggctgatttaaggcaggtgattgacttgatttggtggctacttttatactagctggttaacgagctattttcttcattagtttcaggcatgtgagcttaatgaagcattggacctcccaaattacaaggaaaatacacatatagcttgtgtggtaggttcaaaggagttagtgaacaaacacagtagggccacaaattattgttaaagacatgaatgcatgaaagtgtatctatgtccaaatggactctctgcaaccatactgttccac

SEQ ID NO: 552592 - DNA, 606 bp, Homo sapiens
ttacacatgagcaagagcagtttagggaaacgggtgccttcagtttgttttctccatctagaaaagggctgcctttgtggaatgctggccctggggagaagcctcatttctatagcaggaattgatacagttttaaattctgattggtacacggagctacctgtcctcatttcaagcacttctggtttgttctgggttcagtgggtgagcaatgagtagaacgctggggaggaggatttggagcgagggtggttttgatccacagagggagctgtttttccatcaatgtcttgactgtgattcagaatgggcttctcmgctcaagatgggaatactgggctgatttaaggcaggtgattgacttgatttggtggctacttttatactagctggttaacgagctattttcttcattagtttcaggcatgtgagcttaatgaagcattggacctcccaaattacaaggaaaatacacatatagcttgtgtggtaggttcaaaggagttagtgaacaaacacagtagggccacaaattattgttaaagacatgaatgcatgaaagtgtatctatgtccaaatggactctctgcaaccatactgttccac

SEQ ID NO: 552593 - DNA, 606 bp, Homo sapiens
ttacacatgagcaagagcagtttagggaaacgggtgccttcagtttgttttctccatctagaaaagggctgcctttgtggaatgctggccctggggagaagcctcatttctatagcaggaattgatacagttttaaattctgattggtacacggagctacctgtcctcatttcaagcacttctggtttgttctgggttcagtgggtgagcaatgagtagaacgctggggaggaggatttggagcgagggtggttttgatccacagagggagctgtttttccatcaatgtcttgactgtgattcagaatgggcttctccgctcaagatgggaatactgggctgatttaaggcaggtgattgacttgatttggtggctacttttatactagctggttaacgagctattttcttcattagtttcaggcatgtgagcttaatgaagcattggacctcccaaattacaaggaaaatacacatatagcttgtgtggtaggttcaaaggagttagtgaacaaacacagtaggrccacaaattattgttaaagacatgaatgcatgaaagtgtatctatgtccaaatggactctctgcaaccatactgttccac

SEQ ID NO: 552594 - DNA, 1058 bp, Homo sapiens
tgctttcttattttgtatgaaagtcacatatctgacaagtagatgccaaaaaggttggtttgactgtgctatccatggcactctttcctttcaagagaaaaatgaaattcatcaaaaagagaattttatgctacattatgagcaccaaaacagacactccccaaaaggaagataaggacaccagataaaatgagttgatctgaaagggcaaaggactgtctctacttccattgtatcgatttgtcatttctgtggatttctttttgtttttaacaaaaagacagaaattttggagtaatgaatagctctagttagccatatctgatggctaaggattaaacttttagaaagagatcatataattaaaatttgaatagaaatattctaatgtacattacaaaaatgcatgctcttttagaaagataagcctgaagataatattatttaatttaccaaaagtgtaaacaaatacttttgatyatcaatatgtgtcagcactgttctaggaaattaatttagagtatgaataaaaataaatccttacccttactgagcttacatattagcagggcataatataggataggaactgagagttctcattgaatatcaccttgtcagagaaagctacgtcagattaattagcatcaccctcaagcatcttatctttccttaattttctacatgaaaattataattttctgacatatataatgcttatatgcctgcttttatctctgtctctctttctctttatttctttttttctgattagatttcccagataacagccatttgcagatcattgcaggtgagctatgcagttaaaaataaggttcaccctgaccctagaatctctgacttattccgactttatgagttgaggaaatgacacataatactcatccctccaaccaaccacctaccttcctttggcagttaactttgcaaaagttgtacgttcccagaagagggaaatatatcaagctgttttgtgggacctacaaagcagaaatggctcaatggactgatgtaaataccagagaaaagtctctcca

SEQ ID NO: 552595 - DNA, 641 bp, Homo sapiens
ccacttgttggtgggctaagcttgtttcattttgtctatgtaggaacccagaccatgggagctatctcagcctaatgctctcccattacgatattttacaccttctttctgtatcagggtaagtgggggtcttccccaggagggttcttaccaccctgtttccctcagcaaaatgagactgtcccttttgcctctgtaggcaatcttctgaacaaggcattcctgatattcttatctcatcttattttatcttatcctcttctctgtaccttgtttacatgcttctggaacacttgtgtgtcttgcacccatctcctgccttatttaggcaatcctaaaagaagamctctaggatggattggcagagaactgctggcatattgagccctctctctttgtatctggaactttcataattaccttcattctccaggccaattttgcacttatctttgttctccacttcaaaatacatttacctctgacagaagctgagttcataaaagggaccttgtccagtggtacttatgaggcaggagacatgatatagttaaaattataaactgcaatcaatatatagttatatactatatgtaatcactatatcactcccgggttcaagtgatactcctgcctcagcc

SEQ ID NO: 552596 - DNA, 616 bp, Homo sapiens
tcaaagatgtgaggaaattagttcactgtgctcaatcctcagctgttttcttccagcaactctgataagtccctggagaattcctttaggaacaagaaaagagacagaaattgttgctttcagtcatctgtccctccctaacaccaactaacacttgtcctgaattccactgaaatattttgtagataatgataagtctatgcatctcctctaagtgcttggcgtccttgctattttataaaggcragaactcaagaggaaaagaagagcacttccagatcatgtttgatcttcaaaccaatgtgcaaaaattaaaggtgctaaaatcccaaaattttgtataaggaacaatttcaacttcttttattagaaatggcaaaaatgggctaggcacagtgggtcatacctgtaaacccagcactttgggaaaccgaggtgagagaatcacttgagcccatgagtttgagaccagcctgggcaacaaggtaagacccccaacctctataaaaaaatgttttttttttaattagcagggcatggtggcatacatctgtggtcccagctattcaggaggctgaggttgggaggattatttcagcccaggaggtcaaagctg

SEQ ID NO: 552597 - DNA, 1041 bp, Homo sapiens
caaatggaaaatggactcaaatcaacatttttttgttaagagttaatgtttaatttttccattatacataactatatattaaagatgatacaaacagtatattttaaacacaagtagacgggctgtaattgtcaaaatacttctatgtatgaatttaggtactattagataacaacaacaaaaatcattgtaccttcatgttaagaaaatactttattttatctaaaaattcctgtagtgatgaaaggtgaagccagctagacttcctgggtggagtggggacttggataatttttctgtctagctaaaggattgtaaatgcaccaatcagcactctgtaaaaatgcaccaatcagcgctctgtgtctagctaaaggattgtaaatgcaccaattaggactctgtaaaaatgcaccaatcagcactttgtgtctagctaaaggattgtaaatgcaccaatcagcattctgtaaaatggaacaatcagtgctctgtgaaatagaccaatcagcaggacgtgggtggggacaaataatggaataaaagctggccacgccagctagcagtggcaacctgctagggtccccttccatgctgtggaagctttgttctttagctctttacaataaatcttgctgctgcccactctttgggtscatgccacctttacgagctgtaacactcaccacgaaggtccatggcttcattcttgaagtcagcgaaaccaagaacccgctgaaaggaaccaactccggacacagtgatacatgataaaacatgataaaatctcatattaagtaacattcttctcatatttcattggctgtataacagtataataactatcttgagggaatggcataggacaagacaatgtttttaaaagttttgatttcacaaaattataaagaaattatgggcatgtgcaacataatcaccaaatttccttttattaggtcaaactgttaagtgccaattgaataggcaactcaaagaaggaaaaataagaaaaaaagaagaaagaggaggagggaaaggaga

SEQ ID NO: 552598 - DNA, 1041 bp, Homo sapiens
caaatggaaaatggactcaaatcaacatttttttgttaagagttaatgtttaatttttccattatacataactatatattaaagatgatacaaacagtatattttaaacacaagtagacgggctgtaattgtcaaaatacttctatgtatgaatttaggtactattagataacaacaacaaaaatcattgtaccttcatgttaagaaaatactttattttatctaaaaattcctgtagtgatgaaaggtgaagccagctagacttcctgggtggagtggggacttggataatttttctgtctagctaaaggattgtaaatgcaccaatcagcactctgtaaaaatgcaccaatcagcgctctgtgtctagctaaaggattgtaaatgcaccaattaggactctgtaaaaatgcaccaatcagcactttgtgtctagctaaaggattgtaaatgcaccaatcagcattctgtaaaatggaacaatcagtgctctgtgaaatagaccaatcagcaggacgtgggtggggacaaataatggaataaaagctggccacgccagctagcagtggcaacctgctagggtccccttccatgctgtggaagctttgttctttagctctttacaataaatcttgctgctgcccactctttgggtccatgccacctttacgagctgtaacactcaccacgaaggtccatggcttcattcttgaagtcagcgaaaccaagaacccgctgaaaggaaccaactccggacacagtgatacatgataaaacatgataaaatctcatattaagtaacattcttctcatatttcattggctgtataacagtataataactatcttgarggaatggcataggacaagacaatgtttttaaaagttttgatttcacaaaattataaagaaattatgggcatgtgcaacataatcaccaaatttccttttattaggtcaaactgttaagtgccaattgaataggcaactcaaagaaggaaaaataagaaaaaaagaagaaagaggaggagggaaaggaga

SEQ ID NO: 552599 - DNA, 2505 bp, Homo sapiens
tgcatattaaaaaaatagcctgaaataccatctcgtttcctgagctatgtttgtcagcataatagtaactctgggtgttttacccttttgagttaaattaaagctagcaagtcttattttgtataatcacaataagataaagatcatagtgtgttttacattgtaatgtgtgtgtatatatcatggaggataaatgcttaaatggaattatgggatgcacacacatgggaggcactgaccataataacagatgacattatgatacagaaaatgtgtgtatatttaatgaagatgttttaatttaaagtcagtatctcactatcttgctaacccctactcaaaatacatttcataactgcacagaaggactgagtaacaaacaaacttatagaaacatgctgatctatttttaatttgaattgctacatggaatatttgcaattgtattatatatacaataagggatctatgcaacaactaaatttagtcacygctttatgggatgcagatgtgaataatttattgggattgaagatgtttacaccgaaaataaaatcggtatcaagagtctgattactaattttgctccgccacttgtagtggtctgtcctgtttctaagtaaacgccactaggcttcagttttctcatccagcagagaagtttattttctagagattttgaattaatagtacaaatctttacaaacaattaaaattattaaaatgtaaagtaaaaaagatttttgaagagtataaaaataaaatgggatataaataaaatttcatcatctctttcttaatttgtctaatttttgtaaatatgtaagagtagcatctagtgcttgctgctagccagaggcttctctagggttgccctgtgctgagcagcctgggacagggaggaaacacaacaagggtgtctctacctgtctctgtggggaccacttagacaaaagctgaggctttgtcagtttcattgtttacacagccaacaaacatttgctttgaggaaagagtttcttggttaaataggatataggagtgactgataaatgattctttatgtcccttttagaataacctactattttagtaatctattactcttatgatcttgaaaacatggtaaaattacctcaaaagagttaccatcctttgaaagttttatttcaatccataagctgatgaacacatttacatttgcatgcactattttttcttacataactcaatataatacttactattattgcattactacttttgtaactttgctttaataattagtatttaattaatcaatttatgcattggccttagaatgtgacaaagcaactccaagtcaactccctagtacatattgttacaccaactctgcctcattccatgaatgaactaaaattctgaaaaataatttaaaacttttttttggctgttgagtcatgttaaaatgtcagaactaatattttcattattctaaataaaaaaatgaaattgtatatgtaatatacaatttaaaataacctatagttatactctgagaaaaataatggcattaattgtttctgtaacttaaacatttaactaaggtaccaaagaagaacgcaaaaggaagtagcagaagtaaattaataagataaaatctgaaaattatgaattataaaacaaactagcattctgattgaaaaaacgtctgcttatatgggaagacacagaataaaaatatacccctgacatgtgtgaataagacaaagggaagaaaaaaacatgattttggaatttataaagcaaatatattcacaattatagaaggtactaaggaattataaagatcattatgccagcctcatgtcaataatgaacatttggataaaatgcatgtgccatagaacaataataaattattaaaaattattttgataaagaaagaaaacctgtacaaatcaatatctatgggacatttttaatgaatgatttgtcattaaaaaggatgttaggatgaagtggttctttctaacatttttgtgttagttaaaatattccagatgaataaaaagacagagtgccctaatttcttttgtaagtttattaccaaatcccaatgaagaaggcatgaacaaagaacaaaccaagaacctaaatatctagaaataaactacggaagttgaagaagtcatttatgaagaaaattgtaaaacaatgagagatattaacaaaggtctaaataaatggtcacatataccttgcatatggattggaagactcaatattgtaatgatgtcaactctatccaaatgtatatataaacctctcattggtgtggaatggacaagttgattctcaatagggaaatgcaaaggtcctttagtagccacagcaattcttaagaaagaaaaaacataaaaatttttatatgataactaactaaaatgtatagttgagaagggaaaaaaatctaaacttacttatatgtatcagtctgtatgaggtatggacctattgaac

SEQ ID NO: 552600 - DNA, 2505 bp, Homo sapiens
tgcatattaaaaaaatagcctgaaataccatctcgtttcctgagctatgtttgtcagcataatagtaactctgggtgttttacccttttgagttaaattaaagctagcaagtcttattttgtataatcacaataagataaagatcatagtgtgttttacattgtaatgtgtgtgtatatatcatggaggataaatgcttaaatggaattatgggatgcacacacatgggaggcactgaccataataacagatgacattatgatacagaaaatgtgtgtatatttaatgaagatgttttaatttaaagtcagtatctcactatcttgctaacccctactcaaaatacatttcataactgcacagaaggactgagtaacaaacaaacttatagaaacatgctgatctatttttaatttgaattgctacatggaatatttgcaattgtattatatatacaataagggatctatgcaacaactaaatttagtcaccgctttatgggatgcagatgtgaataatttattgggattgaagatgtttacaccgaaaataaaatcggtatcaagagtctgattactaattttgstccgccacttgtagtggtctgtcctgtttctaagtaaacgccactaggcttcagttttctcatccagcagagaagtttattttctagagattttgaattaatagtacaaatctttacaaacaattaaaattattaaaatgtaaagtaaaaaagatttttgaagagtataaaaataaaatgggatataaataaaatttcatcatctctttcttaatttgtctaatttttgtaaatatgtaagagtagcatctagtgcttgctgctagccagaggcttctctagggttgccctgtgctgagcagcctgggacagggaggaaacacaacaagggtgtctctacctgtctctgtggggaccacttagacaaaagctgaggctttgtcagtttcattgtttacacagccaacaaacatttgctttgaggaaagagtttcttggttaaataggatataggagtgactgataaatgattctttatgtcccttttagaataacctactattttagtaatctattactcttatgatcttgaaaacatggtaaaattacctcaaaagagttaccatcctttgaaagttttatttcaatccataagctgatgaacacatttacatttgcatgcactattttttcttacataactcaatataatacttactattattgcattactacttttgtaactttgctttaataattagtatttaattaatcaatttatgcattggccttagaatgtgacaaagcaactccaagtcaactccctagtacatattgttacaccaactctgcctcattccatgaatgaactaaaattctgaaaaataatttaaaacttttttttggctgttgagtcatgttaaaatgtcagaactaatattttcattattctaaataaaaaaatgaaattgtatatgtaatatacaatttaaaataacctatagttatactctgagaaaaataatggcattaattgtttctgtaacttaaacatttaactaaggtaccaaagaagaacgcaaaaggaagtagcagaagtaaattaataagataaaatctgaaaattatgaattataaaacaaactagcattctgattgaaaaaacgtctgcttatatgggaagacacagaataaaaatatacccctgacatgtgtgaataagacaaagggaagaaaaaaacatgattttggaatttataaagcaaatatattcacaattatagaaggtactaaggaattataaagatcattatgccagcctcatgtcaataatgaacatttggataaaatgcatgtgccatagaacaataataaattattaaaaattattttgataaagaaagaaaacctgtacaaatcaatatctatgggacatttttaatgaatgatttgtcattaaaaaggatgttaggatgaagtggttctttctaacatttttgtgttagttaaaatattccagatgaataaaaagacagagtgccctaatttcttttgtaagtttattaccaaatcccaatgaagaaggcatgaacaaagaacaaaccaagaacctaaatatctagaaataaactacggaagttgaagaagtcatttatgaagaaaattgtaaaacaatgagagatattaacaaaggtctaaataaatggtcacatataccttgcatatggattggaagactcaatattgtaatgatgtcaactctatccaaatgtatatataaacctctcattggtgtggaatggacaagttgattctcaatagggaaatgcaaaggtcctttagtagccacagcaattcttaagaaagaaaaaacataaaaatttttatatgataactaactaaaatgtatagttgagaagggaaaaaaatctaaacttacttatatgtatcagtctgtatgaggtatggacctattgaac

SEQ ID NO: 552601 - DNA, 2505 bp, Homo sapiens
tgcatattaaaaaaatagcctgaaataccatctcgtttcctgagctatgtttgtcagcataatagtaactctgggtgttttacccttttgagttaaattaaagctagcaagtcttattttgtataatcacaataagataaagatcatagtgtgttttacattgtaatgtgtgtgtatatatcatggaggataaatgcttaaatggaattatgggatgcacacacatgggaggcactgaccataataacagatgacattatgatacagaaaatgtgtgtatatttaatgaagatgttttaatttaaagtcagtatctcactatcttgctaacccctactcaaaatacatttcataactgcacagaaggactgagtaacaaacaaacttatagaaacatgctgatctatttttaatttgaattgctacatggaatatttgcaattgtattatatatacaataagggatctatgcaacaactaaatttagtcaccgctttatgggatgcagatgtgaataatttattgggattgaagatgtttacaccgaaaataaaatcggtatcaagagtctgattactaattttgctccgccacttgtagtggtctgtcctgtttctaagtaaacgccactaggcttcagttttctcatccagcagagaagtttattttctagagattttgaattaatagtacaaatctttacaaacaattaaaattattaaaatgtaaagtaaaaaagatttttgaagagtataaaaataaaatgggatataaataaaatttcatcatctctttcttaatttgtctaatttttgtaaatatgtaagagtagcatctagtgcttgctgctagccagaggcttctctagggttgccctgtgctgagcagcctgggacagggaggaaacacaacaagggtgtctctacctgtctctgtggggaccacttagacaaaagctgaggctttgtcagtttcattgtttacacagccaacaaacatttgctttgaggaaagagtttcttggttaaataggatataggagtgactgataaatgattctttatgtcccttttagaataacctactattttagtaatctattactcttatgatcttgaaaacatggtaaaattacctcaaaagagttaccatcctttgaaagttttatttcaatccataagctgatgaacacatttacatttgcatgcactattttttcttacataactcaatataatacttactattattgcattactacttttgtaactttgctttaataattagtatttaattaatcaatttatgcattggccttagaatgtgacaaagcaactccaagtcaactccctagtacatattgttacaccaactctgcctcattccatgaatgaactaaaattctgaaaaataatttaaaacttttttttggctgttgagtcatgttaaaatgtcagaactaatattttcattattctaaataaaaaaatgaaattgtatatgtaatatacaatttaaaataacctatagttatactctgagaaaaataatggcattaattgtttctgtaacttaaacatttaactaaggtaccaaagaagaasgcaaaaggaagtagcagaagtaaattaataagataaaatctgaaaattatgaattataaaacaaactagcattctgattgaaaaaacgtctgcttatatgggaagacacagaataaaaatatacccctgacatgtgtgaataagacaaagggaagaaaaaaacatgattttggaatttataaagcaaatatattcacaattatagaaggtactaaggaattataaagatcattatgccagcctcatgtcaataatgaacatttggataaaatgcatgtgccatagaacaataataaattattaaaaattattttgataaagaaagaaaacctgtacaaatcaatatctatgggacatttttaatgaatgatttgtcattaaaaaggatgttaggatgaagtggttctttctaacatttttgtgttagttaaaatattccagatgaataaaaagacagagtgccctaatttcttttgtaagtttattaccaaatcccaatgaagaaggcatgaacaaagaacaaaccaagaacctaaatatctagaaataaactacggaagttgaagaagtcatttatgaagaaaattgtaaaacaatgagagatattaacaaaggtctaaataaatggtcacatataccttgcatatggattggaagactcaatattgtaatgatgtcaactctatccaaatgtatatataaacctctcattggtgtggaatggacaagttgattctcaatagggaaatgcaaaggtcctttagtagccacagcaattcttaagaaagaaaaaacataaaaatttttatatgataactaactaaaatgtatagttgagaagggaaaaaaatctaaacttacttatatgtatcagtctgtatgaggtatggacctattgaac

SEQ ID NO: 552602 - DNA, 1977 bp, Homo sapiens
gcataaataataacattattaacaattttgtgtgcaacactccatgttacaaaatatggttgaaacctctcatagtctattttctccatgtagtagtaagaacctgagggcaaatcggttaggttgttcctatatttgttctgttgattccagaagtcctgctagatttactaattttgttgggtttgaattttttttaattctaaagatttctatataatttcctctatacgtataaatttgcctgggagcttcttagaacacctaaacaggtgtgtttattacccatctatctccatttctagttaccaaaacaaaagaaggtaaattagctcagctgacatgggggaagaaaggagacccctcagatatcaagacaaatcttagaattaatggatttgtaaggagatgagaaagaagctggattttgtctcagtgattaactgaaaagaatcttggtgaaatttttctgctcctgaaggtttcattctctcagcgggatattgtctaatacataaaatgataggtggtgtactatggacaccacctgataggtacaaatccataacaggagaccattctctcatttatctgggggtcgcactgtcccctctttggaattttgacctctgcctcgacaggtggattttacttaaacartttgccaacaccccccgccaacatatttaagtcccataaagttgcatatttgcagctaatgcccttttctgtcatcaacttaaaaaaaaatttgtgtgtgcaaacacagacacagttttcactaatatgtgtcatctaattcatacatgcccagtacgtaacacatgaacaacaaaaatatttgtacagctcttctgaactgaacgtgaactgtttacttccatgggtaaaaagatttccccctaatcctttctaccactggcaaagggaaacaatatatcagaatcagccagtgaccattttcaatcaggcaacttccttctgggaacttgaatatatcatgcttgcctttacccaagtttataaaatcacagccatttgagccacttttactgacaaatctttttattgactatgtcaggataaaaaaaaaaaaaagctgatctatattctgattctgctttaattgtaagcagtcaattaaactcccttcagaatcaattttcctaactgcaaaaggggctaaacgatcttatcctttaacgttccttagcaataggaaatattaaatcagtggagtttgagtcagatccatggtttttcatcctaattctgtcattaactagatagcactgattgaattagttgctctccccaggactcggttactgctcaataaataaataaataaataaatacacaaaaacatcagattagacttttctacgctcatttcactgtctgtatcttcctgagaataaaagctatgaagtagttttgacatacaaaaaggcataaataatagtattataaacaattgcgtattcagcacccaaagtcacaaatgtggttgaaacctctcttgtaggtttcttaagtgtatgccccaatttccatcagggttgccctacaacgagtttagttttctcattcctatgcatttcattgtcctttactacatgtgtttgtatcttaaagtttatgtagtacactctttcatgctattaaatgttccctaaattatggcattctggaaaatttatggacaatttgctggtcttttcataatatttgtgacaatcataagatttgtgagattcatccaagactatataccaatgcttgatgactcattttttattcgtatctgtattacttttggtgtatatgccccagtttatccactcattctcctattgaaaacatttcattttccagttatttgctataacacacaatgctatcataatcattcttgtacatgccttcttaatctgtataatatatgtttcggattggaattgctgggacaaaaat

SEQ ID NO: 552603 - DNA, 1977 bp, Homo sapiens
gcataaataataacattattaacaattttgtgtgcaacactccatgttacaaaatatggttgaaacctctcatagtctattttctccatgtagtagtaagaacctgagggcaaatcggttaggttgttcctatatttgttctgttgattccagaagtcctgctagatttactaattttgttgggtttgaattttttttaattctaaagatttctatataatttcctctatacgtataaatttgcctgggagcttcttagaacacctaaacaggtgtgtttattacccatctatctccatttctagttaccaaaacaaaagaaggtaaattagctcagctgacatgggggaagaaaggagacccctcagatatcaagacaaatcttagaattaatggatttgtaaggagatgagaaagaagctggattttgtctcagtgattaactgaaaagaatcttggtgaaatttttctgctcctgaaggtttcattctctcagcgggatattgtctaatacataaaatgataggtggtgtactatggacaccacctgataggtacaaatccataacaggagaccattctctcatttatctgggggtcgcactgtcccctctttggaattttgacctctgcctcgacaggtggattttacttaaacagtttgccaacaccccccgccaacatatttaagtcccataaagttgcatatttgcagctaatgcccttttctgtcatcaacttaaaaaaaaatttgtgtgtgcaaacacagacacagttttcactaatatgtgtcatctaattcatacatgcccagtacgtaacacatgaacaacaaaaatatttgtacagctcttctgaactgaacgtgaactgtttacttccatgggtaaaaagatttccccctaatcctttctaccactggcaaagggaaacaatatatcagaatcagccagtgaccattttcaatcaggcaacttccttctgggaacttgaatatatcatgcttgcctttacccaagtttataaaatcacagccatttgagccacttttactgacaaatctttttattgactatgtcaggataaaaaaaaaaaaaagctgatctatattctgattctgctttaattgtaagcagtcaattaaactcccttcagaatcaattttcctaactgcaaaaggggctaaacgatcttatcctttaacgttccttagcaataggaaatattaaatcagtggagtttgagtcagatccatggtttttcatcctaattctgtcattaactagatagcactgattgaattagttgctctccccaggactcggttactgctcaataaataaataaataaataaatacacaaaaacatcagattagacttttctacgctcatttcactgtctgtatcttcctgagaataaaagctatgaagtagttttgacatacaaaaaggcataaataatagtattataaacaattgcgtattcagcacccaaagtcacaaatgtggttgaaacctctcttgtaggtttcttaagtgtatgccccaatttccatcagggttgccctacaacgagtttagttttctcattcctatgcatttcattgtcctttactacatgtgtttgtatcttaaagtttatgtagtacactctttcatgctattaaatgttccctaaattatggcattctggaaaatttatggacaatttgctggtcttttcataatatttgtgacaatcataagatttgtgagattcatccaagactatataccaatgcttgatgactcattttttattcgtatctgtattacttttggtgtatatgccccagtttatccactcattctcctattraaaacatttcattttccagttatttgctataacacacaatgctatcataatcattcttgtacatgccttcttaatctgtataatatatgtttcggattggaattgctgggacaaaaat

SEQ ID NO: 552604 - DNA, 554 bp, Homo sapiens
cggtagcagcaggagattacggtactagctgggctactgcctgagttacgtcagcgagagctgcaaagttccttgctattcttttctggtgtcggggagctgaatattaaaagggtgattgtggagttaccggttatctgcatttttttttcttttcttattttgactctttttaaaaaatgcaggtaaagtgacagcggttcaggagcttaaagacatcagtggtggaggggtgagtcagcgggtgcaaaaggacaaggatttggtgcctcggagacacggtcccctctccgcctccagagaagagcaggcaggcagctcccgggaccgaagccgggtccrcatcccccgcgcgcgagctggtggctcagcagcggcgcttcaggtgagtgcgccggggccggcgtcccgcagggccgagtgggtgagggcagacctcccccgccgtctggtgagacggaacccccacttttcccagcgcctcccgctttttccaccaggttttataccggcccctctaccccacccccgattcccttacatcttctgcgaag

SEQ ID NO: 552605 - DNA, 553 bp, Homo sapiens
tggttttccagtttgaagtttaggaagtcaaaaaacttcttcaggccgggcatggtggctcacgcctgtaatcccagcactttggggggccgaggcaggtggatcacaaggtcaggagatcgagaccatcctggctaacacagtgaaaccccgtctctactaaagacacaaaaaatgagctgggcgttgtggcaggagcctgtagtcccagctacttaggaggctgaggcaggagaatcacttgaacccgggaggcggaggttgcartgagccaagattgcaccactgcactccagcctgggcgcagatcgaggctccatctcaaaaaaaaaaaaaaaaaaattcttcacagagaagtgaagcaccacttaactagcacccttattactttctaataattagcatgcatagtccatcattatatcatatgctttaaatacacaaatttgcttgcaagtctatcttgatatctattgaaataaaaatctctaatgtaaagacctggttttcattatactgggtttaatatctgacttgtccaggatagagctag

SEQ ID NO: 552606 - DNA, 2262 bp, Homo sapiens
ggtagacaaatttatagatggtagataggtacctaatagatagatagatagatagatagatagatagatagatagatagaatatgtagtagattagcaagcaaagaggattggaaaatagagaatatgttatagaggttgaagggagtgaagttctttggtttgaaatgtcaacggatgcttctctgaggtagtaagattcaagctgacaacagagtgacaagaaggggccagcaaagggaaatactgggacaagggacaagaaagagcacagggcctagtccctcctgtagacaccagcttactgtattaaaagaaattatcaagaggaggtaggactgagaaacaagagaatggcaaagctaagactggagagttggggtgcgggacatgatatttgaccatgtgaaccacggcaaagttgagatgtataaagaggatacatagagatatttaaatcatagttttctcagattaaaagcctagagtgatacgtgcctttgctccatcccctctgcaatttccccctcccacctttcctctgtgcaaccaaaccacctataactcaaagaaagcatatgatatattaaatgcgcagcctttgcagaggttaccaggtaattctatccactcaacagacatgtcttgacctcacactatgtagtagttgctaagaaaacataataataataacaatatttattggagtagctagcatttaatgaaaattattaggagccaattaccagcactttgctttatgcttatgaaactccatgagtgtctactatcattatacccattttcaaacaagggaattgaatgacacataacaagacataattcctgccctcagtttattagatagacatttcagctcaaatattccaggccaccgtaatagctgtcaccatagaggttgaataggaacatagaagagattgaggtaaraagaaatgagaactctctttgtatttgaaatccagtggccctgtgaggaactctgggcagcgctgtatagtcagaggagtgtcagtgagtgattcaaggtcacacagtaaggaaggtgtggctgtgggcttctgccttctaacttctctgcagggccctagctagccacactccctgcctttccaatgcacactcagctgttaaattaccaaatagtatgttacctctttctcaagtatttgcagatcctctgatgagtacaatggttcttaccaaataatgcatgattatgtgtgacacgtcactgtcagttgtcagcaactctttagtgtatcagtgtgcactgggagaaagaagaagtgacaaagttctggtggtaggaagaagggcatttgggaacattcacatgtccttcataccagtgcatttgttttttaataggatctggaatcaggatctgaaagtggagcagataccatttcagtaaatcagacacgagtaaatttgtcttctgacactgagtccacggacctcccatcttccactccagtagccaattctggaaccaaacccaagactacggtgagttctaaataataacagagagtctctacgtgtaaatgttgatgatcatcaggtaagagttgatattcattcgatatagaagaaatactgttggaatcttagccatagtgacttaatgatatttaatttatttaattaagtacaaccctagaaaaatgttttttgttttataaatgataacacaagtacttcactgaaacaggtcatgaatcaagaattattcgaaacgtgctaattaaatttcattgccggatactcagagctttaaagagccaagaatgcaaaatctggagatgcctttccctacactattatcttgacagtattgcttaccagttagaaaattgttcctctaagatgtgatgaatgatagacgacagatgatgatggatggatggatggatggatggatggacagatagactgattgattgataaggagaaagagatgatagagatagatgtagatggatggatagacagataataattatataaagatatttagattgatatagacagacatagatagataataggtttatatgcagagatatataaaacatccacatcaaacattttctgtgggaattaaatgaaagagcacatataaaaagtgcttagtgaaatgatcagtgcagaataagtaatgcataaatgtaaggtactgtcattattattatgataattagtagactttacaatgctattaaaacaacttattcca

SEQ ID NO: 552607 - DNA, 2262 bp, Homo sapiens
ggtagacaaatttatagatggtagataggtacctaatagatagatagatagatagatagatagatagatagatagatagaatatgtagtagattagcaagcaaagaggattggaaaatagagaatatgttatagaggttgaagggagtgaagttctttggtttgaaatgtcaacggatgcttctctgaggtagtaagattcaagctgacaacagagtgacaagaaggggccagcaaagggaaatactgggacaagggacaagaaagagcacagggcctagtccctcctgtagacaccagcttactgtattaaaagaaattatcaagaggaggtaggactgagaaacaagagaatggcaaagctaagactggagagttggggtgcgggacatgatatttgaccatgtgaaccacggcaaagttgagatgtataaagaggatacatagagatatttaaatcatagttttctcagattaaaagcctagagtgatacgtgcctttgctccatcccctctgcaatttccccctcccacctttcctctgtgcaaccaaaccacctataactcaaagaaagcatatgatatattaaatgcgcagcctttgcagaggttaccaggtaattctatccactcaacagacatgtcttgacctcacactatgtagtagttgctaagaaaacataataataataacaatatttattggagtagctagcatttaatgaaaattattaggagccaattaccagcactttgctttatgcttatgaaactccatgagtgtctactatcattatacccattttcaaacaagggaattgaatgacacataacaagacataattcctgccctcagtttattagatagacatttcagctcaaatattccaggccaccgtaatagctgtcaccatagaggttgaataggaacatagaagagattgaggtaagaaraaatgagaactctctttgtatttgaaatccagtggccctgtgaggaactctgggcagcgctgtatagtcagaggagtgtcagtgagtgattcaaggtcacacagtaaggaaggtgtggctgtgggcttctgccttctaacttctctgcagggccctagctagccacactccctgcctttccaatgcacactcagctgttaaattaccaaatagtatgttacctctttctcaagtatttgcagatcctctgatgagtacaatggttcttaccaaataatgcatgattatgtgtgacacgtcactgtcagttgtcagcaactctttagtgtatcagtgtgcactgggagaaagaagaagtgacaaagttctggtggtaggaagaagggcatttgggaacattcacatgtccttcataccagtgcatttgttttttaataggatctggaatcaggatctgaaagtggagcagataccatttcagtaaatcagacacgagtaaatttgtcttctgacactgagtccacggacctcccatcttccactccagtagccaattctggaaccaaacccaagactacggtgagttctaaataataacagagagtctctacgtgtaaatgttgatgatcatcaggtaagagttgatattcattcgatatagaagaaatactgttggaatcttagccatagtgacttaatgatatttaatttatttaattaagtacaaccctagaaaaatgttttttgttttataaatgataacacaagtacttcactgaaacaggtcatgaatcaagaattattcgaaacgtgctaattaaatttcattgccggatactcagagctttaaagagccaagaatgcaaaatctggagatgcctttccctacactattatcttgacagtattgcttaccagttagaaaattgttcctctaagatgtgatgaatgatagacgacagatgatgatggatggatggatggatggatggatggacagatagactgattgattgataaggagaaagagatgatagagatagatgtagatggatggatagacagataataattatataaagatatttagattgatatagacagacatagatagataataggtttatatgcagagatatataaaacatccacatcaaacattttctgtgggaattaaatgaaagagcacatataaaaagtgcttagtgaaatgatcagtgcagaataagtaatgcataaatgtaaggtactgtcattattattatgataattagtagactttacaatgctattaaaacaacttattcca

SEQ ID NO: 552608 - DNA, 1150 bp, Homo sapiens
gcatcttaattgagttcccaccttcaaattgatgatgaggagggcaagcatgatgggcggtgacactaacccagaataaatatccagaataaatatcattcaagtggcaggcccatctacatgcttcaacaagtcgttttcactcactttcccccacattgtatttattttgatcattactatgttgctgaggaaaatgcaaaccaataaacaaactggggacctgtgaggttgagtaatttgcatgacattgcacagctaacaggagcctgtgcctggattaaccctgcatctatttgctcttaattcttttacttacacagttgctgcgctatcctacctatctttcattcttgggcttttgctattttcctaaaatacaggctgagtcatgcagcttcttgtctaaatatgtccgcaacccattccctcttaggtttgagcataaatttacgctgcwcaaagtgttatctaaagccttttgtgacctgcaccgcctgacccttcaaccttataattttctcttatccaacaacttttggctcaaatgccacttgctctgtaaattcttacagattgctgcaatcagaattgaattccaatgtgttcccagagcatctgggtttcagtagagtacacagtgcctgaggtgttatcatatggcggttgtttggatgtctgtcatctccccgggatgcaaaacacaagtttttcaaagatgccgtcagcctgctttccaccatgatatctccatgctgcctaatgtgtgctttgttgcctggctcataggacagagagacggttaaataaataaatagaaagatgctgaatacatgaattggtattaatctttcattcccctccttagtggacagaacgtcatgtcttcctgcttttctctgttaatcttcagttgggaacctgtttcaaattctcactatctttgttgaactgtggacaacctagctggagaccagtgaaaaaatcagtttgactaatgctaagtgcaaaggaataacttcacgatttctgctctcaaattttggtgaaaggatttctatttactattctaatgagtacaatatggatgacacagtgtccgtttttaagccatgactgtgctgccccgtcattctcaagggatacattc

SEQ ID NO: 552609 - DNA, 1150 bp, Homo sapiens
gcatcttaattgagttcccaccttcaaattgatgatgaggagggcaagcatgatgggcggtgacactaacccagaataaatatccagaataaatatcattcaagtggcaggcccatctacatgcttcaacaagtcgttttcactcactttcccccacattgtatttattttgatcattactatgttgctgaggaaaatgcaaaccaataaacaaactggggacctgtgaggttgagtaatttgcatgacattgcacagctaacaggagcctgtgcctggattaaccctgcatctatttgctcttaattcttttacttacacagttgctgcgctatcctacctatctttcattcttgggcttttgctattttcctaaaatacaggctgagtcatgcagcttcttgtctaaatatgtccgcaacccattccctcttaggtttgagcataaatttacgctgcacaaagtgttatctaaagccttttgtgacctgcaccgcctgacccttcaaccttataattttctcttatccaacaacttttggctcaaatgccacttgctctgtaaattcttacagattgctgcaatcagaattgaattccaatgtgttcccagagcatctgggtttcagtagagtacacagtgcctgaggtgttatcatatggcgkttgtttggatgtctgtcatctccccgggatgcaaaacacaagtttttcaaagatgccgtcagcctgctttccaccatgatatctccatgctgcctaatgtgtgctttgttgcctggctcataggacagagagacggttaaataaataaatagaaagatgctgaatacatgaattggtattaatctttcattcccctccttagtggacagaacgtcatgtcttcctgcttttctctgttaatcttcagttgggaacctgtttcaaattctcactatctttgttgaactgtggacaacctagctggagaccagtgaaaaaatcagtttgactaatgctaagtgcaaaggaataacttcacgatttctgctctcaaattttggtgaaaggatttctatttactattctaatgagtacaatatggatgacacagtgtccgtttttaagccatgactgtgctgccccgtcattctcaagggatacattc

SEQ ID NO: 552610 - DNA, 1150 bp, Homo sapiens
gcatcttaattgagttcccaccttcaaattgatgatgaggagggcaagcatgatgggcggtgacactaacccagaataaatatccagaataaatatcattcaagtggcaggcccatctacatgcttcaacaagtcgttttcactcactttcccccacattgtatttattttgatcattactatgttgctgaggaaaatgcaaaccaataaacaaactggggacctgtgaggttgagtaatttgcatgacattgcacagctaacaggagcctgtgcctggattaaccctgcatctatttgctcttaattcttttacttacacagttgctgcgctatcctacctatctttcattcttgggcttttgctattttcctaaaatacaggctgagtcatgcagcttcttgtctaaatatgtccgcaacccattccctcttaggtttgagcataaatttacgctgcacaaagtgttatctaaagccttttgtgacctgcaccgcctgacccttcaaccttataattttctcttatccaacaacttttggctcaaatgccacttgctctgtaaattcttacagattgctgcaatcagaattgaattccaatgtgttcccagagcatctgggtttcagtagagtacacagtgcctgaggtgttatcatatggcggttgtttggatgtctgtcatctccccgggatgcaaaacacaagtttttcaaagatgccgtcagcctgctttccaccatgatatctccatgctgcctaatgtgtgctttgttgcctggctcataggacagagagacggttaaataaataaatagaaagatgctgaatamatgaattggtattaatctttcattcccctccttagtggacagaacgtcatgtcttcctgcttttctctgttaatcttcagttgggaacctgtttcaaattctcactatctttgttgaactgtggacaacctagctggagaccagtgaaaaaatcagtttgactaatgctaagtgcaaaggaataacttcacgatttctgctctcaaattttggtgaaaggatttctatttactattctaatgagtacaatatggatgacacagtgtccgtttttaagccatgactgtgctgccccgtcattctcaagggatacattc

SEQ ID NO: 552611 - DNA, 558 bp, Homo sapiens
tgattcgaattcgaatggaatcgcatggaatgtaatcaaatggaatggaatggaatgcaatagaattgaatagaatggaatgcaatgaaatggaacggaggggaatcgagtggaatggaatcgaatggagtgaaatggaatggaatggacgtgaaaggaatagactggaacaaaatgaaatmgaacggtaggaatcatacagaacagaaagaaatggaacggaatggaatgcactcgaatggaaaggagtccaatggaagggaatcgaatggaatgaaatagaatggaatggaattgaatggaatcgaaaggaatagaatggaatggatcgttatggaaagatatcgaatggaatggaattgactcgaatggaatggactggaatggaacggactcgaatggaatggactggaatggaatggattgaacggaatggactggagaggaatggactcgaatggaaaggactggagtggactttactcgaatggaatggaaacgtatggaatggaatggaatggactttaaaggaatagaatggaacggaattggatagaa

SEQ ID NO: 552612 - DNA, 558 bp, Homo sapiens
tgattcgaattcgaatggaatcgcatggaatgtaatcaaatggaatggaatggaatgcaatagaattgaatagaatggaatgcaatgaaatggaacggaggggaatcgagtggaatggaatcgaatggagtgaaatggaatggaatggacgtgaaaggaatagactggaacaaaatgaaatcgaacggtaggaatcatacagaacagaaakaaatggaacggaatggaatgcactcgaatggaaaggagtccaatggaagggaatcgaatggaatgaaatagaatggaatggaattgaatggaatcgaaaggaatagaatggaatggatcgttatggaaagatatcgaatggaatggaattgactcgaatggaatggactggaatggaacggactcgaatggaatggactggaatggaatggattgaacggaatggactggagaggaatggactcgaatggaaaggactggagtggactttactcgaatggaatggaaacgtatggaatggaatggaatggactttaaaggaatagaatggaacggaattggatagaa

SEQ ID NO: 552613 - DNA, 558 bp, Homo sapiens
tgattcgaattcgaatggaatcgcatggaatgtaatcaaatggaatggaatggaatgcaatagaattgaatagaatggaatgcaatgaaatggaacggaggggaatcgagtggaatggaatcgaatggagtgaaatggaatggaatggacgtgaaaggaatagactggaacaaaatgaaatcgaacggtaggaatcatacagaacagaaagaaatggaacggaatggaatgcactcgaatggaaaggagtccaatggamgggaatcgaatggaatgaaatagaatggaatggaattgaatggaatcgaaaggaatagaatggaatggatcgttatggaaagatatcgaatggaatggaattgactcgaatggaatggactggaatggaacggactcgaatggaatggactggaatggaatggattgaacggaatggactggagaggaatggactcgaatggaaaggactggagtggactttactcgaatggaatggaaacgtatggaatggaatggaatggactttaaaggaatagaatggaacggaattggatagaa

SEQ ID NO: 552614 - DNA, 1040 bp, Homo sapiens
cccggtgtggtggtgggtgcctgtaatcccagctactcgggaggctgaggcaggagaatcgcttgaacccacgaggcggaggttgcagtgagcagagatcgcgccattgcattccagcctgggcgacaagtaaaactccatctcaaattaaaaaatttaaaaaaaaaagaaactgtagagcactggatcattttagttgagaaagtacaaggatataagtcctaagaatttcatgatagcatggctagtgagtgttmattcagtccgtgtgacacgatctgcagtcacctgtgtagcgcagtcaggcctccctagatgctagggagttactcatgcaaatcaaaccccaagctcaactttcaagagaactggactggcgaaaaaaagaaaagctgaacaactgttaagaaaaggtgttttaaatgccagtggaattatctgagaaagatgaaaggcagggagttgtaacaattgtaaggactaactggaatccatcatattttaacatgtctgactcattgtcttgcaaaaaaatttacatatatgtatgtgtatatatatatgtatgtgtgtatatatatatacatatatgtatgtatataaatggcttcacataaattccaaatactcctgaaaaaacccttaaaattagagctgatggccctgctatatataggatccaagaggctaaagtaactttctcaaggcataaacccagcaagtatctgagaaagaacatgaatgtacattttttgatctagatgctgaagtttttcccttccttttgttcctattgaacaataccacttcacatttagaccatcagcttatacagttcagtaccttatactaactagggtttccaaaatgtaaagaaatgaataaaggaataattaaacagaaagtaggcacttgaatatttaatagattaaagcttaacatagttacaaaaatgtctaagacaaaattaacaaatcattgaggaaatactctaatagtatttacttttcatagtgatactttagaatttcaagaattta

SEQ ID NO: 552615 - DNA, 1040 bp, Homo sapiens
cccggtgtggtggtgggtgcctgtaatcccagctactcgggaggctgaggcaggagaatcgcttgaacccacgaggcggaggttgcagtgagcagagatcgcgccattgcattccagcctgggcgacaagtaaaactccatctcaaattaaaaaatttaaaaaaaaaagaaactgtagagcactggatcattttagttgagaaagtacaaggatataagtcctaagaatttcatgatagcatggctagtgagtgttaattcagtccgtgtgacacratctgcagtcacctgtgtagcgcagtcaggcctccctagatgctagggagttactcatgcaaatcaaaccccaagctcaactttcaagagaactggactggcgaaaaaaagaaaagctgaacaactgttaagaaaaggtgttttaaatgccagtggaattatctgagaaagatgaaaggcagggagttgtaacaattgtaaggactaactggaatccatcatattttaacatgtctgactcattgtcttgcaaaaaaatttacatatatgtatgtgtatatatatatgtatgtgtgtatatatatatacatatatgtatgtatataaatggcttcacataaattccaaatactcctgaaaaaacccttaaaattagagctgatggccctgctatatataggatccaagaggctaaagtaactttctcaaggcataaacccagcaagtatctgagaaagaacatgaatgtacattttttgatctagatgctgaagtttttcccttccttttgttcctattgaacaataccacttcacatttagaccatcagcttatacagttcagtaccttatactaactagggtttccaaaatgtaaagaaatgaataaaggaataattaaacagaaagtaggcacttgaatatttaatagattaaagcttaacatagttacaaaaatgtctaagacaaaattaacaaatcattgaggaaatactctaatagtatttacttttcatagtgatactttagaatttcaagaattta

SEQ ID NO: 552616 - DNA, 1040 bp, Homo sapiens
cccggtgtggtggtgggtgcctgtaatcccagctactcgggaggctgaggcaggagaatcgcttgaacccacgaggcggaggttgcagtgagcagagatcgcgccattgcattccagcctgggcgacaagtaaaactccatctcaaattaaaaaatttaaaaaaaaaagaaactgtagagcactggatcattttagttgagaaagtacaaggatataagtcctaagaatttcatgatagcatggctagtgagtgttaattcagtccgtgtgacacgatctgcagtcacctgtgtagcgcagtcaggcctccctagatgctagggagttactcatgcaaatcaaaccccaagctcaactttcaagagaactggactggcgaaaaaaagaaaagctgaacaactgttaagaaaaggtgttttaaatgccagtggaattatctgagaaagatgaaaggcagggagttgtaacaatwgtaaggactaactggaatccatcatattttaacatgtctgactcattgtcttgcaaaaaaatttacatatatgtatgtgtatatatatatgtatgtgtgtatatatatatacatatatgtatgtatataaatggcttcacataaattccaaatactcctgaaaaaacccttaaaattagagctgatggccctgctatatataggatccaagaggctaaagtaactttctcaaggcataaacccagcaagtatctgagaaagaacatgaatgtacattttttgatctagatgctgaagtttttcccttccttttgttcctattgaacaataccacttcacatttagaccatcagcttatacagttcagtaccttatactaactagggtttccaaaatgtaaagaaatgaataaaggaataattaaacagaaagtaggcacttgaatatttaatagattaaagcttaacatagttacaaaaatgtctaagacaaaattaacaaatcattgaggaaatactctaatagtatttacttttcatagtgatactttagaatttcaagaattta

SEQ ID NO: 552617 - DNA, 559 bp, Homo sapiens
ttttaccacaataaaaattttatgtaggtctacagattcatattcttttatagttccattggcaatttttgaacttctcttaataaggacattatgaaatgtgggtgtgttcatctctagtaaattatatgagtatttgcatcatttaaattttctgtttaacgcaaatgtagacagtataaattaagcaaaataagtaaaaaatttaatagtgaaaattttggaaatgttgaagtgttttatatcctcrtaactatgtatcttacccttttttgttttagaattcaagtctaataacaatttgtatgattttagttttttgctcaagtatattagggtatgtcaaagaagtggttcaaattttccaacaggtatgaaatacattttgtatgtctaaagttgcaaatattttaatattcagaacataaattaattgataagctgttacttgagataatactgtgtcataataaattcacatagcttgactaacatatagattagaaataccaagcataaatgtttcaaaatgtagaaatcacatgattttgggtaaggt

SEQ ID NO: 552618 - DNA, 1249 bp, Homo sapiens
tcactagaattttttttccacaataaccttttgcgttcactaaaatttttatgaaaaacttaatttgcgtggctaatgagtgttggaattgtggggctctgtatatctcaacatttcctgggttaagttaacatagtaaattgaggtatcccttttctccttaggcaaatccatagcagtgatgagtactggtgatcatttttgcaaaatattctcaaaatatgtctcaagaaagtcagaattagaccattgttttggagttttgtttctaatctataatgaactaagaaagtccaaatgaatttattcrtaacacatgtaaaatatatttttaagtaaataagagcaaccaattgagtcatttatttaagaaatacttatgtacttattgaatgatactatgtgccaggcactattatacactgggaggagccagtggtgaagaaaatgacaaagtctgctctcttggagcttatattctagtggaaagagatctagagtaaacaaacgggcaagtatttaatatgatggcaacaagtacagtgaagaaaactgtatcaaggcaaggggttagagagtggggcagctatatgacacagggtagtcagtgactgtctctttgagaagacaatgatatatatgaagtagtgatgaagccagtcttgcgggtacagaggaaggaatatctcaggagagggaacagtaaataccaataccctaagccaacattaaacttggtgtcttcaagaacaacagggaagccaggatgattggagcaatgtgaatgagggaggggaagagtgctggggatgatatcagagtggtcacaggtaacagatcgtgtgatatatcctctgcctttctgcacaaattatgttaaatcatttttaaattgaaaattttaaaagtttgcttatgttcaaatcttcaaagtgatcatgctaacatattatcgtgtatttatgactttgaaaagatatgatatacatggaagcagcctacccattgagactattccaaacattgtagctattatttttatttaaaatgtatattaatctccataattcacagtttatgatttatgtactatttgattcaataataaacagtatgttttgagtatgtgtgccagtcactctcattggtgatggagttaatgttggaaaagatgaacctctctgctcacaggcagtcaccagcaagtacctttctaccaagtgtgggcacagggatattaacactataa

SEQ ID NO: 552619 - DNA, 1249 bp, Homo sapiens
tcactagaattttttttccacaataaccttttgcgttcactaaaatttttatgaaaaacttaatttgcgtggctaatgagtgttggaattgtggggctctgtatatctcaacatttcctgggttaagttaacatagtaaattgaggtatcccttttctccttaggcaaatccatagcagtgatgagtactggtgatcatttttgcaaaatattctcaaaatatgtctcaagaaagtcagaattagaccattgttttggagttttgtttctaatctataatgaactaagaaagtccaaatgaatttattcgtaacacatgtaaaatatatttttaagtaaataagagcaaccaattgagtcatttatttaagaaatacttatgtacttattgaatgatactatgtgccaggcactattatacactgggaggagccagtggtgaagaaaatgacaaagtctgctctcttggagcttatattctagtggaaagagatctagagtaaacaaacgggcaagtatttaatatgatggcaacaagtacagtgaagaaaactgtatcaaggcaaggggttagagagtggggcagctatatgacacagggtagtcagtgactgtctctttgagaagacaatgatatatatgaagtagtgatgaagccagtcttgcgggtacagaggaaggaatatctcaggagagggarcagtaaataccaataccctaagccaacattaaacttggtgtcttcaagaacaacagggaagccaggatgattggagcaatgtgaatgagggaggggaagagtgctggggatgatatcagagtggtcacaggtaacagatcgtgtgatatatcctctgcctttctgcacaaattatgttaaatcatttttaaattgaaaattttaaaagtttgcttatgttcaaatcttcaaagtgatcatgctaacatattatcgtgtatttatgactttgaaaagatatgatatacatggaagcagcctacccattgagactattccaaacattgtagctattatttttatttaaaatgtatattaatctccataattcacagtttatgatttatgtactatttgattcaataataaacagtatgttttgagtatgtgtgccagtcactctcattggtgatggagttaatgttggaaaagatgaacctctctgctcacaggcagtcaccagcaagtacctttctaccaagtgtgggcacagggatattaacactataa

SEQ ID NO: 552620 - DNA, 1249 bp, Homo sapiens
tcactagaattttttttccacaataaccttttgcgttcactaaaatttttatgaaaaacttaatttgcgtggctaatgagtgttggaattgtggggctctgtatatctcaacatttcctgggttaagttaacatagtaaattgaggtatcccttttctccttaggcaaatccatagcagtgatgagtactggtgatcatttttgcaaaatattctcaaaatatgtctcaagaaagtcagaattagaccattgttttggagttttgtttctaatctataatgaactaagaaagtccaaatgaatttattcgtaacacatgtaaaatatatttttaagtaaataagagcaaccaattgagtcatttatttaagaaatacttatgtacttattgaatgatactatgtgccaggcactattatacactgggaggagccagtggtgaagaaaatgacaaagtctgctctcttggagcttatattctagtggaaagagatctagagtaaacaaacgggcaagtatttaatatgatggcaacaagtacagtgaagaaaactgtatcaaggcaaggggttagagagtggggcagctatatgacacagggtagtcagtgactgtctctttgagaagacaatgatatatatgaagtagtgatgaagccagtcttgcgggtacagaggaaggaatatctcaggagagggaacagtaaatacmaataccctaagccaacattaaacttggtgtcttcaagaacaacagggaagccaggatgattggagcaatgtgaatgagggaggggaagagtgctggggatgatatcagagtggtcacaggtaacagatcgtgtgatatatcctctgcctttctgcacaaattatgttaaatcatttttaaattgaaaattttaaaagtttgcttatgttcaaatcttcaaagtgatcatgctaacatattatcgtgtatttatgactttgaaaagatatgatatacatggaagcagcctacccattgagactattccaaacattgtagctattatttttatttaaaatgtatattaatctccataattcacagtttatgatttatgtactatttgattcaataataaacagtatgttttgagtatgtgtgccagtcactctcattggtgatggagttaatgttggaaaagatgaacctctctgctcacaggcagtcaccagcaagtacctttctaccaagtgtgggcacagggatattaacactataa

SEQ ID NO: 552621 - DNA, 1249 bp, Homo sapiens
tcactagaattttttttccacaataaccttttgcgttcactaaaatttttatgaaaaacttaatttgcgtggctaatgagtgttggaattgtggggctctgtatatctcaacatttcctgggttaagttaacatagtaaattgaggtatcccttttctccttaggcaaatccatagcagtgatgagtactggtgatcatttttgcaaaatattctcaaaatatgtctcaagaaagtcagaattagaccattgttttggagttttgtttctaatctataatgaactaagaaagtccaaatgaatttattcgtaacacatgtaaaatatatttttaagtaaataagagcaaccaattgagtcatttatttaagaaatacttatgtacttattgaatgatactatgtgccaggcactattatacactgggaggagccagtggtgaagaaaatgacaaagtctgctctcttggagcttatattctagtggaaagagatctagagtaaacaaacgggcaagtatttaatatgatggcaacaagtacagtgaagaaaactgtatcaaggcaaggggttagagagtggggcagctatatgacacagggtagtcagtgactgtctctttgagaagacaatgatatatatgaagtagtgatgaagccagtcttgcgggtacagaggaaggaatatctcaggagagggaacagtaaataccaataccctaagccaacattaaacwtggtgtcttcaagaacaacagggaagccaggatgattggagcaatgtgaatgagggaggggaagagtgctggggatgatatcagagtggtcacaggtaacagatcgtgtgatatatcctctgcctttctgcacaaattatgttaaatcatttttaaattgaaaattttaaaagtttgcttatgttcaaatcttcaaagtgatcatgctaacatattatcgtgtatttatgactttgaaaagatatgatatacatggaagcagcctacccattgagactattccaaacattgtagctattatttttatttaaaatgtatattaatctccataattcacagtttatgatttatgtactatttgattcaataataaacagtatgttttgagtatgtgtgccagtcactctcattggtgatggagttaatgttggaaaagatgaacctctctgctcacaggcagtcaccagcaagtacctttctaccaagtgtgggcacagggatattaacactataa

SEQ ID NO: 552622 - DNA, 1249 bp, Homo sapiens
tcactagaattttttttccacaataaccttttgcgttcactaaaatttttatgaaaaacttaatttgcgtggctaatgagtgttggaattgtggggctctgtatatctcaacatttcctgggttaagttaacatagtaaattgaggtatcccttttctccttaggcaaatccatagcagtgatgagtactggtgatcatttttgcaaaatattctcaaaatatgtctcaagaaagtcagaattagaccattgttttggagttttgtttctaatctataatgaactaagaaagtccaaatgaatttattcgtaacacatgtaaaatatatttttaagtaaataagagcaaccaattgagtcatttatttaagaaatacttatgtacttattgaatgatactatgtgccaggcactattatacactgggaggagccagtggtgaagaaaatgacaaagtctgctctcttggagcttatattctagtggaaagagatctagagtaaacaaacgggcaagtatttaatatgatggcaacaagtacagtgaagaaaactgtatcaaggcaaggggttagagagtggggcagctatatgacacagggtagtcagtgactgtctctttgagaagacaatgatatatatgaagtagtgatgaagccagtcttgcgggtacagaggaaggaatatctcaggagagggaacagtaaataccaataccctaagccaacattaaacttggtgtcttcaagaacaacagggaagccaggatgattggagcaatgtgaatgagggaggggaagagtgctggggatgatatcagagtggtcacaggtaacagatcgtgtgatatatcctctgcctttctgcacaaattatgttaaatcatttttaaattgaaaattttaaaagtttgcttatgttcaaatcttcaaagtgatcatgctaacatattatcgtgtatttatgactttgaaaagatatgatatacatggaagcagcctacccattgagactattccaaacattgtagctattatttttatttaaaatgtatattaatctccataattcacagtttatgatttatgtactatttgattcaataataaacagtatgttttgagtatgtgtgccagtcactctcattggtgatggagttaatgttgraaaagatgaacctctctgctcacaggcagtcaccagcaagtacctttctaccaagtgtgggcacagggatattaacactataa

SEQ ID NO: 552623 - DNA, 545 bp, Homo sapiens
aattcgtaacctcagagccctcattcttgaccattagttaagagagcacccggttgccttatctgcataactaatgtcaagtacttctgtggttttgattatgctcggcacattaggtggtcaacaattaataattggtgataaatttgttcaccagtctwttcaaggattgtcaagcaaattaatatctaggaggcatgaagctgtaaagaaaaatacttgttctacgtgtaagagggaagagaatatggggcattcatttcttgagtgacataaaatttagagaacatttttgagaaaatttttactttatgaagaaaattttgaaaacttccaatgacttagcggcccaagctggcccatgtgctgaggctgaggtgtatccaccagtcaacagtgcaaaaagcaaacacaaaatctccaggtgcttctgaattatttcaggagcaaggtgcctcagattcttagctgaggtcagggcagcttcacacatttgttccctctgagaaaagagttctttttaaaagatttggcaaatgtttact

SEQ ID NO: 552624 - DNA, 683 bp, Homo sapiens
gagtctcagctggtggacacgggaacccaaaccgacatcacctttgaacatatcatggccctcactaagatgtcctctcccagcccacccgtgctggatccctatctcttgccagaggagtaagtaacctaatcttgaacccctaatgcattaagaagtatttccaagttggtttctttctcttctatgtggtgaaaaaaattaatgcaccctatarttttcctccaagttgcccatgtttaactttattgtttatagaggcaataaatcgaatcctgctcaaaaccgctccgacatattaattactttattataaccctggagcggacttattcaaattatatcctaagaacagaattacttacaaatgttgtaaaagttgtttcagaataaaatgtaatcaccccaaatggtaatttgaagatcctgcagttattactagggaatgttgatcattcttttaaatagacaaaaaagtaagttgtgtgtgtcaagagagccctggaggttgtgccttctgctttcttgggtctcatttcaagcctggatccatgtaataagcccgcacatgcctcatctaagtactgcatcaaccaattaaataacagctgcaactcagcacgccacatggatttctttacacacacctcttctctcaacttatttctgccagcgataaagag

SEQ ID NO: 552625 - DNA, 1309 bp, Homo sapiens
ggcttaatgtcctaatttgcataatgaaaaatataataatgtctccttcatagagctcttgtaaatgttaaatcatttatccatttaaaccccttagaacagtgagctacayagtaagactcaataatcttatctcttcatatatatggaggcacacacccatggagaaacaattcaatgaaatgagcaaggtgagttattgagggaccagtgttttcatacttacaccctgcttgtataaagatgtaatgtttattggaaatagatggagatgtagcattgttaagaaatactgagtaatttgattccttaactttggatctcaccccttgttcttccagccattttctccccgtcctattgtttctaaaatatttaggaaagttttaaaggaaaagagaatattaagagcagctgatggaactcttccggctcctttgctggacactataaaaatgcaagagtgacctaaattcaaaaacgcagcatcccatggatgtcttagaatttcaaatgcaaatcgcttttctttgattttcctcattcctaccctcggtctctcagctggggaatttctattagaaaatctcagtgcatcttcatttggatgaatcctgggaacccagacatagcatgcagcatctgggaaacatgggaaaccctttagttagcctcccctgagttatctgaagatgagaaacatctgttactgtcttttcagagacagggtgtttgatgggcttatttttctgctttgcttggatattctcagctcagccaaatattgtccctaaagaagtcatcacaaataaggtatgataaacccatgaacttgaggtgttatcaatcataaaaatactgcaaaacatccaagctatagtcatcccctattatatatttatatatatatatatatatatatatatatatagagagagagagagagagagagagagagcgcactaggatattcaaaagattgtacttttcactttctgcagaacagcacccaagaaaccagctctctgtgttagtagtttgaacacaattggaagaaataaaaaaaaaatgctgtgaaacaggtgcaagggtgtcagagtcattgaagcattgatgtaactgtcttaaatcccataaaatagtagcatttggcaagtctgtatataaatgaggttaggtttgccagaaaagtaaagtaacactactagtaagttaaaaaatcatatcctatcagaatttccctgcattccatccaaattttctatgaaactttggtaatagtctgattcatcacatataaattccatgc

SEQ ID NO: 552626 - DNA, 806 bp, Homo sapiens
tgtctttccatgtaagtgcaaagatgcttcaaattgggactacaacatcaatattatgasttttttagtgagaaaaaaatacctgtcactgttgtcatggagtgttgtgaagtaaacactccctagacttttgggcaacttagtattgagtataaacttgaagacttttggcattttgtgagctcatcttcatgttaaaagtttaaaaacagttgcttttgggttaaattcagctgtggtaaaaacgtagtaagttttaatggtctttgacactggaggttttagtggaaaattagttcagaatattattaatcaacatgaacaatgtatattacactattttttttttttttaagaaaggctctcccactgtcacccaggctggagtgtagtggcatgatctcaactcactgcagcctccacctcctaggtttaagtgattctcccacttcgacctctcaagtagctgggattaagctgggactaataggcacgtgccacacgcccggctaatttttgtatttttttggtagagacagggtttcaccatgttggcgaggctggtctcaaactcctggcttcaagtgatcctcctgcctcagcctcccaaagtgctgggatgacaggagtgagccaccacactgcctaccgtttcctttttgaagccttgagttgtttatcatttttattcttcttaaatgtactttgttacaaatcaccacagttgcttttgacatgatggctaggtagcctttgaggctgagcggttgtctaccacgtaattctttaggcagggccaagaatac

SEQ ID NO: 552627 - DNA, 549 bp, Homo sapiens
catgacatacaaaaattgaaaaactgggcaaaacttaaacaatctgtttaaggcaccgagagccattaaggcagtgagaccaacaaaaagggaagcaccaaggaggaagcttaactttttggtaaagttgattccatttgggatgtttgccaatttgttagcagaggttgtgagtcacagaggtttaagtgtctgagacaccatttaytaaactgttaaaagaagaaatagaaaatttgaatagtatgatacctattggagaaattacgtttgtaataacaacaacgatggtaaggaaagccttcccacaaagaaaactcaggcccatttagtttcactggtgaattctacaggcatttaagaaagaaacaatgccattcttttgttttcttttgtttttcgagacagggtctcactctgtcacccaggctggagtgcagtggcgtgatcacggctcactgcagcttcaacctcctgggctcaagcgatcctcccactcagtctcctgagtagctgatattcactgttagtcctccaacttaatgtttt

SEQ ID NO: 552628 - DNA, 897 bp, Homo sapiens
attaatctctggtaatacaaaatcataatgttccatacatgcgtgtatattacatcattcttccttctttcagtattgtttttccactactgtgttaattctcttaacaaaatacattttcattaataaatatacagatatgtttatcttttatcatatagttatattataaaaattaataaatgtatcttcccacaacaaaaaagattgaaaagtactgctcytgcttaaaattttggatttactctttaagtttccattctcctggtcccatatctgactaccaggtccaaatttttcaaaatttccctgcctttctggtcttactgatgacatcctaattaaagtctttattgcttatacctgcatttatccagtactataataattgatctctatcactcaagtatctctccactaccaatttttcccaaaaaccaatatcacaataattttcctaaaataccatgttcaaaaactttgaatagttgttctttaaaagtagttctcaaaatttatcctgcctaacagttaactgaggaaccgatttaaaatgtagattaccagcaccactcactgccctctcttgcaaaaggagtgggacacaaatatttacatttttattaagcacccaaatactgctcaataaaacaaacttcacccgaatatgaaacatgatccaaagtctcaactctagatgattctgtcaacttggataagtggcaatctctctagaactaagttttgttcaaataggtgaattttattcaaaattcattcagaatctagctgggagaaatctccatcaactaagctaagaattaatctctggtaatacaaaaacataatattccatccacttgaaagtgaagatttgaacaaagaacatatgttctt

SEQ ID NO: 552629 - DNA, 777 bp, Homo sapiens
gcgtgatggggctgttttccttggtagattctcagctaccctctgggatgttcaggttatcagggacacctgcttctaagctgggcaccttggccttggctcaccgcccagcctttaaagacaagcagcggacatgcactcctaagtaacccsgtgggtgacccatcacactacgtggctgtaccacttcacattcccaccagcaatgtttgaggttttgtttacccacatccccaccaagtcttattattgtcagccctttggattataactgtcctagtggtatttcactgtggttttaattttcctttccccaatgatgaatgatattgatcacattttcatgtgctctgcctcttttttttttttgagtcatttttatctatgaacttgtcacagctcctctcttagactgtaagagtttaaggcttgtgcctatttgtgaaataaatggagtaataatagatcttcctcatagagatcctgtgtgaattaaatcgtataatacaggataagcatttgtacatgtgcttcttatgcactgtattcatttatttattcctttagcagtttatgagaacctcttagatactcagcacaaagactcagaaatgagttaggcatggtctgtgccctggagaaaatcagacctcttctgatgtgatgtctctcaggaatctcaaatgcactgcaccccaaactcaactcattgccaggtccctgaagcccactccacactccacctgaattcgggatctcagtttatgggactgccat

SEQ ID NO: 552630 - DNA, 1055 bp, Homo sapiens
gttcaagggcagctgccagagatgctgagacaactgcacagcccaggcctgttttgggggccgggagggggtggtgggtggggaatgagactgaagaggcagggtcttactacttctacttcagtgcctctggggagtggaggggtataggccagggaagcaaataactactccgagctgtagctcagctgtgattccttgtgagagatcaaaggcccagccgacttttgttgcgttgggaaatctagctgcctgggacaggctgagtccctgatggttcataaagaaggtcaaatcaaccagcttcctgtgatgtagttaactggggacttattttgtgccagacactgtgttaggtgccttcagtgtattatcttgtgtgagcctcaaagtaacatctgtgacacaggtactgtcatcatcctsattttataaacgagaaaatgaaggctccagaggttaaggaacttgcccaaggtcagagacagcatgtggcagggccaggatggggacccaggctgccagcctcccaaacctagtttcttaacccctacctgacccccagtctatcagagagcagatgccataatcagaggaccacaattccatctccagcgagacagatgcgaggaagggaagagggatgccctgtgtgcatctgcccgcactgcgagtccttgccactccttagatcaacggagccagagatcttgccaccaacacactggcaaagcagctggtttgtctacactttctgtggagaacaaagttcattttgataaaggttggggtgctgggagggtttttgtttgtagtgagcattcagaataaaagaaccctcttgaaaccacttccctttcagatctgtcatggattaaactctggagactcaaagccacaccttcccacttcctgcagccggctagagaccaacatatgcacacccagattctttggacttcagctgagagcctccacagatggtcagcctctgcatgagaggtcagcgctgagttggtcagcaccctgcctctgcatgaagcagagaggcccca

SEQ ID NO: 552631 - DNA, 693 bp, Homo sapiens
cagatggtcttggcttggatctctagacagtgccctggtccaactctgttggtctctgtagtggggttagcttcttatctagggcctgatgggcatctgaaggtaagattttcacagcttcttatgaggacaccagtcctattgggtgagggccccactcttatggcctcattttttttttttcttttgagacagagtgtcattctgttacccaggctggagtgcagtggcaccatctcagctcactgcaaactccgcctcctgggttcaagtgattctcctgcctcagcctctcgagtagctgggattacaggggcctgccatcactcctggctaatttttatrtttttttggtagcgacggggttttgccatgttggccaggcaggtcttgaactcctgatctcaagtgatcctcctgcctcggcctcccaaagtggtgggattacaggcatgagccaccatgcccagcctcatttaaccttaatcccctccttccaaggccctgtctccaaatgtagttgcacgaggggttagggcttcaatatatgaattgggagggggctacaatgctgtctgtaataggtccccacagaataaaccagtctcttattagagaactcagtgttgagctacaaacacacagaatgttaccagggctgcaacccatccttgcacgatgcaatggagatgt

SEQ ID NO: 552632 - DNA, 687 bp, Homo sapiens
aagaagtggcttgtagggctgtagccaggaggatagatggtttctggtaagcagaggtgatacctcctctctctttctctctctttctttttttttttttttttttgagataggatctccctctgttgctcaggctagagtgcaatggtacaatcatagctcattgcagcctcgacctcctgagctcaagtgattctcccaaatatccctttgcttgctttgttcagcagggacacagccatgtgagcctctccatggcacctgagtcttccctttttggttctctgcatgtttaagctgtagttaggaagcccggggaacctgtaatcacctatggkaggtgatttcattctttaatctcctccacgctccccacttggaaacagcgcaatactttagggagctcatatcatcaggatgtttaggcagagtcctctggcttcaaacagaacggattgtcctgtgcacgcagccccgagccatggcagagggagcaagtgggaagcgccatctataaagaagcagaggatctcagagagtcccctcctctcagagccaagagggaggggagcgggatctgaaagccgctcaggcaagccaccaggaggaaatgctaacattgtttctagtcaagcttatgtgttttgctttgttgtgttttgttgtaggggaaatggttctttcaga

SEQ ID NO: 552633 - DNA, 687 bp, Homo sapiens
aagaagtggcttgtagggctgtagccaggaggatagatggtttctggtaagcagaggtgatacctcctctctctttctctctctttctttttttttttttttttttgagataggatctccctctgttgctcaggctagagtgcaatggtacaatcatagctcattgcagcctcgacctcctgagctcaagtgattctcccaaatatccctttgcttgctttgttcagcagggacacagccatgtgagcctctccatggcacctgagtcttccctttttggttctctgcatgtttaagctgtagttaggaagcccggggaacctgtaatcacctatgggaggtgatttcattctttaatctcctccacgctccccacttggaaacagcgcaatactttagggagctcatatcatcaggatgtttaggcagagtcctctggcttcaaacagaacggattgtcctgtgcacrcagccccgagccatggcagagggagcaagtgggaagcgccatctataaagaagcagaggatctcagagagtcccctcctctcagagccaagagggaggggagcgggatctgaaagccgctcaggcaagccaccaggaggaaatgctaacattgtttctagtcaagcttatgtgttttgctttgttgtgttttgttgtaggggaaatggttctttcaga

SEQ ID NO: 552634 - DNA, 1530 bp, Homo sapiens
cccatttttaaaaacaaggtgtcatgtatatacacatgtacacatacacatacttgtttatacacactctaaaatcttatgaataacttgaaatcaaactggttggtatagaatattattttatagtgctttgatactggtctttggaacataatcaatttctgtctttctaaatatgtgtttgaaagggaaagcctagcaagtctattaataagctcacttcccatttatcccagtgtacctggagcattaagctaagacgttcatccacaggcttaaaaacttacatcaagcactactgaactttacaagctggaataaacaatgcctactaaataaaagatttataaaattgttctgtcttatttttgtgatctcttgtaaatgttttttttttttttttttttaaatatccaaagaagacctgtgaactattatttgtcagaagcaattgcccttggtatctgattctgttgaaagaaatgcgttgatttgtccagacctttatcttaatgtagtttgtacctacttatttcacatcttctttctcttcttaatgatggtcttagctggtaccctggaaaccaggtaactgctggggaaaaacactgagtagatatatagacaacttgaatattctctgaaaatgggcatggaatctttattgttatatcaaattttctctaattatatctaatcctttaaatttattgtatctcttaagacattagataagccagtgaacatgagcttttttctttggcttaattatagtggacaactattaggaaggaactgtgaggttgcaaatagaatattttgaaagataaagtactctttatgtgttttggggtaatgtttttggagtggtttctcaggaaatcgtataaagactggatttgaagaatctaataattcctattttggggttgtaataagaactacatatgatatctaaaaatgacttaagtgtggaatggctggctctgaagggctcctcaacctctcagtctcaattagtgatatcaattacactgaaagtgttttcaacaactgaaagtgtcaatcaacactttcagtgtaattgacrtcactaactaatttcagtatattcagctgtatttttgttccagcttgattaatgaagcccgggggaccccaggagtattaagttagaagtaggatgtctcaatcctaaaggggaccaaatatcatggttcctattttctgtccttgtgtttgtagatatttgaaattctgtattatatgggaattagcctgaaagtggatttcatgatatcaagatggccaccttccttgaattccccaggtctgcttatacttatacttatgtaacttaagaagtggcatttaagttctcttgagaaaatacaagggtagtcttgaaaccacagcagtgcccagcctgccaaaggaaggcttttgtgaaacgcctttccagccacagcctttgaggcagacgtctaggtaagtgtcacatgagaacagatgtctggtaaatgctctcaa

SEQ ID NO: 552635 - DNA, 645 bp, Homo sapiens
gcctgtaatcccagcactttgggaggccgagagaggaagatctcttgagttcaggagttcaagaccagctggccaacagggtgaaaccttgtctctactaaaaatataaaaattagccagacttggtggtgtgtgcctgtaatcccagctacttgggaggctgaggcaggagaatcgcttggaagttgagtttgcagtgagtcgagatcacgctactgcactccagcctggacaatggagcaaaatctgtcaaaaaaaaagaaaagaaaaaaaaaagcaagtgggatctgaacactttgagttgtaaatccccctcgaggcaatggttacatagcaaacaaccatggtaccttagacatgggttcagggtaccttgrgggaggagggagttagacgcctctgatttaaagggtaataaaaggaataggtgagagaataaagtgttcttgtcctgctctttcccataccactgagtcaagtcccttttttcaaaaatcttagaatggggaacttcaaataggagaaatttatttcggtataatgaaaacatgaacatattaagtgaggtttatgaatacacactctacttggtattatggaatcaataaaatgaaaacaagagcttacaatttagagcagtagcca

SEQ ID NO: 552636 - DNA, 645 bp, Homo sapiens
gcctgtaatcccagcactttgggaggccgagagaggaagatctcttgagttcaggagttcaagaccagctggccaacagggtgaaaccttgtctctactaaaaatataaaaattagccagacttggtggtgtgtgcctgtaatcccagctacttgggaggctgaggcaggagaatcgcttggaagttgagtttgcagtgagtcgagatcacgctactgcactccagcctggacaatggagcaaaatctgtcaaaaaaaaagaaaagaaaaaaaaaagcaagtgggatctgaacactttgagttgtaaatccccctcgaggcaatggttacatagcaaacaaccatggtaccttagacatgggttcagggtaccttgagggaggagggagttagacgcctctgatttaaagggtaataaaaggaataggtgaragaataaagtgttcttgtcctgctctttcccataccactgagtcaagtcccttttttcaaaaatcttagaatggggaacttcaaataggagaaatttatttcggtataatgaaaacatgaacatattaagtgaggtttatgaatacacactctacttggtattatggaatcaataaaatgaaaacaagagcttacaatttagagcagtagcca

SEQ ID NO: 552637 - DNA, 645 bp, Homo sapiens
gcctgtaatcccagcactttgggaggccgagagaggaagatctcttgagttcaggagttcaagaccagctggccaacagggtgaaaccttgtctctactaaaaatataaaaattagccagacttggtggtgtgtgcctgtaatcccagctacttgggaggctgaggcaggagaatcgcttggaagttgagtttgcagtgagtcgagatcacgctactgcactccagcctggacaatggagcaaaatctgtcaaaaaaaaagaaaagaaaaaaaaaagcaagtgggatctgaacactttgagttgtaaatccccctcgaggcaatggttacatagcaaacaaccatggtaccttagacatgggttcagggtaccttgagggaggagggagttagacgcctctgatttaaagggtaataaaaggaataggtgagagaataaagtgttcttgtcctgctctttcccataccactgagtcaagtcccttttttcaaaaatcttagaatggggaacttcaaataggagaaatttatttcggtataatgaaaacatgaacatattaagtgaggtttatgaatacacactctacttggtattatggaatcaataaaatgaaaacaagagcttasaatttagagcagtagcca

SEQ ID NO: 552638 - DNA, 1227 bp, Homo sapiens
tcccacctccaactcccaaaatgccaagattacagatgagtgccaccacatctggcctagaaaagggttttgattgcataatccattcactacttttcattgaaattactggacccttaaactgtgaaatcatatctcttttaagaaagtgataacttttttacatgtatattacaaaaaaaaaattagggatcaaaaatgttgcaattgttattttaaagtaggtgattgccttttgaatcttttatttttgcaaaattttctcttcttgatgttgtaggtgcctatggtgcacagagcacaaagcattgagtaacactgagtagtataatgtagaccatacaatataaagaaggagaaatgaaaagaaataactaagggaaaacaatagtagcagctaatgaactaactgtggtttataagacagataattttgggaaggaatggtaatatggtattggaggaataaaagagttacccaagaaagcacaaatctctctacttaataaccagaatagtgttcactagactacaaattatatttcttgggggaaaatgataacctatctcccattaaacattgataaattagcctaagtttaaaaatgataaagctaagttacttttatattctgtttcaggaaattaaataggaaaatcattttctcacgaatgagaactattctttccttccaagtttatttgtattgtcattggataactctgaataaattaaaacaaaaatagcaaaaataatatggaaataatactggactttgagactaaagattttggttcccttgctggatctctgcctagtattgtgtgattttcatcttatgacttaacttcgtcagcttcagtttctcctactataacaaatgggggaaaaaaaataatgtaaaagatgttaaaagatagagccaactgatacctttgtattcccagcacataacagaatgccagaaacataaacaatgtttaataagtacattaaaaataaatttataaaatgggcataaaatcactttgcagcattggtataaagatcaaatgaaagcaatcagatgcaatgatttttaaatctggaacattttatatgtaaataaacatataaacatataaaatatttcaatgttatctcatgactaacaaaatgtattttatattgcataaagttttgtaaacagccttaatktatttttaaatatattctcagtatgtata

SEQ ID NO: 552639 - DNA, 616 bp, Homo sapiens
gtttaaaagagttcagcaccagcaaattacacttagctatttagagagttattgcttttaagtcttctctatacagcaggcctggtaatggtagcagcaattgagtcttgtgcacccaaaatgtaaacctaagttaataaggcaatggcacacatcccacttctctataaacagtctggagatttactcttcagtttaggtacatttctttgaacatttagagtaaatttcaaactgtgttgacactgaccacactacagactttcaattcataagcatgttggtaaataagatgtgcttcacttgcaaatgatcgaatgctggctgagctaaatttaaaaacccaaatcaaaaacaaaccaacaaaaactcccaccatgccgctgattgaaygtgttaaagtctgcagaaataaatccacaactgagttttcttaggaaatagaatacttcttcagctactgagagaatatgaataagggtttgaaataagaggaaatgtggtatatcaatcagccataacttccacaatttggatagtattttagaattattttaaaatctttaatctcatttgattcttgccaacatcctgagatgaattttattattttaca

SEQ ID NO: 552640 - DNA, 1346 bp, Homo sapiens
atttcttatgttaatttggaaatagttgaattgatgtcttctgagagatatataactttccaaaattcaaaatttttgtttttatcattacttagatgaaaatatataatttacagataagtggtcagatattttgtagaatttttcattaaaaacttctaaattgttccttttatttttatttgtattgagaccaggtctcaactctgttgcgcaggctttagtgcagtggcatgatcatggctcaccgaagcctcaacttctgggactcaagcctttctcctgcttcagcctcctgagtagctggaactacaagtgtgtcaagccatgccaggctaacttttttttaagagatgtggatttactatgttacccaaacttgtctcaaattcctgggctcaggcaatcctcccacttcagcctctcaaggggctggattacaacatgagccaccatgtcttgccaaatgtccccttttatatatacataccaattcaatatagtttttgaatttgtgaatgaatttgtactactcttattgcaaattgtattgtgatctttgaatttgcatgtcatcataaaggttttgtagtatttgtaaaatgtctttccactgacactagcattatttggcagtattgtttttgcattcttcaaattaataataatgcttaattacctgtaaacaaatttttctttattgtcttagataattgtgaactagtgttctgctctaaagctacttctttgatgcactatctgcatagacatagatacctcataccatctgtagccagtttccccaatatatttattttatgtctatcactaaatgctaagttttgattatcataatttttgctgatcaaagataatatatgttttctcaaatctccatttctgtgcatgtccggtagctggcagcctgttgcttctctatagtttttataattttagtgtaatttggtgactratgtccattttcaaagatacacattactcagtaaaatatttgatgagatgtgaagtatttgccaatgcctgataatttaggaaagtgcaaacattgttgcactaggtattctttcaaagatgactactgtgaagtttgaggtggaatggagatgtgtaatcactgtcagtggtgtcatttttttatataatgaaagatatagtgaagatgttatgaagtatcataattagaaaattctttctggctctattgacaagccatcttttaaaatgggagcaacagtcctcctggaaattgagatgtttaaactctaattattttagggaaataaggaagctagtaggaagccagtagagaattcagaaaagggtga

SEQ ID NO: 552641 - DNA, 1346 bp, Homo sapiens
atttcttatgttaatttggaaatagttgaattgatgtcttctgagagatatataactttccaaaattcaaaatttttgtttttatcattacttagatgaaaatatataatttacagataagtggtcagatattttgtagaatttttcattaaaaacttctaaattgttccttttatttttatttgtattgagaccaggtctcaactctgttgcgcaggctttagtgcagtggcatgatcatggctcaccgaagcctcaacttctgggactcaagcctttctcctgcttcagcctcctgagtagctggaactacaagtgtgtcaagccatgccaggctaacttttttttaagagatgtggatttactatgttacccaaacttgtctcaaattcctgggctcaggcaatcctcccacttcagcctctcaaggggctggattacaacatgagccaccatgtcttgccaaatgtccccttttatatatacataccaattcaatatagtttttgaatttgtgaatgaatttgtactactcttattgcaaattgtattgtgatctttgaatttgcatgtcatcataaaggttttgtagtatttgtaaaatgtctttccactgacactagcattatttggcagtattgtttttgcattcttcaaattaataataatgcttaattacctgtaaacaaatttttctttattgtcttagataattgtgaactagtgttctgctctaaagctacttctttgatgcactatctgcatagacatagatacctcataccatctgtagccagtttccccaatatatttattttatgtctatcactaaatgctaagttttgattatcataatttttgctgatcaaagataatatatgttttctcaaatctccatttctgtgcatgtccggtagctggcagcctgttgcttctctatagtttttataattttagtgtaatttggtgactgatgtccattttcaaagatacacattactcagtaaaatatttgatgagatgtgaagtatttgccaatgcctgataatttaggaaagtgcaaacattgttgcactaggtattctttcaaagatgactactgtgaagtttraggtggaatggagatgtgtaatcactgtcagtggtgtcatttttttatataatgaaagatatagtgaagatgttatgaagtatcataattagaaaattctttctggctctattgacaagccatcttttaaaatgggagcaacagtcctcctggaaattgagatgtttaaactctaattattttagggaaataaggaagctagtaggaagccagtagagaattcagaaaagggtga

SEQ ID NO: 552642 - DNA, 345 bp, Homo sapiens
tctagaaatgaagaataattaaaataaaaaaactcaaagaatgggttaatcagcagatagagacagagagacaattagaaactggaagatagctataaagaaattggctgggcacagtggctcatgcctgtaatcccagcacttcgggaggccgaggcaggcggattacttgaggtcagaagtttgagaccagcctgmccatcatggtgaaactccatctctactaaaaatacaaaaattagctgggcgtgctggtgggcgcctgtagtcccagaataaagatcctatcaataagccctgggatatatgacaacttgatttatgatggagagggcactacagatc

SEQ ID NO: 552643 - DNA, 620 bp, Homo sapiens
cctggccttcaatataagttttgaaatataaatgagatgtattttctgtcctgactaaaatccttcagtgtcttctcattataattataattaaacccaaactcttgaccatgacctgcaagaccctccatgatctggcccctggcctcactctagttttgtaccattcttacctgcatttgtggatctttcctccaataagttcattcctgcatcagggcctttgtttttttggcttcctctgcctaagagtttttcacctagtattttgcatggctggcttcttctcatgcgtgaaatctcagatcaagcatcaccttcccagactgtcacctaatatagctacagaccaactcctcagttactctctcttatataatcctattstgttgtcttcatggcactttgactatcaaaattatctttttaatattgcccatgtccttccactagaatgttaaacttcttgtatctacaaagtttagaatgagcctgtcattcaaaaatattaattatgaatgaacaaagaatgagtgaatgaatggagtctctgtgtccccttagcccacacacagggctccacataggagcctgaaactttagaaaggacacaatgaagc

SEQ ID NO: 552644 - DNA, 620 bp, Homo sapiens
cctggccttcaatataagttttgaaatataaatgagatgtattttctgtcctgactaaaatccttcagtgtcttctcattataattataattaaacccaaactcttgaccatgacctgcaagaccctccatgatctggcccctggcctcactctagttttgtaccattcttacctgcatttgtggatctttcctccaataagttcattcctgcatcagggcctttgtttttttggcttcctctgcctaagagtttttcacctagtattttgcatggctggcttcttctcatgcgtgaaatctcagatcaagcatcaccttcccagactgtcacctaatatagctacagaccaactcctcagttactctctcttatataatcctattctgttgtcttcatggcactttgactatcaaaattatctttttaatattgcccatgtccttccactagaatgttaaacttcttrtatctacaaagtttagaatgagcctgtcattcaaaaatattaattatgaatgaacaaagaatgagtgaatgaatggagtctctgtgtccccttagcccacacacagggctccacataggagcctgaaactttagaaaggacacaatgaagc

SEQ ID NO: 552645 - DNA, 1215 bp, Homo sapiens
ttgacaatactgtattgtacacttaaaaatttgttaagagcatagataccatgttaaatattctttccaaaataaaataaaataagtaaaggatgaataatatatagaaagtaatactaatgaactagaattgccagatagaattcatatataaaataaactacttcccacaggtaaaagtcacattaagaagaaatggtcataagtagtgctttgtgagatatgcaaacacacaagaaatttttttaaaatgaaattcattttttaagttagtgtcaaatgtgtaaaaatgtaacaattttgaactatttaaaaaaaacactattaatattgcatgtacctattataagattttctaaaaggccaatctggggttattgctaaaaaaaagactgcttgctctttctgggtaacatacttcgaattttgagaaaattaaaatactctgttttccatcaataaagctaaacatattttacttatacaataaaatatgacaaatatgttaaattagtgtttcttaaaacctgattatccacaaagacaaattttgagactaatccccatgatgccagaggctattgatcagactggatgtttggctgttctgatgtttatctttttatctgtcttgaaagaaaatgtcaagtattcaccacaaagcttacaaggacctaattagagctataaaatcaaaataaaagagtatagcattgggagaggcatagtttgatgggcttattcttcaattaaaatcacatacctaccacttgcttaaaaaaaaaaatcaaactcgttaacaagatactcagctaaaatccctcccaatctatctttagcctgtccccagactcatcttctctcattccagttacagcagaatactgacactgcctagtctccatawccctggttacatttttagtctttcaggaatgccctaacctacttattttaaaattgtcctctaaccaggttcatttcaaattaattctcttattattccagtcagatttaacctgtgtgattctatgtatacacctgaattctaagttatacaattcacttacctacctatttgacaatacatactgagtgctaacatgtgctaggcactgttctaaggctgaggctacaatggtaaagatttgacatgtaacttaatgcttgtactcatcatagtctaacctgtattttacttagctgtttaaatgc

SEQ ID NO: 552646 - DNA, 2387 bp, Homo sapiens
agattttaggcctgccttgctttttagaaacatcttcaatgatcatctagaattctctccgaaaaatccagaagccacctgtctcagaaatggcagctgaagctggagaagagctgtctaagatgtggcaagtaaatcaatcaataaatcaatcacataacttttgtttttataagccattgagattttgaagtataattattacagaggcctatcttgggctattccaatataggcagaaaggcaaataatatttaacagccttctctgacacgattagtgtgtggcaattaattcacagccaaaatgacataattgaatgttgttcaacaaatgttgcttcaagaaagcaaatgtgattgccagaacatattcttctggatgccaaactatttaytaatgctactatataatggaaaaggatttcttacttgctaaagaacttctataagttttagaaaattcatatggagatcattacttatgttttcaagtgcatatttataatatcatgaaaatattctggtgtgtcaataatgagacaacagggttttcattttgataatttttgttaattgaatacatgactgaaattggaggacctacccacaagactctggcttcattatatctaaaataataacaaaataatagtcacaactccaacttattaagctgcacacatgtaaaatgctttacttatgttcacttatttggttatcactgtaactttacaaggtacttactatgattaaccccattatacagcctaggaacgtggcttttattatataaatagtaagtaaaagagcccaattagagagctgcactttttttttttttctgtttttgagatggagtcttcctctgtcgcccaggctgcagtgcagtggcacgatctcggctcactgcaacctccgcctcccaggttcaagcgattctcctgactcagcctcccaagtagctaggaccaccggcatgcactaccacatccaactaatttttgtatttttagtagagacagtgtttcaccatattgtccaggctggtctcaaactcctgacctcaggtgattcacccaccttgcctcccaaagtgctgggattgcaggcgtgagccaccatgaccggccagagctgcactcttgacacagctgttcttcagaccgagagtgtgttgaatctaattctaagcctatagctcagcagaagttttgggtatctctgcacaaaccttcactataaaaatgccccatttgtcatgtttatgatttcatgtgctcagttatgagatacagcctccaattactcatcttcagtaaattaactagaattaatcttttgccaaataaacttatcattcctctatggattctggattatttttcatttataatatagggcagtttttcaaccagttccgattatgtgatctatccaaagtgatctcagagagattagatctggagctggctcgctagcttggctgtttaaagcagaattccaaagagccaaacaataagagatcaatgtcttcagtctgtgcagagtccaagaatgcacccctaaactcagagaaatttcctagtttacaaaaatgtgagacaggcaatagcaattaagaaaaattgtggggagcataggtatagaggtaaaatatatgaataagaaatttcatgtctcttctacagtgaaaaactggccataattctatgttattttctattgttttattttcacatttaaataaattaataatataattaattcatgtttttgtaaaaatcaaatatataaaagtagagaacttacataatgaaaaattctgattataatcccactaccagaaataggtagccattgctaacattgttgatatgcaacacatatattacattattgatataattttatactgtttatgtattattgcatattgctcttagtggttttaacttaaaaagtttttttcctagtaaaaggtttattatgagcacctaccaaagcagtatatatacatttattttatcctttctaaaaacagtttgtaattcattatattgacacatcataatttattaaacatatttactatttgctcctatgttttttctatcacaaaaaaaatgtttcagtgaatagatttttatatttatctttgggatcttataatatctgaggaatgactccttggaagtggaacttcttggcaaaagagaatataccttttacatcttgacatatactgccaaagcagaccacaattttagattcagccaaattaattttagtggtgtctcatgccagtgattctgccttcactgtgctagtgtaggcagccagctgtggattgaagagtttgctgagtcaattggtataaatttggat

SEQ ID NO: 552647 - DNA, 2387 bp, Homo sapiens
agattttaggcctgccttgctttttagaaacatcttcaatgatcatctagaattctctccgaaaaatccagaagccacctgtctcagaaatggcagctgaagctggagaagagctgtctaagatgtggcaagtaaatcaatcaataaatcaatcacataacttttgtttttataagccattgagattttgaagtataattattacagaggcctatcttgggctattccaatataggcagaaaggcaaataatatttaacagccttctctgacacgattagtgtgtggcaattaattcacagccaaaatgacataattgaatgttgttcaacaaatgttgcttcaagaaagcaaatgtgattgccagaacatattcttctggatgccaaactatttattaatgctactatataatggaaaaggatttcttacttgctaaagaacttctataagttttagaaaattcatatggagatcattacttatgttttcaagtgcatatttataatatcatgaaaatattctggtgtgtcaataatgagacaacagggttttcattttgataatttttgttaattgaatacatgactgaaattggaggacctacccacaagactctggcttcattatatctaaaataataacaaaataatagtcacaactccaacttattaagctgcacacatgtaaaatgctttacttatgttcacttatttggttatcactgtaactttacaaggtacttactatgattaaccccattatacagcctaggaacgtggcttttattatataaatagtaagtaaaagagcccaattagagagctgcactttttttttttttctgtttttgagatggagtcttcctctgtcgcccaggctgcagtgcagtggcacgatctcggctcactgcaacctccgcctcccaggttcaagcgattctcctgactcagcctcccaagtagctaggaccaccggcatgcactaccacatccaactaatttttgtatttttagtagagacagtgtttcaccatattgtccaggctggtctcaaactcctgacctcaggtgattcacccaccttgcctcccaaagtgctgggattgcaggcgtgagccaccatgaccggccagagctgcactcttgacacagctgttcttcagaccgagagtgtgttgaatctaattctaagcctatagctcagcagaagttttgggtatctctgcacaaaccttcactataaaaatgccccatttgtcatgtttatgatttcatgtgctcagttatgagatacagcctccaattactcatcttcagtaaattaactagaattaatcttttgccaaataaacttatcattcctctatggattctggattatttttcatttataatatagggcagtttttcaaccagttccgattatgtgatctatccaaagtgatctcagagagattagatctggagctggctcgctagcttggctgtttaaagcagaattccaaagagccaaacaataagagatcaatstcttcagtctgtgcagagtccaagaatgcacccctaaactcagagaaatttcctagtttacaaaaatgtgagacaggcaatagcaattaagaaaaattgtggggagcataggtatagaggtaaaatatatgaataagaaatttcatgtctcttctacagtgaaaaactggccataattctatgttattttctattgttttattttcacatttaaataaattaataatataattaattcatgtttttgtaaaaatcaaatatataaaagtagagaacttacataatgaaaaattctgattataatcccactaccagaaataggtagccattgctaacattgttgatatgcaacacatatattacattattgatataattttatactgtttatgtattattgcatattgctcttagtggttttaacttaaaaagtttttttcctagtaaaaggtttattatgagcacctaccaaagcagtatatatacatttattttatcctttctaaaaacagtttgtaattcattatattgacacatcataatttattaaacatatttactatttgctcctatgttttttctatcacaaaaaaaatgtttcagtgaatagatttttatatttatctttgggatcttataatatctgaggaatgactccttggaagtggaacttcttggcaaaagagaatataccttttacatcttgacatatactgccaaagcagaccacaattttagattcagccaaattaattttagtggtgtctcatgccagtgattctgccttcactgtgctagtgtaggcagccagctgtggattgaagagtttgctgagtcaattggtataaatttggat

SEQ ID NO: 552648 - DNA, 2387 bp, Homo sapiens
agattttaggcctgccttgctttttagaaacatcttcaatgatcatctagaattctctccgaaaaatccagaagccacctgtctcagaaatggcagctgaagctggagaagagctgtctaagatgtggcaagtaaatcaatcaataaatcaatcacataacttttgtttttataagccattgagattttgaagtataattattacagaggcctatcttgggctattccaatataggcagaaaggcaaataatatttaacagccttctctgacacgattagtgtgtggcaattaattcacagccaaaatgacataattgaatgttgttcaacaaatgttgcttcaagaaagcaaatgtgattgccagaacatattcttctggatgccaaactatttattaatgctactatataatggaaaaggatttcttacttgctaaagaacttctataagttttagaaaattcatatggagatcattacttatgttttcaagtgcatatttataatatcatgaaaatattctggtgtgtcaataatgagacaacagggttttcattttgataatttttgttaattgaatacatgactgaaattggaggacctacccacaagactctggcttcattatatctaaaataataacaaaataatagtcacaactccaacttattaagctgcacacatgtaaaatgctttacttatgttcacttatttggttatcactgtaactttacaaggtacttactatgattaaccccattatacagcctaggaacgtggcttttattatataaatagtaagtaaaagagcccaattagagagctgcactttttttttttttctgtttttgagatggagtcttcctctgtcgcccaggctgcagtgcagtggcacgatctcggctcactgcaacctccgcctcccaggttcaagcgattctcctgactcagcctcccaagtagctaggaccaccggcatgcactaccacatccaactaatttttgtatttttagtagagacagtgtttcaccatattgtccaggctggtctcaaactcctgacctcaggtgattcacccaccttgcctcccaaagtgctgggattgcaggcgtgagccaccatgaccggccagagctgcactcttgacacagctgttcttcagaccgagagtgtgttgaatctaattctaagcctatagctcagcagaagttttgggtatctctgcacaaaccttcactataaaaatgccccatttgtcatgtttatgatttcatgtgctcagttatgagatacagcctccaattactcatcttcagtaaattaactagaattaatcttttgccaaataaacttatcattcctctatggattctggattatttttcatttataatatagggcagtttttcaaccagttccgattatgtgatctatccaaagtgatctcagagagattagatctggagctggctcgctagcttggctgtttaaagcagaattccaaagagccaaacaataagagatcaatgtcttcagtctgtgcagagtccaagaatgcacccctaaactcagagaaatttcctagtttacaaaaatgtgagacaggcaatagcaattaagaaaaattgtggggagcataggtatagaggtaaaatatatgaataagaaatttcaygtctcttctacagtgaaaaactggccataattctatgttattttctattgttttattttcacatttaaataaattaataatataattaattcatgtttttgtaaaaatcaaatatataaaagtagagaacttacataatgaaaaattctgattataatcccactaccagaaataggtagccattgctaacattgttgatatgcaacacatatattacattattgatataattttatactgtttatgtattattgcatattgctcttagtggttttaacttaaaaagtttttttcctagtaaaaggtttattatgagcacctaccaaagcagtatatatacatttattttatcctttctaaaaacagtttgtaattcattatattgacacatcataatttattaaacatatttactatttgctcctatgttttttctatcacaaaaaaaatgtttcagtgaatagatttttatatttatctttgggatcttataatatctgaggaatgactccttggaagtggaacttcttggcaaaagagaatataccttttacatcttgacatatactgccaaagcagaccacaattttagattcagccaaattaattttagtggtgtctcatgccagtgattctgccttcactgtgctagtgtaggcagccagctgtggattgaagagtttgctgagtcaattggtataaatttggat

SEQ ID NO: 552649 - DNA, 2387 bp, Homo sapiens
agattttaggcctgccttgctttttagaaacatcttcaatgatcatctagaattctctccgaaaaatccagaagccacctgtctcagaaatggcagctgaagctggagaagagctgtctaagatgtggcaagtaaatcaatcaataaatcaatcacataacttttgtttttataagccattgagattttgaagtataattattacagaggcctatcttgggctattccaatataggcagaaaggcaaataatatttaacagccttctctgacacgattagtgtgtggcaattaattcacagccaaaatgacataattgaatgttgttcaacaaatgttgcttcaagaaagcaaatgtgattgccagaacatattcttctggatgccaaactatttattaatgctactatataatggaaaaggatttcttacttgctaaagaacttctataagttttagaaaattcatatggagatcattacttatgttttcaagtgcatatttataatatcatgaaaatattctggtgtgtcaataatgagacaacagggttttcattttgataatttttgttaattgaatacatgactgaaattggaggacctacccacaagactctggcttcattatatctaaaataataacaaaataatagtcacaactccaacttattaagctgcacacatgtaaaatgctttacttatgttcacttatttggttatcactgtaactttacaaggtacttactatgattaaccccattatacagcctaggaacgtggcttttattatataaatagtaagtaaaagagcccaattagagagctgcactttttttttttttctgtttttgagatggagtcttcctctgtcgcccaggctgcagtgcagtggcacgatctcggctcactgcaacctccgcctcccaggttcaagcgattctcctgactcagcctcccaagtagctaggaccaccggcatgcactaccacatccaactaatttttgtatttttagtagagacagtgtttcaccatattgtccaggctggtctcaaactcctgacctcaggtgattcacccaccttgcctcccaaagtgctgggattgcaggcgtgagccaccatgaccggccagagctgcactcttgacacagctgttcttcagaccgagagtgtgttgaatctaattctaagcctatagctcagcagaagttttgggtatctctgcacaaaccttcactataaaaatgccccatttgtcatgtttatgatttcatgtgctcagttatgagatacagcctccaattactcatcttcagtaaattaactagaattaatcttttgccaaataaacttatcattcctctatggattctggattatttttcatttataatatagggcagtttttcaaccagttccgattatgtgatctatccaaagtgatctcagagagattagatctggagctggctcgctagcttggctgtttaaagcagaattccaaagagccaaacaataagagatcaatgtcttcagtctgtgcagagtccaagaatgcacccctaaactcagagaaatttcctagtttacaaaaatgtgagacaggcaatagcaattaagaaaaattgtggggagcataggtatagaggtaaaatatatgaataagaaatttcatgtctcttctacartgaaaaactggccataattctatgttattttctattgttttattttcacatttaaataaattaataatataattaattcatgtttttgtaaaaatcaaatatataaaagtagagaacttacataatgaaaaattctgattataatcccactaccagaaataggtagccattgctaacattgttgatatgcaacacatatattacattattgatataattttatactgtttatgtattattgcatattgctcttagtggttttaacttaaaaagtttttttcctagtaaaaggtttattatgagcacctaccaaagcagtatatatacatttattttatcctttctaaaaacagtttgtaattcattatattgacacatcataatttattaaacatatttactatttgctcctatgttttttctatcacaaaaaaaatgtttcagtgaatagatttttatatttatctttgggatcttataatatctgaggaatgactccttggaagtggaacttcttggcaaaagagaatataccttttacatcttgacatatactgccaaagcagaccacaattttagattcagccaaattaattttagtggtgtctcatgccagtgattctgccttcactgtgctagtgtaggcagccagctgtggattgaagagtttgctgagtcaattggtataaatttggat

SEQ ID NO: 552650 - DNA, 2387 bp, Homo sapiens
agattttaggcctgccttgctttttagaaacatcttcaatgatcatctagaattctctccgaaaaatccagaagccacctgtctcagaaatggcagctgaagctggagaagagctgtctaagatgtggcaagtaaatcaatcaataaatcaatcacataacttttgtttttataagccattgagattttgaagtataattattacagaggcctatcttgggctattccaatataggcagaaaggcaaataatatttaacagccttctctgacacgattagtgtgtggcaattaattcacagccaaaatgacataattgaatgttgttcaacaaatgttgcttcaagaaagcaaatgtgattgccagaacatattcttctggatgccaaactatttattaatgctactatataatggaaaaggatttcttacttgctaaagaacttctataagttttagaaaattcatatggagatcattacttatgttttcaagtgcatatttataatatcatgaaaatattctggtgtgtcaataatgagacaacagggttttcattttgataatttttgttaattgaatacatgactgaaattggaggacctacccacaagactctggcttcattatatctaaaataataacaaaataatagtcacaactccaacttattaagctgcacacatgtaaaatgctttacttatgttcacttatttggttatcactgtaactttacaaggtacttactatgattaaccccattatacagcctaggaacgtggcttttattatataaatagtaagtaaaagagcccaattagagagctgcactttttttttttttctgtttttgagatggagtcttcctctgtcgcccaggctgcagtgcagtggcacgatctcggctcactgcaacctccgcctcccaggttcaagcgattctcctgactcagcctcccaagtagctaggaccaccggcatgcactaccacatccaactaatttttgtatttttagtagagacagtgtttcaccatattgtccaggctggtctcaaactcctgacctcaggtgattcacccaccttgcctcccaaagtgctgggattgcaggcgtgagccaccatgaccggccagagctgcactcttgacacagctgttcttcagaccgagagtgtgttgaatctaattctaagcctatagctcagcagaagttttgggtatctctgcacaaaccttcactataaaaatgccccatttgtcatgtttatgatttcatgtgctcagttatgagatacagcctccaattactcatcttcagtaaattaactagaattaatcttttgccaaataaacttatcattcctctatggattctggattatttttcatttataatatagggcagtttttcaaccagttccgattatgtgatctatccaaagtgatctcagagagattagatctggagctggctcgctagcttggctgtttaaagcagaattccaaagagccaaacaataagagatcaatgtcttcagtctgtgcagagtccaagaatgcacccctaaactcagagaaatttcctagtttacaaaaatgtgagacaggcaatagcaattaagaaaaattgtggggagcataggtatagaggtaaaatatatgaataagaaatttcatgtctcttctacagtgaaaaactggccataattctatgttattttctattgttttattttcacatttaaataaattaataatataattaattcrtgtttttgtaaaaatcaaatatataaaagtagagaacttacataatgaaaaattctgattataatcccactaccagaaataggtagccattgctaacattgttgatatgcaacacatatattacattattgatataattttatactgtttatgtattattgcatattgctcttagtggttttaacttaaaaagtttttttcctagtaaaaggtttattatgagcacctaccaaagcagtatatatacatttattttatcctttctaaaaacagtttgtaattcattatattgacacatcataatttattaaacatatttactatttgctcctatgttttttctatcacaaaaaaaatgtttcagtgaatagatttttatatttatctttgggatcttataatatctgaggaatgactccttggaagtggaacttcttggcaaaagagaatataccttttacatcttgacatatactgccaaagcagaccacaattttagattcagccaaattaattttagtggtgtctcatgccagtgattctgccttcactgtgctagtgtaggcagccagctgtggattgaagagtttgctgagtcaattggtataaatttggat

SEQ ID NO: 552651 - DNA, 499 bp, Homo sapiens
agctggtgtgtgtaggccctgtggatggatagcactgtaatgacttatcctgtaaaaccctattttttctgccgggcatcttcatgcattgtttttcattttttatctttattttttacttataaaaaaagatttttgaggccaggtgtgatggctcaagcctgtaatcccagcactttgggaggctgaggtgggtgggtcacctgaggtcaggagttcaagaccagcctggccaacatagtgaaaccctgtctccactaaaaaaaaaaaatacaaaaattagytgggcgtggtaaaacttgcctgtagtcccagctacttggaggctgaggcaggagaatcacttgaacctggaaagcgtaggctgcagtgagctgagatcgtgccactgcactccagcctgggagacagagtgagactcagtctaaaaacaaaaaacataaaaaacaaaaaaatttgagatagggtctctctctgtcccccaggctggaatacagtg

SEQ ID NO: 552652 - DNA, 499 bp, Homo sapiens
agctggtgtgtgtaggccctgtggatggatagcactgtaatgacttatcctgtaaaaccctattttttctgccgggcatcttcatgcattgtttttcattttttatctttattttttacttataaaaaaagatttttgaggccaggtgtgatggctcaagcctgtaatcccagcactttgggaggctgaggtgggtgggtcacctgaggtcaggagttcaagaccagcctggccaacatagtgaaaccctgtctccactaaaaaaaaaaaatacaaaaattagctgggcgtggtaaaacttgcctgtagtcccagctacttggaggctgaggcaggagaatcacttgaacctggaaagcrtaggctgcagtgagctgagatcgtgccactgcactccagcctgggagacagagtgagactcagtctaaaaacaaaaaacataaaaaacaaaaaaatttgagatagggtctctctctgtcccccaggctggaatacagtg

SEQ ID NO: 552653 - DNA, 1392 bp, Homo sapiens
ggtgacattctccccttttccttgttctcccttttcaccctggcctccttcagcctcattcttcctccttctccattgctcctgtagacccaaaccaacaacagcaggacctcttattaacctctgttaatacctcaatttagcaaatgtaatgagtactgtgggtaagagggaaggaaatgagccctttgacattcactctctttgaaactgtcatcccacagggaaagaaacaggccaagagtggccagagtatgtaagagaatgggatgactgtgggcagaatcacaggagagacacagaatgtggcggtagagacggtcagagcgaaaaaacaggcacagagcaaggacacaaggcaatatccagaggcagaaaggaggctggagggcactgacaacacagaggaaccaaaacccagacaattcccttcaggggccccagagagaaagtgaacccctaggaaccccctgcaaagggtgggtatgaggggggtcgggttaagcggcttaacaaagaggtgtgcccgagaaatgcaattagttcatcaaaagtaagtaacgagttactcatttaaacaagtgataactcaaggtaaaaagaaaacaaatgctgggattctgaatacaatcctagaaaaggcaaaaccaaaaatgcacaaaacaggtacatggtgttgaagaaatcatgtttcatgatgaaaaactccatcaaataatgtaatgttttttcactggaggcaaattccttcccagttttcatccccatacatgtggatttgatatatttatttagatttttcttcttaatgctcttgttggaaaaactccatccttttgttatttccttctcccctaataattgctttctgcaattgtttatttcattatttacttggtcctgctgatgtttaaacatggasttgggagagacactgacaagctgagggaagttcagaggagagcacaggattgaagggtcagggttagaaacagtctcaggtggaagaaccaggtacaccagcctggagaaaaccctcataagaacgtggttcatgcattcaaacatctaaaagaatttctagggacaagggatgagacttaactttgagatttttcaaagaacataacttggacacgttaatgaagtcacaaagatgtgtttttgacctctatggtcaaaaatgtctaattgtcaaatggatgggttgccctggaagtccaactgcttcttacattactggaagtgttttagcagaaattaagtgatatcttattaatggtaatgtagaaaacttaagcattaagaagagggttcttcaagacgtaacctctaatgtcccttacaattctgaaaatccatgggttttttaatactctaaataaccacaaa

SEQ ID NO: 552654 - DNA, 1392 bp, Homo sapiens
ggtgacattctccccttttccttgttctcccttttcaccctggcctccttcagcctcattcttcctccttctccattgctcctgtagacccaaaccaacaacagcaggacctcttattaacctctgttaatacctcaatttagcaaatgtaatgagtactgtgggtaagagggaaggaaatgagccctttgacattcactctctttgaaactgtcatcccacagggaaagaaacaggccaagagtggccagagtatgtaagagaatgggatgactgtgggcagaatcacaggagagacacagaatgtggcggtagagacggtcagagcgaaaaaacaggcacagagcaaggacacaaggcaatatccagaggcagaaaggaggctggagggcactgacaacacagaggaaccaaaacccagacaattcccttcaggggccccagagagaaagtgaacccctaggaaccccctgcaaagggtgggtatgaggggggtcgggttaagcggcttaacaaagaggtgtgcccgagaaatgcaattagttcatcaaaagtaagtaacgagttactcatttaaacaagtgataactcaaggtaaaaagaaaacaaatgctgggattctgaatacaatcctagaaaaggcaaaaccaaaaatgcacaaaacaggtacatggtgttgaagaaatcatgtttcatgatgaaaaactccatcaaataatgtaatgttttttcactggaggcaaattccttcccagttttcatccccatacatgtggatttgatatatttatttagatttttcttcttaatgctcttgttggaaaaactccatccttttgttatttccttctcccctaataattgctttctgcaattgtttatttcattatttacttggtcctgctgatgtttaaacatggacttgggagagacactgacaagctgagggaagttcagaggagagcacaggattgaagggtcagggttagaaacagtctcaggtggaagaaccaggtacaccagcctggagaaaaccctcataagaacgtggttcatgcattcaaacatctaaaagaatttctagggayaagggatgagacttaactttgagatttttcaaagaacataacttggacacgttaatgaagtcacaaagatgtgtttttgacctctatggtcaaaaatgtctaattgtcaaatggatgggttgccctggaagtccaactgcttcttacattactggaagtgttttagcagaaattaagtgatatcttattaatggtaatgtagaaaacttaagcattaagaagagggttcttcaagacgtaacctctaatgtcccttacaattctgaaaatccatgggttttttaatactctaaataaccacaaa

SEQ ID NO: 552655 - DNA, 659 bp, Homo sapiens
atcgatctatcatcttagtaacatagatactaaaatgtgtagaaagtcacatgatgattgtattagtcacatggtgactgtgtcagagaaacggaactaatacaatatatatagggtagaragaatcacaagtgccaggacccgggggtgggacattctcagagtaactcagggtaggaaaggtccatgaggcaggataatccaaggtaacatggtgagacatgagacaagacaggtcttggagctgcagcttctgaggcctggatgtcctgggtcaggactcagatttcactccaggcttgtggagagcctctggaggattggtcaagacaatgatcatctgactcaggttgtaacagcagcatcctggctgctgtgagaagagagtgtagaggccctgaaagaaagcaaggaggcctaggagcctattctagtaattcaggagggaaacagtgggggctgagtccagggtgctggcagtggaggtggtgagaaggggttggattctgggtttgttctgaaagtggaactgacaggggttcccggcagattggccgtgggtgcaagaggaggagaggtatgagaatgactcagggtttgggccagagcccgggggacggcaatgccatttgctgagttggagcaccagggaaagggag

SEQ ID NO: 552656 - DNA, 659 bp, Homo sapiens
atcgatctatcatcttagtaacatagatactaaaatgtgtagaaagtcacatgatgattgtattagtcacatggtgactgtgtcagagaaacggaactaatacaatatatatagggtagaaagaatcacaagtgccaggacccgggggtgggacattctcagagtaactcagggtaggaaaggtccatgaggcaggataatccaaggtaacatggtgagacatgagacaagacaggtcttggagctgcagcttctgaggcctggatgtcctgggtcaggactcagatttcactccaggcttgtggagagcctctggaggrttggtcaagacaatgatcatctgactcaggttgtaacagcagcatcctggctgctgtgagaagagagtgtagaggccctgaaagaaagcaaggaggcctaggagcctattctagtaattcaggagggaaacagtgggggctgagtccagggtgctggcagtggaggtggtgagaaggggttggattctgggtttgttctgaaagtggaactgacaggggttcccggcagattggccgtgggtgcaagaggaggagaggtatgagaatgactcagggtttgggccagagcccgggggacggcaatgccatttgctgagttggagcaccagggaaagggag

SEQ ID NO: 552657 - DNA, 659 bp, Homo sapiens
atcgatctatcatcttagtaacatagatactaaaatgtgtagaaagtcacatgatgattgtattagtcacatggtgactgtgtcagagaaacggaactaatacaatatatatagggtagaaagaatcacaagtgccaggacccgggggtgggacattctcagagtaactcagggtaggaaaggtccatgaggcaggataatccaaggtaacatggtgagacatgagacaagacaggtcttggagctgcagcttctgaggcctggatgtcctgggtcaggactcagatttcactccaggcttgtggagagcctctggaggattggtcaagacaatgatcatctgactcaggttgtaacagcagcatcctggctgctgtgagaagagagtgtagaggccctgraagaaagcaaggaggcctaggagcctattctagtaattcaggagggaaacagtgggggctgagtccagggtgctggcagtggaggtggtgagaaggggttggattctgggtttgttctgaaagtggaactgacaggggttcccggcagattggccgtgggtgcaagaggaggagaggtatgagaatgactcagggtttgggccagagcccgggggacggcaatgccatttgctgagttggagcaccagggaaagggag

SEQ ID NO: 552658 - DNA, 577 bp, Homo sapiens
acaagcattgccttcttattttacttcttttagctgtttaactttgtaagatgcaaagaggttggatcaagtttaaatgactgtgytgcccctttcacatcaaagaactactgacaacgaaggccgcgcctgcctttcccatctgtctatctatctggctggcagggaaggaaagaacttgcatgttggtgaaggaagaagtggggtggaagaagtggggtgggacgacagtgaaatctagagtaaaaccaagctggcccaaggtgtcctgcaggctgtaatgcagtttaatcagagtgccatttttttttttgttcaaatgattttaattattggaatgcacaatttttttaatatgcaaataaaaagtttaaaaacttagctggtgtgtctgtttggtttctggaaggatcgcggatgaaacctttgcaaagaggcctacctcttggtccattggggagggacaagcatctggtgactggataaattcccttatggcatagaaatgggtttcacccaggtatgcaaaataccttgtctatactaggagatcattttctcaggctgattgaattcc

SEQ ID NO: 552659 - DNA, 577 bp, Homo sapiens
acaagcattgccttcttattttacttcttttagctgtttaactttgtaagatgcaaagaggttggatcaagtttaaatgactgtgctgcccctttcacatcaaagaactactgacaacgaaggccgcgcctgcctttcccatctgtctatctatctggctggcagggaaggaaagaacttgcatgttggtgaaggaagaagtggggtggaagaagtggggtgggacgacagtgaaatctagagtaaaaccaagctggcccaaggtgtcctgcaggctgtaatgcagtttaatcagagtgccatttttttttttgttcaaatgattttaattattggaatgcacaatttttttaatatgcaaataaaaagtttaaaaacttagctggtgtgtctgtttggtttctggaaggatcgyggatgaaacctttgcaaagaggcctacctcttggtccattggggagggacaagcatctggtgactggataaattcccttatggcatagaaatgggtttcacccaggtatgcaaaataccttgtctatactaggagatcattttctcaggctgattgaattcc

SEQ ID NO: 552660 - DNA, 611 bp, Homo sapiens
tttccagaaatacttgtgagttattatgtactaatatttcaagtctttatttttttagttctatcacaacacctacagcatttgctttttaagaaatcttacctgttacttgtctttcccgctccctcaaagaaatggttcaatattcataaattatagaatcccataatctaacaacatacttaggtgctccataatgtgtggtgaataaataaaaaatagacataatcttgtagccagttagtggttgcaacaggaaagtggttaaaccccaggtattttaataatttatggatgataccagggttctcagagaaacagaaccactggaaaatrtatatgtatgaaattggcttactggctcacatgatgatggaaattgagaatacccaaaatctcttgactgcaagatgaagataattctggagagccgagagtagttggtgtagtttcattccaagtctgaaggcctgagatctaacagagctatttgtatatgttccagtattattgtgcgagaagactgatgtccaggtttgaaaacaggcaggcagagtgagcaaattctcactccaaccttcattctttgtactatttcagcctgcaatgga

SEQ ID NO: 552661 - DNA, 611 bp, Homo sapiens
tttccagaaatacttgtgagttattatgtactaatatttcaagtctttatttttttagttctatcacaacacctacagcatttgctttttaagaaatcttacctgttacttgtctttcccgctccctcaaagaaatggttcaatattcataaattatagaatcccataatctaacaacatacttaggtgctccataatgtgtggtgaataaataaaaaatagacataatcttgtagccagttagtggttgcaacaggaaagtggttaaaccccaggtattttaataatttatggatgataccagggttctcagagaaacagaaccactggaaaatgtatatgtatgaaattggcttactggctcacatgakgatggaaattgagaatacccaaaatctcttgactgcaagatgaagataattctggagagccgagagtagttggtgtagtttcattccaagtctgaaggcctgagatctaacagagctatttgtatatgttccagtattattgtgcgagaagactgatgtccaggtttgaaaacaggcaggcagagtgagcaaattctcactccaaccttcattctttgtactatttcagcctgcaatgga

SEQ ID NO: 552662 - DNA, 611 bp, Homo sapiens
tttccagaaatacttgtgagttattatgtactaatatttcaagtctttatttttttagttctatcacaacacctacagcatttgctttttaagaaatcttacctgttacttgtctttcccgctccctcaaagaaatggttcaatattcataaattatagaatcccataatctaacaacatacttaggtgctccataatgtgtggtgaataaataaaaaatagacataatcttgtagccagttagtggttgcaacaggaaagtggttaaaccccaggtattttaataatttatggatgataccagggttctcagagaaacagaaccactggaaaatgtatatgtatgaaattggcttactggctcacatgatgatggaaattgagaatacccaaaatctcttgactgcaagatgaagataattctggagagccgagagtagttggtgtagtttcattccaagtctgaaggcctgagatctaacagagctatttgtatatgttccagtattattgtgcgagaagactgatgtccaggtttgaaaacaggcaggcagagtgagcaaattctcrctccaaccttcattctttgtactatttcagcctgcaatgga

SEQ ID NO: 552663 - DNA, 591 bp, Homo sapiens
ggttttccttgtcattcaaagcttgaaagccaccttagagacaaagcttcttatgaatacctcatagctaggaacaggtctgtcatagctctttgagcatgaaagggctatgttgatcattcctcatctcatctctaggtcctcatggcatcctatatcaatatttagtatcacaaaataatgagctatttttatttgtatatacacagatttatatcatgcatttacttatctcttttaattcagcatttttgttaatattgtatcgaaataatcagatagtatgtcacacaaagaggaacatcttgaaamtaaaataatttaatattagtaattatatgggacaacaggtataaaccagaactttcctggaagattgaaccattagtcaccctaaatgcagttccaacttgtaaactaaatcaatagctccaatttagtaaaatgttctgacaaaaaaaaacaaatttaaaaaatctgtcaatattatgactcaaaacagcacaatattagataacaagatggacaccagtacaaaagtaaaattagaatctctaagtgtttttgaaaagtgtattcttaacgtttgca

SEQ ID NO: 552664 - DNA, 1356 bp, Homo sapiens
tttctatatggactgtacattttatataatgttttatckcttgtagcttccatcacttaccagctgagtcagccttgggttagtcaacatcagttacctcacgtgtaaaagggggtaattatagctgcctcctggaattactatgcaaattaaccaatgtatatcaaagcactttgtaaactgaaaggtattacacaaatatcagttatcactattaccacaattcttatgaattctaagaagtatttaattaatatctgcttataactgaggatgttctggccctgaatattgtttgtaaaaaatacaagcaaatggccaggtgcagtggctcacgcctgtaatcccaggactttgggaggctgaggtgggtggatcacttcaggtcaggagttcgagaccagcctgaccaaaatggtgaaaccctgcctctactaaaaatacaagattagctgggcatggtggtgcatgcctgtaatcctagctacttgggaggctgaggcagtagaatagcttgaatgcgagagacgaggtttcagtgagctgagatcgtgccattgcactccagcctgggcaagaagagtgaaaccctgtctcaaaaaacaaacaaacaaacaaaaataagcaaatggcttgggccacagaatgaatagaactcctgcttaagtatccttgcatgtaacttttacaatattgtctcccattataccctggaccctactgaagctgtcacaaggaagtcttagatactagtggctaattcctattgttcttttccaatctcagtcaccccctggaagaagctgttcctgactcatcagtctggattagatgccttttctgagctccacatagctttcagtactgctctccaacacagcatgtatcacctctattatatttttgggtttatttgcctgcccccccctccacacttccactttgctgtctttttgaagatattacacactggcaaatatttgttgaataaatcaaagtatggaaagtgaaagattgaataaatgaaacgagagattaacaaaataaatgaaaagaaatgtagaggaaaaggagaaagagaaaacatgggaattaaagataaattaagagacataagcatttaaattagatacagtattaaaacaagcatttccatatacagctgatgggaatgtaaactgagaccaaaaaaattcaaatcaatctgatagcaatatcaagagttctgtaaatgttcattaattatattatattcagtacacaaatgtttactgagtattatatatgttccaggcactcttacttgtgctgggactaatcaatatacaaaacagataagtccctgagccataaagc

SEQ ID NO: 552665 - DNA, 739 bp, Homo sapiens
ggcaattaaagcaagtgttatctaatttccttgtgatgtgagtaattatttttactgatgctttgccaccccatggaacaatgaatatatttgtttgcctcagatttacaatttgtttattaagcaaatgatgaccaaagagtaaaataccccaaactggcttttcctataaaatttaaaatacatatcagctcatgtttcccaaaactgttactttattatacatgaaaatagggaagttttaaaaaatgtatttacaaaagtttcttagccacgtgctaaggtcaatctaccatatttataaaagtacagaggttattccaaactctgaaaagagaaggctaaaacaaattcagagactccaatttacatccactatgccagcagtaaatgccacrgtcttagctacaagaagagctgtagaaataaattaccaccataaaaacgggtaagttcaacaaacagagcaagtatgtagttgacatttgaagttgaagactgcacaaagacaatgaaagcactatggatactgtagatagatagatgatagatagatagatagatagatagatagatagatagatagataaaaatcgagtaacattttttcttgagattgggtttatgtgcttctttttaactagtgactctattcaaggtgaagcaaggtatttttagtaaatgttcctctcagagccagagcatgtttctgaatgtacacaactagtaatttttccaa

SEQ ID NO: 552666 - DNA, 610 bp, Homo sapiens
agttctgggatacatgtgcagaatgtgcacgtttgttacataggtatacatgtgccatggtggtttgctgcacctgtcaacccatcatctaggttttaatgcctgcatgcattaagtatccattatctagtactcactgtttttcatatatcgtgtcattgtaacttacatctaaatcatggggttatytttagtgtctccttaatgttacaccagtttttaattgttataatagctgtggtattaatagctgccatttattcagcccctaccatgtgccaagttttgtgcaagtggctatccattcgttatttctaatgaaaatgccaactactttatagagatattgtaagactaactaaaacaaggaaggcagaagatcctacaccggattactgatgttttttaaaaattcagtattatgattttcttttgtatatactttcagtcatcaaatatttatttagcacttaccatatatgtgatgttggctaagttatttaacctctctgtactcagtttcctcatccataaaatggaagtaatgatagtgctacctcatatgataattaaataatatatgtaaagcacctaaacactgcctggcatg

SEQ ID NO: 552667 - DNA, 640 bp, Homo sapiens
gtcatgcaatacacccatgttacaaacctacatatataccccctggatcaaaaataaaaatagaaatttaaaaatataaaaataaaaaaattaaaatgggacttctaaaaaaattaaaaaattagccaaaataagactaaaatcttccttgacaacaaattttcttccagmtcttttcctatctttcaattccttgttaaagatagactctctctgtgcacttctcatgcattttttctttcacaacactggttttgaattatgctcctttcaggaaacatcctgtaaaaatggtaagacacatcaatattgtctaaatattgtggaaggcaaagccttataattctacctctccttgtagcaatgaacatagtttttagaactccttctttaaaatattctgtttcttggctctcttgatgccatgctttcttatttcccttgtctgactcttggtggttatttgcagacttcattactaagttttctactcaataggacctccacacatcacgttttcttaggctgtagccctaagtctcttttttgtctcaccctaaaatatgtacatagattatcttttttggtcacataatgtgatggttaattttaggggtcaaattgactggattaagggata

SEQ ID NO: 552668 - DNA, 640 bp, Homo sapiens
gtcatgcaatacacccatgttacaaacctacatatataccccctggatcaaaaataaaaatagaaatttaaaaatataaaaataaaaaaattaaaatgggacttctaaaaaaattaaaaaattagccaaaataagactaaaatcttccttgacaacaaattttcttccagatcttttcctatctttcaattccttgttaaagatagactctctctgtgcacttctcatgcattttttctttcacaacactggttttgaattatgctcctttcaggaaacatcctgtaaaaatggtaagacacatcaatattgtctaaatattgtggaaggcaaagccttataattctacctctccttgtagcaatgaacatagtttttagaactccttctttaaaatattctgtttcttggctctcttgatgccatgctttcttatttcccttgtctgactcttggtggttatttgcagacttcattactaagttttctactcaataggacctccacacatcaygttttcttaggctgtagccctaagtctcttttttgtctcaccctaaaatatgtacatagattatcttttttggtcacataatgtgatggttaattttaggggtcaaattgactggattaagggata

SEQ ID NO: 552669 - DNA, 1109 bp, Homo sapiens
gacacagtctcactctgttgcccaggctgaagtgcagtggcatgatctcagctcattacaayctccgctgcctcctgaactgaaatgattctactgcctcagcctcccgagtagtagagacatggtttcaccatgtctgccaggctgatttcaaattcctgactttaagtgatctgttgcctaggcctcccaaagttctgagattacaggtgtgagccaccatgccctgcctagacataattcttaagcattctttctttcattctcatctttcatttctttctctctttttctttgctcctttctcccttccttcatttctccccttttaatggcagacaatgtaaagttattagaaaatgtcttcttgggtgggaaggtcaaacctgataatctgatcctcgctgtaagactcagtacttggatcagttgggaaatcttactgggcttttggcactaaggaaatttttttcagttttatctacagcttgacgcccaaccatcatcttttccaaactatgaactcttgacctgaccataaaagccagccaataattatctgagcttgtctgtctcttgcagtgctttgctagatgcagccaatagtaaccaatatacattctgattctttccagccacttcctctaaaatcacaggtccagttctcacacggtcttacttctaacgtatttcaggcatccattttataagtcttttccatggtggagcagagggctccaggcataaggcccagtcatagctgtgtcctcaccaccatctgacaaccaataaatcaatgctacacattaggtattctcataccaatttatgttttatgatagttaatgctagttggtaaaatgtcagttcctgtatttcagtgaatcaacaaaatggaagttaatagtcactcatacagggtttggttggtggcaggaagggggctatgagttttatttctcatagtctttttctcaggttcaatccatccctcagagactcagtcttttacttgattctgtgcatctggctgacagatgggaaagtaagtaagggtaatacatgggaaatttttatggcctaggagtgggaattacacacattctaaa

SEQ ID NO: 552670 - DNA, 1109 bp, Homo sapiens
gacacagtctcactctgttgcccaggctgaagtgcagtggcatgatctcagctcattacaacctcckctgcctcctgaactgaaatgattctactgcctcagcctcccgagtagtagagacatggtttcaccatgtctgccaggctgatttcaaattcctgactttaagtgatctgttgcctaggcctcccaaagttctgagattacaggtgtgagccaccatgccctgcctagacataattcttaagcattctttctttcattctcatctttcatttctttctctctttttctttgctcctttctcccttccttcatttctccccttttaatggcagacaatgtaaagttattagaaaatgtcttcttgggtgggaaggtcaaacctgataatctgatcctcgctgtaagactcagtacttggatcagttgggaaatcttactgggcttttggcactaaggaaatttttttcagttttatctacagcttgacgcccaaccatcatcttttccaaactatgaactcttgacctgaccataaaagccagccaataattatctgagcttgtctgtctcttgcagtgctttgctagatgcagccaatagtaaccaatatacattctgattctttccagccacttcctctaaaatcacaggtccagttctcacacggtcttacttctaacgtatttcaggcatccattttataagtcttttccatggtggagcagagggctccaggcataaggcccagtcatagctgtgtcctcaccaccatctgacaaccaataaatcaatgctacacattaggtattctcataccaatttatgttttatgatagttaatgctagttggtaaaatgtcagttcctgtatttcagtgaatcaacaaaatggaagttaatagtcactcatacagggtttggttggtggcaggaagggggctatgagttttatttctcatagtctttttctcaggttcaatccatccctcagagactcagtcttttacttgattctgtgcatctggctgacagatgggaaagtaagtaagggtaatacatgggaaatttttatggcctaggagtgggaattacacacattctaaa

SEQ ID NO: 552671 - DNA, 1109 bp, Homo sapiens
gacacagtctcactctgttgcccaggctgaagtgcagtggcatgatctcagctcattacaacctccgctgcctcctgaactgaaatgattctactgcctcagcctcccgagtagtagagacatggtttcaccatgtctgccaggctgatttcaaattcctgactttaagtgatctgttgcctaggcctcccaaagttctgagattacaggtgtgagccaccatgccctgcctagacataattcttaagcattcyttctttcattctcatctttcatttctttctctctttttctttgctcctttctcccttccttcatttctccccttttaatggcagacaatgtaaagttattagaaaatgtcttcttgggtgggaaggtcaaacctgataatctgatcctcgctgtaagactcagtacttggatcagttgggaaatcttactgggcttttggcactaaggaaatttttttcagttttatctacagcttgacgcccaaccatcatcttttccaaactatgaactcttgacctgaccataaaagccagccaataattatctgagcttgtctgtctcttgcagtgctttgctagatgcagccaatagtaaccaatatacattctgattctttccagccacttcctctaaaatcacaggtccagttctcacacggtcttacttctaacgtatttcaggcatccattttataagtcttttccatggtggagcagagggctccaggcataaggcccagtcatagctgtgtcctcaccaccatctgacaaccaataaatcaatgctacacattaggtattctcataccaatttatgttttatgatagttaatgctagttggtaaaatgtcagttcctgtatttcagtgaatcaacaaaatggaagttaatagtcactcatacagggtttggttggtggcaggaagggggctatgagttttatttctcatagtctttttctcaggttcaatccatccctcagagactcagtcttttacttgattctgtgcatctggctgacagatgggaaagtaagtaagggtaatacatgggaaatttttatggcctaggagtgggaattacacacattctaaa

SEQ ID NO: 552672 - DNA, 1109 bp, Homo sapiens
gacacagtctcactctgttgcccaggctgaagtgcagtggcatgatctcagctcattacaacctccgctgcctcctgaactgaaatgattctactgcctcagcctcccgagtagtagagacatggtttcaccatgtctgccaggctgatttcaaattcctgactttaagtgatctgttgcctaggcctcccaaagttctgagattacaggtgtgagccaccatgccctgcctagacataattcttaagcattctttctttcattctcatctttcatttctttctctctttttctttgctcctttctcccttccttcatttctccccttttaatggcagacaatgtaaagttattagaaaatgtcttcttgggtgggaaggtcaaacctgataatctgatcctcgctgtaagactcagtacttggatcagttgggaaatcttactgggcttttggcactaaggaaatttttttcagttttatctacagcttgacgcccaaccatcatcttttccaaactatgaactcttgacctgaccataaaagccagccaataattatctgagcttgtctgtctcttgcagtgctttgctagatgcagccaatagtaaccaatatacattctgattctttccagccacttcctctaaaatcacaggtccagttctcacacggtcttacttctaacgtatttcaggcatccattttataagtcttttccatggtggagcagagggctccaggcataaggcccagtcatagctgtgtcctcaccaccatctgacaaccaataaatcaatgctacacattaggtattctcataccaatttatgttttatgatagttaatgctagttggtaaaatgtcagttcctgtatttcagtgaatcaacaaaatggaagttaatagtcactcatacagggtttggttggtggcaggaagggggctatgagttttrtttctcatagtctttttctcaggttcaatccatccctcagagactcagtcttttacttgattctgtgcatctggctgacagatgggaaagtaagtaagggtaatacatgggaaatttttatggcctaggagtgggaattacacacattctaaa

SEQ ID NO: 552673 - DNA, 2248 bp, Homo sapiens
atcatcttgctatttcttcttatttatcccatttgcttgttctttttttcttttttgctagctcctctcttttttattgaagtactactccacaatgctgccttctttgagactaagtacccgatgccattttacctccacagtggagataataatattagaccatgtcacatatagtgtaagagtcttacctagtaacttctatttccctccatcatttttatgttttatgaaaatgttattactttcatatatttaattctgcatgtgctaagaactccacactgtactgttatatttgcttgaaccagttatcatttaaagagattaaaaaggtaaaaatgggccgggcgtggtggctcacacctgtaatccccagcactttggaaggccaaggcgggtggatcacctgaggtcaggagttcgagaccagcctggccaacatggtgaaaccccgtctctactaaaaatacaaaaattagccaggcgtggtggcgggcacctgtagtcgtagctacttgggaggctgaggcaggagaatcgcttgaacctgggaggcggaggttgcagtgagctgggatcgcgtcattgcactccagcctgggtgacggaatgacacattgtctcaaaaaaacaaaaaaaaaaaacaaaaaaaaccccaaaaaagtaaaaatgtttttttgattttacctataggtttacaatttttggtactcctttgtgcagatccaaatttccatctcatgtcattttccttttgcccgrataactaacatttcttgtagcgtagatctgctagtgaagaatcctgttgggttttgtctaaaaaaatctgtttcttgtcctcatttttaaatgataaggaaataaacctggggtctcagttcctcttccccgcccctcactgagcagagttcttatgcactgctgccatgtgggaggtggagatgggttcagaggtttgtgaaaagcttgacgcgctgcacgcccactccacagggcacctttagaggcttcttggggaagctggtcgggtagctctgactcctcgcatctctgtgtgtccttgggaatgtcaggtggaagatcgatgtgcatttgcaaatgggagtgagtgtgagaaaagaaaaatgtggggttgtggctggtagggtgtgttcagggagcaatggtgacctctgttgtctgtgctctcccaacagttctgggattgtggggaatgcaattgttctgtatcccttttgtattttggaagttctccgtgaagtctaactgcaggtcatattgtcatttagtctagagttggaggatggatataatttcatgagtatgaaataatatgcagagttgttggacaccaactgggcccacccactccaccagaactcaggtctccttcatttgactcccaccggcaacgtcactcacctgaattactctctcttagataccagaggggaaacggaggcatgcaggtgagaacgtggcagcagtccctaaaagtcacttctggtgctggccctggctcatccgtgccctgggggagaaatgcaagtgtcagagctgcggaaaggagctgagatctagcagggctcgcccttatcaacctccgcctctaacaagggccacacagcacgtaggggagattaggccgatctgcctgcctcatcgcgggaggccaggagggtggaaggcagcggatcgcgccctagcgagcaacccacatgctctggaagtgtggttcaactttcaccaggctactgcgggcggccggccagctgtcagcgggcactccgcccccaggagctgtccgcaagcgcggggcggtgggcaccgcggggaacagcccccggacagccagtggcacgcggagacctcggagagcgcaggccctgctttcccgtaggaacactcgtgggcatcgggtcgcccgcttcgcccccgcgctctagacgcactttcctgccgcctggcgatgtccgaagtgcatatcagagcatggacttggtcttcccagcgctaccagaccgctgagcctccccgcacgtggtggggcgcaggcggggcgccagctgcgcgggaatccgggcgagcgcgctccacccgggcagtgcgggcctggagcgccctctggcgggacggtgcgcggcgttgcgcgtctccagccttgggattggcccggactcgccttcaacgcaccggacagcgctgccaggaggcagagctctgaaaacctcgacaacgacgc

SEQ ID NO: 552674 - DNA, 1086 bp, Homo sapiens
tttcaaaccgagatggagttttccagatcattctggaacgaaaaggaccccaatagccactatgaaaccttttctctatctgagaagtggggaatgaaggggtccatacccccccagaattcagttttatattaggcttgtgtagctcaataaatgttttcggtctaaaaactattcctaaagaatgcttcttctgggtcacaagggggcaggagaaggaagaaatacttcattgcaacrtaaaatatcaaattaatgttttctacgtgaaagtcaagacagcgaggggacaagtgggaaaaacaagttcacctcaggctaccaaatcattgcaagatttctttagtgctatacgtcactgggtcatgcagtgtatttcactttctgactgatttcaaggacccctcacaccatttatttagtctagtgatttagaacttttaaggcaatacaaacattatttggaaaacacaatagttgaaaaacatatccctccatttaaaataataaaatttatctcacgatcataaagtgctaattttgtgttaaaggcagagaatatctcaaattagaggaaaatgaaaacatctgaaaatatgtcattttatcaactatgtttggaagcaatatctgttaaagctttttgcctgtttattcttatcagccaattttaaggctttaatccttaaaatacattttcatgaaaactctaattgttgacatttttccaggtaatgacttttcaacaatttagaatatttttctttatacaaaggttaaataaacatattcatgcatgtatttgcatagaaaactttaaaaagaatgtataagaaactattaacagtagcgtccttggcctgggattgtcaggtgaagagagggagagggatttaactttttcactttagatcctttggtacaatgtgatatttttattttttatttattatttttttgagacagagtttcactctcgcccaggctggagtgcagtggcgtgatctcggctcactgtaacctctgcctcccgggttcaagggattctcctgcctcagcctcccgagtaactgggactataggcac

SEQ ID NO: 552675 - DNA, 1086 bp, Homo sapiens
tttcaaaccgagatggagttttccagatcattctggaacgaaaaggaccccaatagccactatgaaaccttttctctatctgagaagtggggaatgaaggggtccatacccccccagaattcagttttatattaggcttgtgtagctcaataaatgttttcggtctaaaaactattcctaaagaatgcttcttctgggtcacaagggggcaggagaaggaagaaatacttcattgcaacgtaaaatatcaaattaatgttttctacgtgaaagtcaagacagcgaggggacaagtgggaaaaacaagttcacctcaggctaccaaatcattgcaagatttctttagtgctatacgtcactgggtcatgcagtgtatttcactttctgactgatttcaaggacccctcacaccatttatttagtctagtgatttagaacttttaaggcaatacaaacattatktggaaaacacaatagttgaaaaacatatccctccatttaaaataataaaatttatctcacgatcataaagtgctaattttgtgttaaaggcagagaatatctcaaattagaggaaaatgaaaacatctgaaaatatgtcattttatcaactatgtttggaagcaatatctgttaaagctttttgcctgtttattcttatcagccaattttaaggctttaatccttaaaatacattttcatgaaaactctaattgttgacatttttccaggtaatgacttttcaacaatttagaatatttttctttatacaaaggttaaataaacatattcatgcatgtatttgcatagaaaactttaaaaagaatgtataagaaactattaacagtagcgtccttggcctgggattgtcaggtgaagagagggagagggatttaactttttcactttagatcctttggtacaatgtgatatttttattttttatttattatttttttgagacagagtttcactctcgcccaggctggagtgcagtggcgtgatctcggctcactgtaacctctgcctcccgggttcaagggattctcctgcctcagcctcccgagtaactgggactataggcac

SEQ ID NO: 552676 - DNA, 521 bp, Homo sapiens
atatgtcatattcattggatttgaacatacatgatcttggtgaaaacaagcaaacaacaacaacaacaaactttctgatgtttccaactacttctaaaccattagtaatatttcccataatgggaaatatattttcccattattttcaatttagacacacatgaatttgcttcatataacattttttttttcttttttttgagatgaagttttgctcttattgcccaggctggaatgcaatggcrtgatctcggctcaccaaaactgccgtgtcctgggttcaagtgattctcctggctcagcctcgtgagtagctgggattacagggatgcgccaccacaccaggctaattttgtatttttagttgagatggggtttctccatgttggtcaggctggtctcaaattcctgacttcaggtgatgcgtcctcctcagcctcccaaagtgctgggattacaggcatgagccaccgtgccaggcctgcttcatataacttctaaatgtaatatgtaacatcaga

SEQ ID NO: 552677 - DNA, 521 bp, Homo sapiens
atatgtcatattcattggatttgaacatacatgatcttggtgaaaacaagcaaacaacaacaacaacaaactttctgatgtttccaactacttctaaaccattagtaatatttcccataatgggaaatatattttcccattattttcaatttagacacacatgaatttgcttcatataacattttttttttcttttttttgagatgaagttttgctcttattgcccaggctggaatgcaatggcgtgatctcggctcaccaaaactgccgtgtcctgggttcaagtgattctcctggctcagcctcstgagtagctgggattacagggatgcgccaccacaccaggctaattttgtatttttagttgagatggggtttctccatgttggtcaggctggtctcaaattcctgacttcaggtgatgcgtcctcctcagcctcccaaagtgctgggattacaggcatgagccaccgtgccaggcctgcttcatataacttctaaatgtaatatgtaacatcaga

SEQ ID NO: 552678 - DNA, 1212 bp, Homo sapiens
attgctggctctgatttttctttgagttctctgtatgtttcactgtgtgttttgtaacattttagtttttcctaaaaccaaaggattgattaaccttcaaaaggcagcactttttgatgttagtctgtaaccttttatcaaatcaatatttccctaaatagagttgacacacagacattctaaattatctcctaataaattgttttgacttcggatattgaaattgcaggcccatctccccacccatctcagttttctctcttttttttgcgtgttttgtaataagtcctacaatgaagtgtgtgtgtgtctgtctgtctgtccctccctcctgccccctctttccccattcccctgtgtgtgtgtgtgtgtgtgtgtgtgtgtctgtgtgtaattacaaagaagttgtaaaggccttttaaagtagttatgatgtgatttcccctcctttttaaaaataaagtattttaagcgtaagtagtaacatcttagagggcaggtacgtggagactttgactttctattttatctatctttaaattttttttttttttttttttgagatggagtctcgctctgtggtccaggctggagtgcagtggcgcgatctcggctcactgcaagctccgcctcttgggttcacgccatcctcctgcctcagcctccgagtagctgggactacaggtgcccaccaccacacctggctaatttttttgtatttttagtagagacagggtttcaccgtgttagccaggatggtctcgatctcctgacctcgtgatccacctgccttggcctcccaaagtgctgggattacagttgtgagccaccgtgcccagcctgaattgtttaaatgtttacagtgagcatgttatttttatgatacatagtaatttttgatgaaaacattctgaaggctgaaaagaatgtcctgtcttttgaaaataaatccatctttgtgctgattaacactggaggctaaccaaagcgttataataaaatrttacattttaaacacctatgaaagtggctagttcaagaatataatttgccttgaaacatagcttgagatggaagtatacttctagtaatgaaagatcttgccttagtaataaatgaaagtaaaatattccattattgtcccttcatagaaaacaaatacaaccctaaatgacattttaattaactagtgattttcctctaaagctgaga

SEQ ID NO: 552679 - DNA, 1212 bp, Homo sapiens
attgctggctctgatttttctttgagttctctgtatgtttcactgtgtgttttgtaacattttagtttttcctaaaaccaaaggattgattaaccttcaaaaggcagcactttttgatgttagtctgtaaccttttatcaaatcaatatttccctaaatagagttgacacacagacattctaaattatctcctaataaattgttttgacttcggatattgaaattgcaggcccatctccccacccatctcagttttctctcttttttttgcgtgttttgtaataagtcctacaatgaagtgtgtgtgtgtctgtctgtctgtccctccctcctgccccctctttccccattcccctgtgtgtgtgtgtgtgtgtgtgtgtgtgtctgtgtgtaattacaaagaagttgtaaaggccttttaaagtagttatgatgtgatttcccctcctttttaaaaataaagtattttaagcgtaagtagtaacatcttagagggcaggtacgtggagactttgactttctattttatctatctttaaattttttttttttttttttttgagatggagtctcgctctgtggtccaggctggagtgcagtggcgcgatctcggctcactgcaagctccgcctcttgggttcacgccatcctcctgcctcagcctccgagtagctgggactacaggtgcccaccaccacacctggctaatttttttgtatttttagtagagacagggtttcaccgtgttagccaggatggtctcgatctcctgacctcgtgatccacctgccttggcctcccaaagtgctgggattacagttgtgagccaccgtgcccagcctgaattgtttaaatgtttacagtgagcatgttatttttatgatacatagtaatttttgatgaaaacattctgaaggctgaaaagaatgtcctgtcttttgaaaataaatccatctttgtgctgattaacactggaggctaaccaaagcgttataataaaatgttacatttwaaacacctatgaaagtggctagttcaagaatataatttgccttgaaacatagcttgagatggaagtatacttctagtaatgaaagatcttgccttagtaataaatgaaagtaaaatattccattattgtcccttcatagaaaacaaatacaaccctaaatgacattttaattaactagtgattttcctctaaagctgaga

SEQ ID NO: 552680 - DNA, 621 bp, Homo sapiens
atgctaaatctttggtcgtttatcatcaaaagcttaatgtcagatgaaacttcttatatgtaattttgaggattttaagccaagtaaagtaaaatcttattaaataaaaaaattgatgtaacaaatagttaacatttaataacaaaattatttctttacataatttcatttaatcctcagaaaatttccttgactatatcttatatttctccattttaaacataagactcggaatcagaggatatgtgactttcacagtgccacacatctcagatgagccagacgtatattttaatcccaatgtccatacattttgtcaagaatacctgtagtgatatattctcctttatccactgggacatatcaattctgctgaaaataatgctcaacaaaggagaagattgacatgggattggagacatctcttcttgaagcaaaagagttgcttcatctartgctatgtgtcaaacagagcaaggaatatggatgacagctaaatttgatcacgtttagaggaatttaaaggagtttcgctttagagatattaattcttggcaaagaaaccagcatattgtgtgctcttgcatatggttatcattagtaaggccaagttctggccag

SEQ ID NO: 552681 - DNA, 601 bp, Homo sapiens
ccgtgtttccgacccacagggttggtggcagatcagacagcatgtcrcacagagcctggtgtatactaaacatctggtaggctgctattattaccattactattattattattattattatttgagacggagtctcgctctgtcacccaggctggagtgcaatggcgcgatcttggctcactgcaacttctgcctcctgggttcaagagattgtcctgcctcagcctcctgagtagctgggactacaggtgcgcaccaccaggtacagctaatttttgtatttttagtagagacggggtttcaccatgttggtcaggcttgtctcaaagtcttgaccttgtgatctgcccgcctgggcttcccaaaatgctgggattacaggtgtgagccacctcgcctggcctactgttactattattattattatttggctctctgggcttctcattttgccaccgcccccaagttctgaaggggtcagaatggggaagccgggaccctcaggctgccaccctgggcttgtcggctgcagaactcccttcccttggcctcctcttctaccctcaccccggcagggccacaaggacccagtgagggtagg

SEQ ID NO: 552682 - DNA, 665 bp, Homo sapiens
taccaatattaatttcttagttttgataattgtactatggttttgtaagataagatggtaacattaaaggaagctatgtgaaggttatataggaactctacttattttctaattattttgcatgccttttatgcttgaaacacacctgacaaaaatggttaaggacattttttttttttttgagacggagtttcactctttttgcccaggctggagtgcaatggtgtgatctcggctcaccgcagccttcgcctcccaggttcaagcgattcttctgcctcagcctccccagtaggtgggattacaggcatgcgtcaccaccctgactaattttgtatttttagtagagacagggtttctccatgttggtcaggctggtcttgagctcccgacctcaggtgttccacccacctcagcctcccaaagtgctgggattaaggtgtgagccaccgcgcccggscaacatttttttttttttttctgagacggagttttgctcttgttgcccaggctggagtgcaatggcgcgatctcagctcactgcaacctccgccacttgggttcaagtgattctcctgcttcagcctctcaagtagctgggattacaagcgcatgccaccttgtccagctaatttttttgtatttttagtagagatggggttctc

SEQ ID NO: 552683 - DNA, 427 bp, Homo sapiens
aaccatcaaaattgggattcatctgtatactaaaggccactgaattgtataccttaaaataatgaatattacaataagtgaattttatctcaacaaaaacttgctaaaaaataaaaattcaactcacctgtcctttttgtggtgacaaacaatgaacaacttcatccaccattactggaatatgtaatttagccatagtttcaaaatctctatcttgagatctgtgtaactcctgggcttgagtttgatctgtttgctcccgggcttcatattctctatatttttctgctgtagtatgtattctktttggccagacacctaaattaggtatgccagattccaaccaacatgaaaggcattctttatacattctacaaaaatatggataccgaagcattttgtaggtaaacaaatctagaaaaaaaaa

SEQ ID NO: 552684 - DNA, 902 bp, Homo sapiens
tgtcttctccccacagagcccagctctgtttttgmacaatatattcaggaagaggaactggaattttaccattttcagtcttttaattgggtattttgatcctctctactgtgcagccaaggctgttgtcccatctcaaacagtcctgtgaaatatatcttggttgtccaggcatggtgaatactgatcaaatgagagacataatatgacagagaggaggagggagagggagaaagaagaaagagagagacaggaagagggagaagatctcaattgctcaactgagcaatttcagaaagtgtgtggagaccagactgttgaggaagctatgtgctttatggccatctctgctacatcagagagctcagagaatgacacaacgcttcatttgcaatttaacacttggaatcagatatgtaaaaatactcaatttttggtaaatattttaataagaagaatactttttaaaaaggaacagtatttataaacttccaaattatttgtacatttgattatatgcaaatccataagaaattagtaaaaatggtacaggaagcaactgaaaacaatctttaggttatatctgtgtagcatgaattttattctggagaagaaatattttcatgtgtcagaaattcaaattttcaaggatttctgagacatttttattcaaaaggccaatgttcttttggcttaggaactccaccagtttggtacggatttgacgtaggaaaaaaacactgttctttctcattcctcctctaccagccattgtcagagaattccactaatctctataaaactagattctgcctttgtcaagttgataaggtctttattttacaaatatttagaacatttacgctgcttcacaatcatgattttattggcattacagatgt

SEQ ID NO: 552685 - DNA, 546 bp, Homo sapiens
aatgaccctgtactttagaattttgatgtttatggggagatctttgtggggaaggaaggagttgatttagaaataccactggcagccgtgaggcggatagacttgggaagtattgcatagggaagcagtaaggcaagggaagctcagaggctgttgtagtgatgtcagtgtatcagtcagcataaatggggttagccatggcaacaaacagccccaggatcctggtggcttaaagcaataattttctctacttttgctcatactayctattcaatcactggttggctggaagcttggttgattactgtcattcaggcccacagaatgttcctaaacattgccaggtgccctgatagaaggtgaagagctcttcagagtctggtcctagcagttaaatgcttggcctctaagtggctcatgtcacttctcagtcattggcagaactggtcacatacccacccaaccaaaggggccaggcaaaccaattctgccttgccacagaacagcgtgaatgctgacacagatttggttccttaggtagcagac

SEQ ID NO: 552686 - DNA, 596 bp, Homo sapiens
tgaaacagggtcttgctctgtcacctgggctggagtgcagtggcatgatcacggctcactgcagcctcaaactcccgggctcaagatgtcctcccagctcagcctcccaagtagctgggactacaggtgtgtgctgccacaattggctaaatttttaattttttttagagacagggtctcactgtgttgcccaggctggccttgaattcccrggctcaggcaatcctcccgcctcagttcccaaagtgctaggattacaggcgtgagccaccgcacccagcctgtatttgctttttagacactctttacatattcccacagtgttgactgtctgcctggcacggtcataagcacacactttacatgtcttaatgtctctaaacttcttaacaccatctccattcacagatgggaaaactgaggcacaggcatttctggccactcagccaggaagcatctgaggagggtggggacgggcttaccacctgccacccccgcagcagcagcctggcccactcatggtgctcatagccccctgcgcaggttctggctcaagcacggtggttcaacaggcccggttttcacaaacgaggcac

SEQ ID NO: 552687 - DNA, 640 bp, Homo sapiens
aatgacgagttaatgggtgcagcacaccagcatggcacatgtatacatatgtaactaacctgcacaatgtgcacatgtaccctaaaacttgaagtataataaaaaaaattgaacaaaaacaaaacaaaacaaaaaaataaattaaaatcttgattttgaacctggaaagtagtcttatgatatctctatctttttgtagttgctaaactgaaaagtactgtctgttctcagagatatcacaatctcatcagtagattccatgggctggcatatttgactgcagttaaatccattctttgtggtcttcawagtgaatcttatttcatgtagttccgaaaaggagaagagataattacatctaacttgaaggcttattgaagaatcctttaaattacctatgcctctcttcattaagaaaatacaagataatttgaatctagctaataaattaaggcttactggaaataacgccatacaaattagttctgaaaatttaagcagaatgcttttctcaccttgtgggagaccacgaattatcaattcatagcttcgtgtttaccttgattatgaaaaccaagagtcagaaacagcatcactggaaatgttcttcataatgatgtgtaaaacttctttaagtgac

SEQ ID NO: 552688 - DNA, 640 bp, Homo sapiens
aatgacgagttaatgggtgcagcacaccagcatggcacatgtatacatatgtaactaacctgcacaatgtgcacatgtaccctaaaacttgaagtataataaaaaaaattgaacaaaaacaaaacaaaacaaaaaaataaattaaaatcttgattttgaacctggaaagtagtcttatgatatctctatctttttgtagttgctaaactgaaaagtactgtctgttctcagagatatcacaatctcatcagtagattccatgggctggcatatttgactgcagttaaatccattctttgtggtcttcatagtgaatcttatttcatgtagttccraaaaggagaagagataattacatctaacttgaaggcttattgaagaatcctttaaattacctatgcctctcttcattaagaaaatacaagataatttgaatctagctaataaattaaggcttactggaaataacgccatacaaattagttctgaaaatttaagcagaatgcttttctcaccttgtgggagaccacgaattatcaattcatagcttcgtgtttaccttgattatgaaaaccaagagtcagaaacagcatcactggaaatgttcttcataatgatgtgtaaaacttctttaagtgac

SEQ ID NO: 552689 - DNA, 680 bp, Homo sapiens
tccacttgtgcccttccccaacctatttcctacacaacagccagagtgattttttttcacacataatcagcttgtcactccctcacttaaaactctccaaaggcttcccagtcacaaaagtcatctggccattcctcaaacatgccaaatgtatgcttgtcttttgtatggacattctatgtttatttctgtttattgcctctctccaccattaacgtgtgagctccatgagagcagagacttggtttgtcttttttgctgttgtatccccagagcctggaacagtgcctggcacacagcagatgcataataaatgttttatgaatgaaggaataccccaaaacaagggtgattcaacattagaaaattcactgttttaattaatcacattggccagtagttcaaaggtgactgagcacataattttaatggacaccaaagagatgcttgataaactagcaaccattcctagtagaggaytttgatgaacttcctgattttaaaaaatcaatttcaaatgaaaagcccagatcatagctgattgtgaaaccctagagacattctcattaaactcggacagaacatgaagacctttatcctatgagtgtatagccccaacttaatttttcttcttgtacttgtattgggacggagcatcagatgctgggataagttcctca

SEQ ID NO: 552690 - DNA, 1200 bp, Homo sapiens
ggaagaagttgagctgtaatgcagtctcagcggaggcctcagctgaccctatggggagttcagaatctgggataaggtggcccttggtgcttgtccctagttggggtaagaggacttagcctttaaacccccatggcaatgagtcatcggatgcaggctgccctggtaaaggatcatgaccttggcaatgtggttgtctttccaggatgattcctgtaaaggctgacagctaagggccttctgttggcagcactgacagtagctgggagtgactcttccattcctgaagggaggtcagggtggggcatcacagcatccaatacaatcactagtcatgatttttaaaccaatacaatcactagtcatgatctttaaaaatcttgaatgtgacatctcctgacctcatccaccttggttgatgaaatagatatgattgtcttggtagtcaagagtactagttaaccaaaagactatatgctctttaagtttaggcaagctagtaaggaagtgagaaaagcaagacctgaactttgatctggagcaaatcactttacctttgaacctttttccctctctgtacaatgaaatggcaatccctgccctgcttgccttctgttgttttggatgacctcattagccattagacaacatatttgaaagtaatctctgattttattttttatttatttttattattttttttcaactaggggcatacccagatatctctgattttaaatcttccgccaacctaatactgtttcaggtggacagtaggtgcctgttaacaagtcataggtggtgggaggatccctgcacttaaaaatttcatttcactggaaatcttctcagagtgctaaacacttgagggattcaccatattaagttgctatcactgattcacatatatggagacacctctagatgtgaacagagcagtcccaggaaggagrtatgtgagagtgttaaaaatatgctgcccagccatggctctcccatcaacgcttgcttcactggctagtttagcaagaatgagagggtgttgctcactggtttgctctgatgggaagcttggcattctcctgcagcaataagaggtcctgtctatttttctagttaggtcccaaatcaccaatgtgtcattcaagtctactgaatcccacaaaaccaggagtccctcagtggtctccaaatcccagc

SEQ ID NO: 552691 - DNA, 637 bp, Homo sapiens
atgaggacaccatagaacaaacctgtttcagaagtcagaccggattggattcttaagagaatggcattggagtttcctgttattgacggatctttgcctgaggacaggttcccgttggcagaggaattagagaattgttcagaactaacattgcactgcagagtaatggggtccagcacaggaaaggaggaaatccaggaagaagatacccatagaggtggagtaccaaatgtggtttataaactctcctaaaatatggggttgacccccaaactggtaacagttcargtatctataaaccaagaaaaaggattatcaagttgctgtatgtgtacaatggaatactcctaagcaataggaaggaaccaaggcatcgatgtctgcagcaacttggattaatctctgaaacattatgctgactgaattagtcttcacaaaacaagccatcatatgtgattctacatatatcctaaaaccagacagacctcatctattgtgcatgtggggtgggacagccaaaacgaagttatgaaagggaaagaagaagaggttggtaggtggtaggaatgagtggtgaggacagggattaagtggggaagtgcatatggcagctttctaaggcattggcaatgttctg

SEQ ID NO: 552692 - DNA, 1486 bp, Homo sapiens
ctctgtgaggggtaggagggttcttcaattctttttacccattttgaagctcatacatgtcgtgtaaatgcgaaacaaaatgacttcagctttcttccaaacctcagtttggggagagcagaaacaagccactgggcttgtaaccaagatccatggtccagtggtgaaaaaagagccctccccctttagcatctgaagccactggcaggttagggatgagggctctattggaggccagcaatgtgtgtttataccttgcacctgcaggtgggaagaggggtgtgtgggagggagggtctcctggctttggtggggtcagagaggatagggaaggctgtcagtatcttccccactcaaaatctacactgaagatgagtctatgaaacaccgtgccaaccccccatgatggtgtgaatcaggcagcctacagactggagacttgcatgggccattcttaatgaaaacaattactcatcattcatctgaaattcacatttaactgggcatctcctgtatatttatttaaacttggtaagtgaggcaatggtactctggagctagattgcctggcctagaatcctggccctgcccttcaagctgtgtgacttaggtaacttactcaacttctctgtaccttgtctattctctaaagtaaagacagtactatctcctttggaaggtggttgtgagcaataaatgattttaaaagggtcaagcacctagcacagtatctagcaataagtgctcacaaaataatatctattagtattgtctgttgatgactgttgatgacctctgtttctttgccaagtgtattgtgtttgggatcccctgcctatgtctctatagtgtcagacattgaaaatttctaaaaccaaaagattttaccagccctttagtttggctgatgttttccaaggtcctcagaacgtgtgcaaagtgtcacttgcagtttaaatgtaaaacaagaaggcagatgtggyttgtgtgcccagcaggagcagaggccttgcagagcaatgatgctgagcagccaccggctttggggcccaaggggtgcccaagccctctaattattagcagagagatattgcacacactgaggtgaccacttgtggcctcattgacagatggagttgttcacggtccctgcctcactgcgctgctgggaagaccacgtgagataggcgtggattgctcagtgccatgcctgcggtgtgcacagactccccagccctggggggaagaagccatgcactctggagctgtggcctagatggctactgtgtccccactgcacgctgacatacaaattgtgtgactttaaacacactttacctctctaccttggtttcctcttctttaaatgcaggtcatggtagctttgtaccactgggtggtgatcagatgtactactgcgtgcaaagcacttaggacatcacctaccactgttctggttttcattgccatggttccttattttctg

SEQ ID NO: 552693 - DNA, 528 bp, Homo sapiens
gaggaagcaacagcatgtgcgaaggccttgaagtcgaagcctgtttggtgagttggaggaacagcagggccagcatgtgtggcccaggatgagcgaaggcgagtacggtaggggaggaggaggaaggagtgagcagggaccayggtaaggagtttagattttattctgtctgggagccaatggagggctttgagccgttaccttgagatgtaggtgggcatatgagtacctgtcaccgtccctagccattttaagacatcctagggaaagtgactctcttctttcttttattaactggaagggtctctttaagaagttactagagaggctgaggtgggcggaccaccggaggccaggagtttgagaccagcctggccaacatggtggaacccgtctctactaagaatacaaaaaaatagctgggcataatggcaggcacctgtaatcccagctacttgggaggctgaggcaggagaattgcttgaacctgagaggcagaggttgcagtgagccgagattgtgccactg

SEQ ID NO: 552694 - DNA, 515 bp, Homo sapiens
attcattaaataatacaattaatattcaactattggtgaatccatctgtcagtaatagccaccatttaatgaacacatactgtatgctatatacttggcatggataataatatttaatccttaaaagcaccctgtgaggtacaggtggtattatcaccaatttatagatgagaaaatgaggatttagagagcggttaggtaagtggcccagtgtcacatagctaaatgggaacactaggtcagagcccccttttataaggcttattttatactatcaaacagatacgaaagaacatcgttctaaaaggcaaatgttagcttttcttcatcctgattctaggcatgtgttgagagactgtcaagtaatgtgttgggattgggacacaaaatgtctatttcctaatctactatttggggagctttataaaggatgtgaggttactttgaatggcstgtctttctttttaaaaaaaagctatctctaagaaaccatgtgggttcctattgtgttagca

SEQ ID NO: 552695 - DNA, 1314 bp, Homo sapiens
tgcctcagttccatgactttccccatggatattcttgctttcttttccctttcctctttctctttcctgcttccatatattgaagaatattttgtcaatatgtactagaaaacttctgcaaaagcttactactctttttttaaggtaaagttatctaaaagatgatgctctacttcttttagaggtatactggaacaagtctccatatattgaagattatttcatcaacacttactagtaaacttctacaaaaacttactagctcttttcttttaaagaaggtctctaaaagatgatgttcacttatttgagaggtatcttggaacaagtgaggactggctctgtcagagcccttgccccattttccttgagagaagcaccccaattacttcagagccacggtattcatggccctgggcagtggctcatgcatcagtctcyttctcttcttttctagcctccattacagtaaggaatggccacaagatctagttctatcaaatgacatgtctgctgggatgacagtgggtaggggtggggtagggttgtttggggaaagtgcttgcttatagtttcctaattaaaggggggaaaagttccaggtataattttttctctcttccccttctttctgcttgagtgcagacataaagctaagtctacagaagtcatcttgtggtcatgatgtggaaagataaaatgatggccagattaatcacagagatgccagctctgatgtcataggtcaccaatatagtgcaatcagctgcatcccttgagacattttgtatatagaaacaccctttattatttaatgttagcagtcaatggtttctaaatcatataagataccttctcttaaagggtcaacagttgggaggccagtccagatattcaataatttacacccatttgtggacatttagattagataagagtaaacttcatcagaaactgaccaactcaaaatcatctcaagaaagtctgaattttaaaaaattaaaagtgaattacctgtctacttttctatcccataattcacttgtcttagaatgggcttttggaggtaattattgcccgaagtgggcacttgaatattatataattttggaactagcccacaaagatcccacagtttcctagtattggggaggaaaggtaatattaggcagtgtgcccagcttaatatttcaaggactcatgaccccctgcattttaataaactcaatggaagagaagaaaagagaagggattatcactgggaattttattcttttttttcttcatgtctctcctacaccacaggtaaggagc

SEQ ID NO: 552696 - DNA, 527 bp, Homo sapiens
tacagtttaaaaggttggccacacctgtggctccatacgccaagcctccagacccagttgtccaggaaaacctggagtagacgggtggaggacaaggagaaaagggaagcaggatgtagttagggtagtgtgtgagtgggctgtgggcctcaaggtttccagcagacccacaaaaaattaaaactgaattgggcatctccacccttggagaagcagctcacgaataatgagcatacttaagtcccaccaacaggggtcgcccttagacactgggcctgaagctggcatcagaaaagggaaattcccaggcctggatcyggaggccagatttccagctctcagagctgttgattcctgtcttgttggacacagaagaggctgcccagctgaagagagacatgtcctcagcttttctggtgagtgaaggcctgtgctggaacttatgacagcaaatcccagctctgaaagtggatttctatatcttcctcttcaaactcaccgtcactctagagaaagaactcttcttt

SEQ ID NO: 552697 - DNA, 503 bp, Homo sapiens
cagaggaatctccaagcctcttcaaagctaccaactaaacagacaccactgagatgaccacgcctttttatttaaaaaaaaaatcatttaagcaagaagaaatctctgcatatggaagtcccaaagccaaaatcctccaactgctttctctctcactaccaggaactgaattgagaaatctgatgaactctgtggcttcttaagcagtcacagactagtgacacatcagcccagcagaatttgcaaaacattctactacggagcaccacaattcctgccctctccgaaaaggaagggaagtaagggagaagggaagagagcaacgtcagatcccaagtctgaagaggacacacgttcctgtcttctccactttctytggaagccccacaccccaaattcaaatcaacagggctcagaggagcctttagcatcaccaaagggcttgtctgccttgtctctggtactgatctctgcctgggagaccacagcagaacccacaccaa

SEQ ID NO: 552698 - DNA, 510 bp, Homo sapiens
catattttctttggactttaaaatattaaaaatgtttgaattagttgwcagtattttaaaatcaggagatttcacatcccctagccaacttcactagtctaggtgactggtttggccccccttggcatattctttcagagttctgagatggccctaccaaaacttactctagctatttacatatagtgatctgttttagattatttcaatttttaaattgtcagaatgaacactataaggaatattatcatattttctgcatttctgaatgtttccttaagaaagatttcagaagtagattgatttcattgaggtttcaagtgtttttttttttttaattatactttctggacattcacctgacaacagccttctttccatttggccaatctgttcatactgtcagctaagttgggtctcagactgactgcatgggcattagccagaccaggccttctgcttgtctgggatggaggggctctcagcagccagcaagagagtgtgcccagg

SEQ ID NO: 552699 - DNA, 603 bp, Homo sapiens
acttaaaaataaatgataaaattgaaactaagaaaggctgtaatcagcagactggaagctgaggaagatctagaagtaaaagaaaaaattagatgcgttaaaatgacatgagcaggcgactcagtggcccaaaacaggacccagaacattcatccgtaaatggaatctgataatctggggcccaaattctgtttacttaacatgtgagaagaytcacagcctaaaagagaaaatcaagttgaactaacaataaatgatggtgggtgaaagataaatgttttagggaacagaagaggagcacatatttatgaagcaagaataggtacagtcattttccaactaacatctagtgagactgggattcaccactcagaatgggggtccaccatgagcaacagatttgaggtaccagtgcatagcagctgaatgccagccctgtaaaagaccaccataaagagagctccatgttcttttgctcttttggggatgggacatcaaacaaaagtctcttcgtgtatatctcagctcctgccacatgatcatcacctatctgtgagaggcatcgcttttgctttgtttatttatttttttaatcctcattcc

SEQ ID NO: 552700 - DNA, 603 bp, Homo sapiens
acttaaaaataaatgataaaattgaaactaagaaaggctgtaatcagcagactggaagctgaggaagatctagaagtaaaagaaaaaattagatgcgttaaaatgacatgagcaggcgactcagtggcccaaaacaggacccagaacattcatccgtaaatggaatctgataatctggggcccaaattctgtttacttaacatgtgagaagattcacagcctaaaagagaaaatcaagttgaactaacaataaatgatggtgggtgaaagataaatgttttagggaacagaagaggagcacatatttatgaagcaagaataggtacagtcattttccaactaacatctagtgagactgggattcaccactcagaatgggggtccaccatgagcaacmgatttgaggtaccagtgcatagcagctgaatgccagccctgtaaaagaccaccataaagagagctccatgttcttttgctcttttggggatgggacatcaaacaaaagtctcttcgtgtatatctcagctcctgccacatgatcatcacctatctgtgagaggcatcgcttttgctttgtttatttatttttttaatcctcattcc

SEQ ID NO: 552701 - DNA, 578 bp, Homo sapiens
ccatactacctaaagtagcttttctctaatatcaaatcactttatttttctcaatggaattcattatcatttggaattttcttggtttgtctatctcccccattagaatataagcttcgtgaggacaggtaacttgtccatcttgttcacagctataacctcatgcttagaaagtgctcagcacatggcagccacttgctggatgttgctggatgttaaaaagaactgtgagcccaccatgggtgcaaaaaagtttaagctaatttatacttatattttaaaaatcaatttttaaaccaatttatgtcagatctgtytatgcttctaatcttggttgctggtacataaatatattaaacatatctttggctttctttgagcatttattatagcatagttaatgtgcagacaattttagtgtattttattgtatatttttcttatatttcaacaaacatgttttgggtatgctagacctgaaaatctgtgatgaaaatatgaaattgttttttcaaaagtagattcttagatccctgcttctgaaaacaaactggaatggggttttagactcataggag

SEQ ID NO: 552702 - DNA, 578 bp, Homo sapiens
ccatactacctaaagtagcttttctctaatatcaaatcactttatttttctcaatggaattcattatcatttggaattttcttggtttgtctatctcccccattagaatataagcttcgtgaggacaggtaacttgtccatcttgttcacagctataacctcatgcttagaaagtgctcagcacatggcagccacttgctggatgttgctggatgttaaaaagaactgtgagcccaccatgggtgcaaaaaagtttaagctaatttatacttatattttaaaaatcaatttttaaaccaatttatgtcagatctgtctatgcttctaatcttggttgctggtacataaatatattaaacatatctttggctttctttgagcatttattatagcatagttaatgtgcagacaattttagtgtattttattgtatatttttcttatatttcaacaaacatgttttgggtatgctagacctgaaaatctgtgatgaaaatatgaaattgttttttcaaaagtagattcttagatccctscttctgaaaacaaactggaatggggttttagactcataggag

SEQ ID NO: 552703 - DNA, 272 bp, Homo sapiens
ccttaaccagtacgtaaatgtgtaacagttaaagaccttgtaacttaatagcaattgaattttaatagttatagtattcttcacttaatcttataatgagtaytgttataattaaaataaatgaaaacctttttttttgcttcataataaaaacttgtgggaggagaaaatgaaaatgtaaaactgaatttgctaaacaggaaatattttaatcatgaagttcaataattcatttgctgatataactacatgacaattgtggagatcttggg

SEQ ID NO: 552704 - DNA, 272 bp, Homo sapiens
ccttaaccagtacgtaaatgtgtaacagttaaagaccttgtaacttaatagcaattgaattttaatagttatagtattcttcacttaatcttataatgagtattgttataattaaaataaatgaaaacctttttttttgcttcataataaaaacttgtgggaggagaaaatgaaaatgtaaaactgaatttgctaaacaggaaatattttaatcatgaagttcaakaattcatttgctgatataactacatgacaattgtggagatcttggg

SEQ ID NO: 552705 - DNA, 1001 bp, Homo sapiens
atgtgatcaggtgtggccaatgaaattgaagaggaagtctacctgggcttctgggaaagcttttccaataaaagacacaggcatggctaacacctccctgggcctcttcttcctaccttgattgagggtgtgatgcctggagccacagcagccactttgctaccatgacaaaaaggccaagagaatcacagagtcattgaccctatcattatttcaccaagccaataccagccgccatccttctccagaattcttgtaaataaaataaatccctctttgtttaaaccattgttggtcagtctctgttacttgcaaccaaaatcatccctaactgacacagaaggccagtccctgcctgtccaaaattacctgcaggctgtgctaaaaatccagattcaactttcccatcagaagcctattggatcaggatccccagctgcaatgcctgggatctgtttttctkcaccttccccatatagcctacctagcatgagtctgaaaactggtacttggacatgactaaagcacacatcattcaacaaatatttatcgagttcctgctccatgccaggatgcatgccataggctgggacacagtagagaacaaaggtgcagtgcctccccctcatctgatgactgcagtggtctcctcccaactggtctcccctactggccttgtccctacaccctgttctcaacagaggagccaaaatgatcttcctccagtctaaggcagaacttgcgactctgcacagaccctccctgggctcccagtggagtctctcctgcattccaggtggtcctgcgagtccagctccctcttagcctccgacctccttcctgcactctcccacttgctcacacagtcccagttgtgctggcctcctaccctctccaggcatgccccatctccatgcctttccacctgctcttccccagccaggagtatccttccctccataggcgcgcggcccactcccttgctttcttcaggtctttta

SEQ ID NO: 552706 - DNA, 1001 bp, Homo sapiens
atgtgatcaggtgtggccaatgaaattgaagaggaagtctacctgggcttctgggaaagcttttccaataaaagacacaggcatggctaacacctccctgggcctcttcttcctaccttgattgagggtgtgatgcctggagccacagcagccactttgctaccatgacaaaaaggccaagagaatcacagagtcattgaccctatcattatttcaccaagccaataccagccgccatccttctccagaattcttgtaaataaaataaatccctctttgtttaaaccattgttggtcagtctctgttacttgcaaccaaaatcatccctaactgacacagaaggccagtccctgcctgtccaaaattacctgcaggctgtgctaaaaatccagattcaactttcccatcagaagcctattggatcaggatccccagctgcaatgcctgggatctgtttttctgcaccttccccatatagccyacctagcatgagtctgaaaactggtacttggacatgactaaagcacacatcattcaacaaatatttatcgagttcctgctccatgccaggatgcatgccataggctgggacacagtagagaacaaaggtgcagtgcctccccctcatctgatgactgcagtggtctcctcccaactggtctcccctactggccttgtccctacaccctgttctcaacagaggagccaaaatgatcttcctccagtctaaggcagaacttgcgactctgcacagaccctccctgggctcccagtggagtctctcctgcattccaggtggtcctgcgagtccagctccctcttagcctccgacctccttcctgcactctcccacttgctcacacagtcccagttgtgctggcctcctaccctctccaggcatgccccatctccatgcctttccacctgctcttccccagccaggagtatccttccctccataggcgcgcggcccactcccttgctttcttcaggtctttta

SEQ ID NO: 552707 - DNA, 1001 bp, Homo sapiens
atgtgatcaggtgtggccaatgaaattgaagaggaagtctacctgggcttctgggaaagcttttccaataaaagacacaggcatggctaacacctccctgggcctcttcttcctaccttgattgagggtgtgatgcctggagccacagcagccactttgctaccatgacaaaaaggccaagagaatcacagagtcattgaccctatcattatttcaccaagccaataccagccgccatccttctccagaattcttgtaaataaaataaatccctctttgtttaaaccattgttggtcagtctctgttacttgcaaccaaaatcatccctaactgacacagaaggccagtccctgcctgtccaaaattacctgcaggctgtgctaaaaatccagattcaactttcccatcagaagcctattggatcaggatccccagctgcaatgcctgggatctgtttttctgcaccttccccatatagcctacctagcatgagtctgaaaactggtacttggacatgactaaagcacacatcattcaacaaatatttatcgagttcctgctccatgccaggatgcatgccataggctgggacacagtagagaacaaaggtgcagtgcctccccctcatctgatgactgcagtggtctcctcccaactggtctcccctactggccttgtccctacaccctgttctcaacagaggagccaaaatgatcttcctccagtctaaggcagaacttgcgactctgcacagaccctccctgggctcccagtggagtctctcctgcattccaggtggtcctgcgagtccagctccctcttagcctccracctccttcctgcactctcccacttgctcacacagtcccagttgtgctggcctcctaccctctccaggcatgccccatctccatgcctttccacctgctcttccccagccaggagtatccttccctccataggcgcgcggcccactcccttgctttcttcaggtctttta

SEQ ID NO: 552708 - DNA, 1323 bp, Homo sapiens
tggccaatggaatagtagttatccagaattgatacaagtcaagtaacttaaaatatgttggagcagcaacagtgaagggagaggtgaagtcagacctaatcagcacagtccaatgacctatagtatgtwtttcttgacatctccagaaggagactctagaaagcagagtagaaatgatttacaatgttatttaccagctgttgcaaagttcgggagatccaaggatcacaaatgatattgcgagaaccagacaggaaacagatgtggaaggttaaggaatataaatttcagtagttactgatagattttgaaaacacgcatctgtctggaattgttgctgttaaataacaacaattcatttgccgcttccttagctgaagtatatttgaatggaactatacaaaaaagtcattgagcacaaaggggcttttcaaagaattcacaaggaacatccacagccaattctctggctgcaagtttttgctgcacaatccaaaatagcagtgggattataaaacgtttttttaagtcatggttctgtgactattttgcctctcaaaatagtaccatagattcttttacgcatgctttacctacatggtgttaagttcaaaagtttattgtcacatccctaaaatcccaatcctagtttctcttaataaattattttagctctggtatctaaaattttatttaaactttttttttttttttttttttgagacatggtctcaccctgccatcaggctggagtgcagtggtgcaatctcggctcactgcagccttgacctccccacccatctcagtttcatgaatagctggaactacaggagtaccccgccatgtctggctaattttgtttattttttgtagagacatggtctcattatgttgcccaggctgatctcaacctcctggactcaagcaatcctccagcctcggcctcccaatgtgctggcattacagacctgggtcactgcacctggccttatttaaacttctgaatcctgcttatttcacttcttaggatgagaagatagagtaggccatatgaatgttgagtagcaacattgagtttcccagattgtgttttgtttactttagttccatgagctagttcaaaaatcaataaatgaaggcagcagggtaaggaggttgggggtttgtagtatggtgaaattactgaggaaacatcacaagttattatactttttttttggcagttcaaatgttctttagcatattaaggctgttggaagccatacaggaaataaggttaattttttctaaatcatataccactaccaccatcactaccactca

SEQ ID NO: 552709 - DNA, 629 bp, Homo sapiens
ctcagcacacccctgatctcatttttgaatgagcctgaagaagcttgttaatccttgaaaacccaattaactgttgcttcctcacttaaaccttctcaacatgactgtttccttttcatattttcctaaagtacttgataaatagtctgtagtggagtaaaaaaaaaaatctcattaccaggtaacagaattattcttaggaaagaaatcacctttgtttgggaaaaggtcttcataatccccaaaataagtaacatattagcaaaagttccggcaacaaaataaatggtccaatgattgtgaatgagaaatgaatagaaattagygggtagaggagactgggcaaaaatagttgactaacacggcagagcagcttaaagacttacaacagggatgtcaatacttaatttcagggcatttgtatccttatattgtgcatcccatctgtatttctaaagctttcagtgaagtatgccgcacattcaaaagcctcatgaaaatgtagttattttatttattttggagaggcatatttggtttaaaagtagtggaaataaatatacactaaaaaggcatagagttaaaaataagaagttgacagagcagaaagtcaaggctgcaggtgctca

SEQ ID NO: 552710 - DNA, 534 bp, Homo sapiens
aagaaataattacagcaagtaattacaaataatgatcaaagtaatgcaagaaagcaagatgacatgtctgactttgttgctagtttgtcatttgaatatataatgggacaactttcagggyttctataattaattctcctataatatatataggagaattatatatgatacataattcagggctcctatagtgtaatcaattctcaatattataaaatgaggatttcctgattcaacttgcaaaaacatgtgaaagtaatgagaaatactgttttctcttgctgttcacattcagtttcctggaaagccacttttgagagttgtgtttgctttcaagaggcctggcttagagatccagagggattcctttatcttgagtgccactgctaagtgagtcacatcctggtaggtaggagtcctgaagttttccccagcagaacttcccactggtctccctttcccatttcaacatggttcaggtgtgcccatttgttcatcaacacggactcttctcccttgccaaaaaatgatgag

SEQ ID NO: 552711 - DNA, 534 bp, Homo sapiens
aagaaataattacagcaagtaattacaaataatgatcaaagtaatgcaagaaagcaagatgacatgtctgactttgttgctagtttgtcatttgaatatataatgggacaactttcagggtttctataattaattctcytataatatatataggagaattatatatgatacataattcagggctcctatagtgtaatcaattctcaatattataaaatgaggatttcctgattcaacttgcaaaaacatgtgaaagtaatgagaaatactgttttctcttgctgttcacattcagtttcctggaaagccacttttgagagttgtgtttgctttcaagaggcctggcttagagatccagagggattcctttatcttgagtgccactgctaagtgagtcacatcctggtaggtaggagtcctgaagttttccccagcagaacttcccactggtctccctttcccatttcaacatggttcaggtgtgcccatttgttcatcaacacggactcttctcccttgccaaaaaatgatgag

SEQ ID NO: 552712 - DNA, 868 bp, Homo sapiens
gtctttgttagttgatgacttaaaaactccttgtgttttgatgctatgtgtcatttgaacgctagtgcagtattcactgtgtttaatagacatctaacatgctaggaaaaatactgctaaaatttaaagccacaaagtgaaatatacgactttctgtctcttaagatttttaaggtaatgatatagagtgttgtccagtaaaactttctatggtaataaaaatgatctatatttgcattatccaatactgtagccactagtgctgtgtggttatggatcactgggaatgtggcacgagtttctgaggagctgaagttttaaaatttaatttaattttaattattttgatttaggttcaaatagtcacatatgggacagcaatcctrtaaagcaatcctctttgatttatataatctaacagttttctaagaaagaaagtctagaattgatgccaaaagctgctctgctttactgtcccatgggcaccccatttattcccatggttttttgctttgttttgtttttgttttttgagagtgatcgctaagtgcatggcaggaagatagcctcatggagggcaaagagcattagatgatctgcagatgatctgtaattcagtcaaagcccaatcacacatactaaccatatgtggtggtaaccttaggcaagttatctcaccttactgaacctcagttttatcatctgtagaatggcaaaaatagtatctctctcatggtgttgttagaataaaattaaacacctttaaagagcttagcatagcatctaacactattattaatcaataaatgatagatatgattggatttctttacattgggtaattgttaaaatatccaaatagataagt

SEQ ID NO: 552713 - DNA, 1158 bp, Homo sapiens
tatcgaagcttgtgaccagatctcttgatataggttaattggaaaaaagaaatccagtacttatccatgctctggttcaaaactcgaacttaaatgcagcttacatgagagaacatatttttgttgttaatataaagtcagcaacagaattaaaaaataagggcacacataatctgcatgccagacatggacacttttaaaggttagacatttcaagaattttaagtgtatgaggtcatacactgaatgaataaccaaaataaaattctattgtgcattaaaatgtttaccgtaatagattttatgcaacatagaaagttgattaaaacctgttcctgtgtatgaaacacacttgtcaatgatggtaatgagaaaatccaaaataaggtttaattagtttttccacagaggatcttatgttttttattacttatatgttcatataattaagcaaatttttaaaccctttacttttcagaatttgaatcactgatattctctctctccctttctctctctgtctctgtcactttttttcatttttggagagagaggattttgctgtcacccaggctggagtgcagcagcgtggtcatggctcactgcagtcttgacttcccaggcgcaagccatcctttcacctcagcttccctagtagctgggactagggaagtccatatcgagctaatgttatttgttgttgttgttagtttatttttttttgtagaaatggggtctcattatgttgcccaggctgttctcaaactcctgggctcaagcaatcctccccsctcggcctcccaaagttctgggcaagcccccatgcccaaccttgactcactgcttctctaaggctcttcacatatattcttttttaaggaaataaatatattaatttttacatgtatgtttagcttttatagcaattcataataacttaatattgtatcattaattccagtaatgagttctaaaactgccttatcatattaatatcccaattcacttaagtaagaaattttaacaaattcccagttcttctcaaaagatatatgaagctattcaaaagaaatcaaaataatttgtgaacatttaccaaaagttcacacaaaatgttcaagatttaatggctaacttgaagaagaagcagagtgaagg

SEQ ID NO: 552714 - DNA, 495 bp, Homo sapiens
aagaaataatttacctatgtaatcttataaaaattaatttaaccaaagaaatgagagaccacatgaaaatggcatttacataggagagttgaggctgggtatggtggttcacgcctrtaatcccagcactttgggaggccgaggtgggaggatcacctgaggtcaggagtttgagaccatcctggccaacagggtgaaaccccgtctctactaaaaataccaaaaaaattagccaggtgtggtggcatgtgcctgtaataccaactactcgggagacggaggcaggagaatcgcttgaacctgggaggcggaggttgcacgatgagttgagattgcaccactgcattccaacctggacaacaagagcaaaattccatctcaaaaaattaaatgaataaataaataaatagagttgaaatgttcagtagtaaaattgcaactctttaaattattgacaagggtgactactaataaaccaagctccttttacccatc

SEQ ID NO: 552715 - DNA, 495 bp, Homo sapiens
aagaaataatttacctatgtaatcttataaaaattaatttaaccaaagaaatgagagaccacatgaaaatggcatttacataggagagttgaggctgggtatggtggttcacgcctataatcccagcactttgggaggccgaggtgggaggatcacctgaggtcaggagtttgagaccatcctggccaacagggtgaaaccccgtctctactaaaaataccaaaaaawttagccaggtgtggtggcatgtgcctgtaataccaactactcgggagacggaggcaggagaatcgcttgaacctgggaggcggaggttgcacgatgagttgagattgcaccactgcattccaacctggacaacaagagcaaaattccatctcaaaaaattaaatgaataaataaataaatagagttgaaatgttcagtagtaaaattgcaactctttaaattattgacaagggtgactactaataaaccaagctccttttacccatc

SEQ ID NO: 552716 - DNA, 1291 bp, Homo sapiens
gggcattatacactttccaaatgtacaatgtcatcaggttttatgacatttcctacaaaaactcaatagtcaggtagcacttcatcagttacagtttaaattcaggtatgggaacagaaaactatggctgcagcatggaaaccataccgctcttctgatttcaatgtcacagccccacgggaacatttcactaaacacttttcatacatgtgcatttttgtcccctgctaagagaactccatgtcttggaattacagagtacagccaaaagtatgttagtagggccaaaaatccactctagatgatctctgtcttcccacaaaagcttcatcagagatgctcctccacctggggttttctgtttattcagcctcacttccttcttcaagtgatgaaatgcttagagcatcatgtccatgcctgtctacatggcttatggagcacacaagacttctgagactcagagctctgaaggcaaagctgacagatatgaaatgcaagcctagctttgccagggtaaacgtggccaggaaaggagcatacctagttctactggcatcaaaacagggttgcgaaagagtctatgagaaagaaatattaagtaatactgcatgtctgacattgacatgagcttattattcttccatgccaacacaccctaatccaaagcttatgctattccaatccaagcctgccctaaaacagccaattatgctgaatgcagtctaagctccaaggagtctccagacttaaagacaatgtttcattggcccattcgtttttgtattatttctacattttgagtcagcttctaaatcatatgcatcacttctctagggattatttccctttcacattgcaggtataatagagctcctgtggctttgctacattgccagtggttttatttccttcccaaatgtattggtaaacttggtttaaaaacctgaagctgagcaacctctccaaataaacatgaaacatttccaaacccattatctacatgacttcaacaagtgatatcataatcatgttgccraaaggagccataatatacaactggttttgttctagaacttccaaactggttcccaaacttttgagtctggctgtggagggaagtttaaaattctgcaaaacatttgcattggcaaaagtggtcatttgtcacttatgcattggaagtgccatcccaaaatattcactgagaaaactgttgtcatttattcctcaagaatgagcgcacttagtctcaacttctgacaaaatgaacaagtgtgatatttttccc

SEQ ID NO: 552717 - DNA, 1291 bp, Homo sapiens
gggcattatacactttccaaatgtacaatgtcatcaggttttatgacatttcctacaaaaactcaatagtcaggtagcacttcatcagttacagtttaaattcaggtatgggaacagaaaactatggctgcagcatggaaaccataccgctcttctgatttcaatgtcacagccccacgggaacatttcactaaacacttttcatacatgtgcatttttgtcccctgctaagagaactccatgtcttggaattacagagtacagccaaaagtatgttagtagggccaaaaatccactctagatgatctctgtcttcccacaaaagcttcatcagagatgctcctccacctggggttttctgtttattcagcctcacttccttcttcaagtgatgaaatgcttagagcatcatgtccatgcctgtctacatggcttatggagcacacaagacttctgagactcagagctctgaaggcaaagctgacagatatgaaatgcaagcctagctttgccagggtaaacgtggccaggaaaggagcatacctagttctactggcatcaaaacagggttgcgaaagagtctatgagaaagaaatattaagtaatactgcatgtctgacattgacatgagcttattattcttccatgccaacacaccctaatccaaagcttatgctattccaatccaagcctgccctaaaacagccaattatgctgaatgcagtctaagctccaaggagtctccagacttaaagacaatgtttcattggcccattcgtttttgtattatttctacattttgagtcagcttctaaatcatatgcatcacttctctagggattatttccctttcacattgcaggtataatagagctcctgtggctttgctacattgccagtggttttatttccttcccaaatgtattggtaaacttggtttaaaaacctgaagctgagcaacctctccaaataaacatgaaacatttccaaacccattatctacatgacttcaacaagtgatatcataatcatgttgccgaaaggagccataatatacaactggttttgttctagaacttccaaactggttcccaaacttttgagtctggctgtggaggraagtttaaaattctgcaaaacatttgcattggcaaaagtggtcatttgtcacttatgcattggaagtgccatcccaaaatattcactgagaaaactgttgtcatttattcctcaagaatgagcgcacttagtctcaacttctgacaaaatgaacaagtgtgatatttttccc

SEQ ID NO: 552718 - DNA, 423 bp, Homo sapiens
ttataaatagtacctcattaattgggacccagcctcaataacggtatgtatgtgagaaggctgtaaaaacatgtcacatcggatcccttaagagcacagataatttgagtgttatcacaatcgttcttccaccctaagggtctgggtggcccacttctaaaacagmtgtattttaaaagagtttggtttaagtgggaccaacttaaaatgaattagcaaatgaaatccaggagcacatttaggtaggaaagactacagtagggtgagactgtatagaaatggaaagtatatttcactacaacagagatagaaacgttgttgtgttttgtatcttccaacagtgggcaatggacaaattcatgttatataaggaaggattgaaagaatcaggaaaggggccgggtgcggtggctcatgcctgta

SEQ ID NO: 552719 - DNA, 625 bp, Homo sapiens
agtatgagactgactggagaacaggtgcttggtgagcacagggcagtcagtgtgtatcagtatgtttgtgtttattatgaaaagtgagataaaacatctacataaatagttctaatacagggtagaacagaataaaaaggagccaccagagagtgtcagataaggtgtgaggaaacttcagaaaatagaaggaaaaagaatatttacattccccaagctccttctctgaaccagaaggtgggaattatacattgaaatagcacggtatgaaaatccagtaacgatccatgatcccccagctagtaaatggcagagcccaggtccatagaacccgaaagatctctttttttcctactatagtgggctgccttgtgcctgggtctgaagagaagaggaagaaagaggggagtctgatggacraagctctgtggaggacgtggcactgagcagaaacttgaaacagagcttgactggctggcaggatgagaagaatggactcttggctgaaggggaagcaagcacaagcacatagagatgaggaagcatgggtggtggtatatagggtaagtgcaatctatttcaaagacagctaaaacacaagatgacccattccatggcaaacatg

SEQ ID NO: 552720 - DNA, 648 bp, Homo sapiens
  misc_feature 610, 623: n = A,T,C or G
tttccaaatgacaagtcccttcacttttctgccaagggaagccttggggcttcctaaggacagacagagcccgatgggttgggtggtgcctgtttaaaggcagctttggcaagtggtcctgttgtcggaagctcaagggtcacacttctgaggacatttttaagggagacagagggctggaaagggtcaagtggctacgagtcttggcaagtttccgggggcggccaaggacaggcagatgctcatgccctttgacctagggctgaacagggggttactcaaagctgccttttgatggggagaagggatgtgaggtggggattcactgtctcctctttccctcattktggggggctgaaaggcaagggaatcgaacgctgcctgtcttttcaggaacaaggcaacgagaagaccaacaacggcactcactacaagttacagctcctctacagcaacggtgagctcttctacagcaacggtgagccggcgcctagcagccggcttccgggccgcacgcgctgaccttgccatgatcactctcagggatcgcatggagcccagggcggcgggaggcttgcctgggacaggggattggggaggtcaccgtctncagggcggctcancatggagaggctgcttgggcctcag

SEQ ID NO: 552721 - DNA, 2157 bp, Homo sapiens
ttgccttacagatccttttttttttttttttttttttttgagacagggtctcactctgtcacccaggctggagtgcagtggcacaatcgctgcttactgcagcctcaaactcccgggctcaagcaatcctcctgcctcagcctcttgagtagacagcattacaggtacgcaccaccatgcctggctaagtttgttttgtttctggtacagacagggactcactaggttgcccaggctagtctcgaactcctggactcaagtgatccctcccaccttggcctcccaaaaagtgctggcattacagacatgagccactgcacctggcccctctagagattgattaactggcctggaaggagaccaaaggcatctttgttttcaactccacagacgattctcatgtgtagccagtgctgagagccactggatgagatgatctctaaaagccccctggctctgtggaaggcacagagggcagcaggtgagtgcacagtcagcagaatctgatttaaatccacttccaacctcttcccatctatgtaactcttagtaagtttcttatccttttggaatctcatcttcctcacctgcatcacagaggtcataatgcatccccccagcgtcataataaaattatgcaaatgaagaacttgaaaacagtaactggcactcagcaggtgctcacacaaagtaattatcatgacgattactactactattatataagtaaagtaactgagggaggctggagggagggaagattgaggagatggtgctcaaagaaaagtccaattagacgggaggagtaagttcaagagctctattgtacaacatggaaactatagttactaacaatgtgttgtatacttgaaaaatgctgagagtagattttcagcgttctcaccgcaaaaaataagtatttgaggtaatgcatatattatttagccgctccacaatgtatgtatatatatgtataaacagtacgttgtacaccataaaatatatacaattttcatctccttaagttccttgacagaatggattgaccaatggatcctgcttgctattatttatttgagacagagtctcactctgtcacacaggctggactgcagcggcgcgatcccagctcacagcaacctccgcctccggggttcaagtgattgattctctggcctcagcctcccgagtaagctgggactacaggtcccaccatgcctggctaatttttgtatttttagtagagatggggtttcgccatgttgcccaggctggtctcaaactccagacctcaggtgatccgcccgcctcagccttacaggcaagagccaccgtgcccagcccctgcttgcaatttaaattaagggatgggctttggaagttgcataggccaaacktaccaagccctggaagacaggtttctagtcttggctccaagaacaacctgtgttgttcctgggggcgggggcgggtctgcggtggtgtagcggaatgaggattatgacacctgaggcagccgcctgaaagggaccgggtgcaacagtccacaacccctacaacaggaccagagcacaccagccaggaggccacaggaaaaggctttcctctcccataaagaacaaacactcaaagattaaaaaaaaagaaaaaaagtctggttggaggatgggaagtcgagtaaaactgcaacgctggctttgagccagcctgccagagtgagggaacagattccaatacaaaactgtttcaactaaggctatttgtaaatttatctgaaagcaagtaggtgccagcagaccacttattttcctctcatgctaaaaataaaaatttccaaactgacctaattgggtctacatcgcactggcaacgcgaacacctcagatgaagagagaaaacctacggagctcactgtaaaacaaatcttatttttcatatattaactaaagtgttttaagaacttagggctaaagagtgtttaccaagtattcacaggtaataaagttcatgaattttaggcatctgtctataaacaactgtgatcaaatcaaagctgtgacatgaacgtgacaactaatttttgtaagactttcttctttttttaattcctttttcttttgctgatcacactcagaaattcagaacaatacagaattc

SEQ ID NO: 552722 - DNA, 2157 bp, Homo sapiens
ttgccttacagatccttttttttttttttttttttttttgagacagggtctcactctgtcacccaggctggagtgcagtggcacaatcgctgcttactgcagcctcaaactcccgggctcaagcaatcctcctgcctcagcctcttgagtagacagcattacaggtacgcaccaccatgcctggctaagtttgttttgtttctggtacagacagggactcactaggttgcccaggctagtctcgaactcctggactcaagtgatccctcccaccttggcctcccaaaaagtgctggcattacagacatgagccactgcacctggcccctctagagattgattaactggcctggaaggagaccaaaggcatctttgttttcaactccacagacgattctcatgtgtagccagtgctgagagccactggatgagatgatctctaaaagccccctggctctgtggaaggcacagagggcagcaggtgagtgcacagtcagcagaatctgatttaaatccacttccaacctcttcccatctatgtaactcttagtaagtttcttatccttttggaatctcatcttcctcacctgcatcacagaggtcataatgcatccccccagcgtcataataaaattatgcaaatgaagaacttgaaaacagtaactggcactcagcaggtgctcacacaaagtaattatcatgacgattactactactattatataagtaaagtaactgagggaggctggagggagggaagattgaggagatggtgctcaaagaaaagtccaattagacgggaggagtaagttcaagagctctattgtacaacatggaaactatagttactaacaatgtgttgtatacttgaaaaatgctgagagtagattttcagcgttctcaccgcaaaaaataagtatttgaggtaatgcatatattatttagccgctccacaatgtatgtatatatatgtataaacagtacgttgtacaccataaaatatatacaattttcatctccttaagttccttgacagaatggattgaccaatggatcctgcttgctattatttatttgagacagagtctcactctgtcacacaggctggactgcagcggcgcgatcccagctcacagcaacctccgcctccggggttcaagtgattgattctctggcctcagcctcccgagtaagctgggactacaggtcccaccatgcctggctaatttttgtatttttagtagagatggggtttcgccatgttgcccaggctggtctcaaactccagacctcaggtgatccgcccgcctcagccttacaggcaagagccaccgtgcccagcccctgcttgcaatttaaattaagggatgggctttggaagttgcataggccaaactyaccaagccctggaagacaggtttctagtcttggctccaagaacaacctgtgttgttcctgggggcgggggcgggtctgcggtggtgtagcggaatgaggattatgacacctgaggcagccgcctgaaagggaccgggtgcaacagtccacaacccctacaacaggaccagagcacaccagccaggaggccacaggaaaaggctttcctctcccataaagaacaaacactcaaagattaaaaaaaaagaaaaaaagtctggttggaggatgggaagtcgagtaaaactgcaacgctggctttgagccagcctgccagagtgagggaacagattccaatacaaaactgtttcaactaaggctatttgtaaatttatctgaaagcaagtaggtgccagcagaccacttattttcctctcatgctaaaaataaaaatttccaaactgacctaattgggtctacatcgcactggcaacgcgaacacctcagatgaagagagaaaacctacggagctcactgtaaaacaaatcttatttttcatatattaactaaagtgttttaagaacttagggctaaagagtgtttaccaagtattcacaggtaataaagttcatgaattttaggcatctgtctataaacaactgtgatcaaatcaaagctgtgacatgaacgtgacaactaatttttgtaagactttcttctttttttaattcctttttcttttgctgatcacactcagaaattcagaacaatacagaattc

SEQ ID NO: 552723 - DNA, 607 bp, Homo sapiens
atttatagaagattatgagtttcatgcagccaggattaattgcattgctattatagaacttaatataagttgtatcatatttgatggaaggatgctaactatcaagaggatataaattttaaaaacaatgatactgttttggataagtcctgactgtctgcattttatctagaacaatatatgttcatgattaacctagaaaataatgacaaaaatgcgcaatgagtagagacttgcccttggaattcctaaaattattaggaaggtacaatgttctccaagaaatattgrtaagtgaaaaaaacaaggtttacaataatgtgtaacggatgctatctgtgtaacaaaatgtgaaaaaacatatatgcaattttttggcaagaagataccctgaaaacataaaccaaaaagccaaaaaaaaaaaaagaaacttgctgatgatacagaacttctctgactgtacatttttctcatagtcttaactctgataattacatacatgtttgacattctcaaaagtaagaacatagaagtacataatatatgcaggataaagcaaataacagtttatgtgaagattgttagaagccaaggttttcatggaagt

SEQ ID NO: 552724 - DNA, 831 bp, Homo sapiens
ttgatcttgattttcagtacgaatacagaccgtgaaagcggggcctcacgatccttctgaccttttgggttttaagcaggaggtgtcagaaaagttaccacagggataactggcttgtggcggccaagcgttcatagcgacgtcgctttttgatccttcgatgtcggctcttcctatcattgtgaagcagaattcaccaagcgttggattgttcacccactaatagggaacgtgagctgggtttagaccgtcgtgagacaggttagttttaccctactgatgatgtgttgttgccatggtaatcctgctcagtacgagaggaaccgcaggttcagacatttggtgtatgtgcttggctgaggagccaatggggcgaagctaccatctgtgggattatgactgaacgcctctaagtcagaatcccgcccaggcggaacgatacggcagcgccgcggagcctcggttggcctcggatagccggtcccccgcctgtccccgccggcgggccgcccccccctccacgcgccccgcgcgcgcgggagggcgcgtgccccgccgcgcgccgggaccggggtccggtgcggagtgcccttcgtcctgggaaacggggcgcggccggaaaggcggccgccccctckcccgtcacgcaccgcacgttcgtggggaacctggcgctaaaccattcgtagacgacctgcttctgggtcggggtttcgtacgtagcagagcagctccctcgctgcgatctattgaaagtcagccctctacacaagggtttgtccgcgcgcgcgcgcgcgcgtgcgtgcgtgcggggggcccggcggggcgtgc

SEQ ID NO: 552725 - DNA, 1061 bp, Homo sapiens
tttctttctttctttctttctttctttctgtttcgtccttttgagacagagtttcactcttgtttccacggctagagtgcaatggcgcgatcttggctcaccgcaccttccgcctcccgggttcgagcgcttctcctgcctcagcctcccgattagcggggattacagggaggcacccccacgcctggcttggctgatgtttgtgtttttagtaggcacgccgtgtctctccatgttgctcaggctggtctccaactcccgacctcctgtgatgcgcccacctcggcctctcgaagtgctgggatgacgggcgtgagccaccgtgcccggcctgttgactcatttcgcttttttatttctttcgtttccacgcgtttacttatatgtattaatgtaaacgtttctgtacgcttatatgcaaacaacgacaacgtgtatctctgcattgaatactcttgcgtatggtaaatacgtatcggttgtatggaaatagacttctgtatgatagatgtaggtgtttgtgtcatacaaataaatacacatcgctctataaagaagggatcgtcgataaagacgtttattttacgtatgaaaagcgtcgtatktatgtgtgtaaatgaacgagcgtacgtagttatctctgttttctttcttcctctccttcgtgtttttcttccttcctttcttcctttctctccttctttaggtttttcttcctctcttcctttccttctttctctctttctgtccttttttccttcgtgctttatttctctttcgttccctgtgtttccttcttttttctttcctctctgtttctttttcccttctttccttcgtttctttcctcattctttctctctttttcgtgtttctttccttcccgtctgtcttttaaaaaatggagtgtttcagaagtttactttgtgtatctacgttttctaaattgtctctcttttctccattttcttcctccctccctccctccctccctccgtgctcccttccctccctctttccctttcgccatgtgtctcttttccccactcccctccccccgt

SEQ ID NO: 552726 - DNA, 1061 bp, Homo sapiens
tttctttctttctttctttctttctttctgtttcgtccttttgagacagagtttcactcttgtttccacggctagagtgcaatggcgcgatcttggctcaccgcaccttccgcctcccgggttcgagcgcttctcctgcctcagcctcccgattagcggggattacagggaggcacccccacgcctggcttggctgatgtttgtgtttttagtaggcacgccgtgtctctccatgttgctcaggctggtctccaactcccgacctcctgtgatgcgcccacctcggcctctcgaagtgctgggatgacgggcgtgagccaccgtgcccggcctgttgactcatttcgcttttttatttctttcgtttccacgcgtttacttatatgtattaatgtaaacgtttctgtacgcttatatgcaaacaacgacaacgtgtatctctgcattgaatactcttgcgtatggtaaatacgtatcggttgtatggaaatagacttctgtatgatagatgtaggtgtttgtgtcatacaaataaatacacatcgctctataaagaagggatcgtcgataaagacgtttattttacgtatgaaaagcgtcgtatttatgtgtgtaaatgaacgagcgtacgtagttatctctgttttctttcttcctctccttcgtgtttttcttccttcctttcttcctttctctccttctttaggtttttcttcctctcttcctttccttctttctctctttctgtccttttttccttcgtgctttatttctctttcgttccctgtgtttccttcttttttctttcctctctgtttctttttcccttctttccttcgtttctttcctcattctttctctctttttcgtgtttctttccttyccgtctgtcttttaaaaaatggagtgtttcagaagtttactttgtgtatctacgttttctaaattgtctctcttttctccattttcttcctccctccctccctccctccctccgtgctcccttccctccctctttccctttcgccatgtgtctcttttccccactcccctccccccgt

SEQ ID NO: 552727 - DNA, 655 bp, Homo sapiens
tgtctttccgttcctactaccgcttctctattgcaaaccttcatctctcaccagagctgtttcagcagccttccaactcatccagtttcttgaagcccattctctaaatggtgccagagtaatttttcataaattctggttggatcatatcatttttctcctgagagcctttcagtgactccaccttggccacaagatagagttcaagcccctcagcatggaaaacgcaacctttcatgatctgacctgccctgtcttacctgcttcatctccgttcctccctaccacacacccaaagtttaatgctgtaacaatacctagctatttaactttcccaaaatatgaactgaagtttcatttgttggtatatttgctaatacttttttattttacctagaacattcttacatttttccttatcttycaaggttaagtttgagtatttcaggaatctctcttctgttatgcaaataaagttaggtgccttgcccttgcactctcataacatccagtatattcctgaattactgcatttggcatatggtattaaaaattctgtttccacgtctgtctcccccactaaaatctctttaagaataggaaccagggctgggccgggctcggtggctcacacctgtaatcccaggactttggg

SEQ ID NO: 552728 - DNA, 541 bp, Homo sapiens
cagaggggcagggtcctgtggctgtgagggtgcagcctatgtgttctgcagggtcttcagaccccagacaatgcagaggtctgagggcattggtgaatcccaaactgatctaaatttcgacgctcacataggaggtttccccattttggaaaaccagatgtcatgggaagaaattgccctgcacaatgtggtaaaggggacagaggggttagtgttttgcaacgctaaggcaagaatggactaggatgagataagcaaggtgcctgggatgcaaaatgtaaggaggcactcaagctcagctttacgcaagggcagggccagcagttgcaggaaactgagtgtgagcccctccttacattttgtgccctagccaaagtcctgccctagggatgcctgcctgtggtcctcattgagagaagagatgcctgtgatggggaaagccctagaaggggacttgggaggatagaggctcttgaagcagacttcatttttctctcttccttagtaacagatgcccaaattaatttagaargggtgagca

SEQ ID NO: 552729 - DNA, 567 bp, Homo sapiens
aggctgccgcaggagaatcgcttgaacccaggaggtggaggttgcagtgaatgaagatcgtgccactgcactccagcctgggcgatagagcgagactccgtctcaaaatattamtactactaaaataaccaataaaacattaacgataattagtaatgagacaacggacactcctgtttgctgggcccgccgcagtgccagctcggtaacccccaccactcggagaagaggccacacttactatcccattttacagaaggggaaactgaggcatggaagcatgaaataacctgcccaggtggcgccgtccgcacacggaggaggcaggaacggaacacgcgccgcctcctcgccctccaccaacacggaccccaggggcgcaccctgggtccccgggtccctgtgcgggccggggtgacacacggctgacccccgcacagaccgccccgcttccgggtcccccgggaaggacgcgcgggctcctgcttgccaggttttaacccacaagggttgtagggatttacccaaaggagagcaaggagccgggtctgcccggaaaggcagggg

SEQ ID NO: 552730 - DNA, 2530 bp, Homo sapiens
ttcacaatagggctcgcgctcctatgagaatctaatgccaccactgatctgacaggaggtggagctcaggaggtaatgtgtgcaatggcgagcggctataggtacatacagatgaagctttgcctgctcgccagacactcacaacctgctgtccagccagttcctaaattagcttatttccaccataccaatccatggcccagggactggagacccgtgccctatgaggaactgttactatgaattaggcttagtcttttcttttgttttgttttgttttttttgagacagagtttcagtctgtcacccaggctggagtgcagtggcgcaatcttggctctctgcaagctctgcctcccctcccaggttcacaccattctcctgcctcagcctccagagtagctgggactacaggcgcctgccaccaagcccggctgattttttgcatttttagtagagacagggtttcactgtgttagccaggatggtctcgatctcctgacctcgtgatccacctgccttggcctcccaaagtgctgggattacagtcatgagccaccgcacttggcctaggcttagtctttcagcctgtattttgctgcatatatacctatctgcaaacaaaagatacttttctttgtgtgttaatttctacccaacttggaaaaaatagtagcatctagtatacatctttctgcaacttgctttttaaaaaaaaaaaaaacctcattgcctcctaatatatattgattgagttcattcatttcaaccactttgcatcatttcatcatataaacataccttgattatttatacattccccttttgatgggcattagcttatttccaattttcatattttgcaagcagtgccataatatacagccttttccatgtctcctagtgcatatgtgcaaaaagttctagaccaatgagtacctagaattggaattgttggatcctgtggcatgcttactttcaactttacaagatattgccaaattattttccaaagtggttgcaccatctaggcacagtggttcacacctgtaatcccagtgctttgggaggacaaggtgggatgatcacttgaggctgggagtttgagacttgcctgggatacatagcaagatcccatctcaattttaaaaataataaaaatataaaatatatataaataaacaaagtggatgtattaatttacacttgtacccactccccaaagactattctatgactttttttacttttgcccttacaatgcatatgaagtgctatcttgttttagtttgcattttccagattactaatgaggttgtgcatcttttcatatacattttccatctgtgacttgtctatttataccctttgcccatttttctgctttattttttgtctgttccatattgatttgtaggagttccttatatattctagaaattattcctgtgtttcatatacctgttttttgtccaacagtttggaaaccaaaatatcactaatcatttctggaatatagcattcagttacataggcattaatatcagaaaaaataccacttggttttctaacctaaaaaaatttataaaatagtttctatctttgactctgatacaccaaaaattttacaaagggtcagttactggaccatccragaatagtttatcacgtggtccaaaaaaaacttgatacaatagaagaactttctctcacacttgttttaaacttcctgtatcagtccagttctctccacctcaaggaacaaaaacagatggcacacacgaattaggaaaattggaggaggttttatttacagagggactaattacaaaggggtgagtggggatagcagagccataagagatagtggcagtggaactgtataggaatagggtaaaagagagcttgccagaacccaaaaagagaatggcatagagcaggccacctagacaagagcagtgacattctgttgagagactcagcaacttgtgtcaacctcgcaggaaggaaccaaggaaatatatgccctgaccccatgctcctttctctctccctcccatctcctgcggaaagccagaaggcataggtgcctttgctgtgatccacacaggacagcctcccagaacagaaaattatggataaaggtggaaaatgaatctaaaaggtcaaattgaagaaatccagcaagcttgcctagccaaataacttcagattctataccacacaaaagaaaggcagataaactttaaatgtaaagagtgacttaaagcacttttctgggcacagtggctcacccctgtaatcccagcactttggaaggctgaggcgtatggatcacctgaagtcaggagtttgagatcagcctggccaacatggtgaaacctcgtctctaccaaaaatacaaaaactatcccagcatggcggttcatgctacttaggaggctgaggcaggagaatcacttgaactcgagaggcagaggttgcagtgagccaggatcatgccactgcactccagcctgggcaatagagc

SEQ ID NO: 552731 - DNA, 963 bp, Homo sapiens
gtgtggtcttaattgagttgctttctccatgtgccttgttttacttccctgtaaaatggggygataacaatgggaggacttaacaagtcaattcctgtaaagtgccctgacctagggccttcacatagctggtgctgaagaaggtgtcagctgctgttacgctcatcacacagcttgacgtcgggcctgtgaagcttgctgtatgtcaccattccctttgcccacccgcctggcaggctacactcaaggacttctctcacgatgctactctgcactcaggcaccctcagtggctccccggggaatcctggaggtgttataaaatcactacctggcgttccaagaccctcttcacccaagtcaacttttccccacccccgggggcctaccacacctcttttccagcccatgggactcagctgttcttgtagtggtgcccctgcccccaagtgcacggcacctggaccttcaacacaagaccccaccgcggtcccacctcgccacattgcaaccagctgcgcacagccaccacccacacctgccgacgtgtctcaggcaccatacgtgttgctctacggaagagtgacttcctccagagtctgtgaccacccattccctcccactgccatcctgggctctctaggagctcaggagagggagggatcccacgtggcttctctttggagaaggcgggctggcttgagatttgaagcaggcgtggagtgccaggaggtagggggtctgtctgcaaaggcagctcgtgagaagtcatgaaaacaccgagatcatgtacttccagcttctcatgctaagatgcccaactcgagcaccatggctggatggagccggactcccagggagcctcagcccaggcggaggctcagcaggcagctctctgctgctttctgtatttagtcgtcgttgttttcgctgttgtgggcttttttttgtgttttgttttttg

SEQ ID NO: 552732 - DNA, 561 bp, Homo sapiens
cggcctcccacaccctggtctagggcattccaccctcactcccaccgccctccctctggttctgtccagaccatgccgaccccaaagcgttccccaggagaggcaggcatgagcattgccactcactgttctcactgctcaccttgggcatgcaaagcattcaggtgtcagggccctttctcactcatgaacatccaaagaggcctatgcctgctgtgtctacaccctcacccctgcaatcaggtgatgccctaccacaccatagaagctgctctcaccaggtcaccttcagcctcccaattgtcactctggactctttcacagctgccgcccactccccttggttttgggacacacarccccattccagcactgctccaactcttgtcccagtcctaagtggctctcgcccctgagcttctcctgcaatgcaaaccttctacagatttgtacccttggcctgcaaatccctcctcctcctctcctcctcctcctctccccgcggtcgctctgatccattcaccccatggcttctgagactcctctaggtggaccattctt

SEQ ID NO: 552733 - DNA, 604 bp, Homo sapiens
tgtccacccacagaagaatggttaaataaactataatacgtgcattttatgtacccataccatgaaacattaagaagaagacagatctacatgaactacgtagaaaaatttccagaacatagtatcrggtaaaaataagtaaattacaaacaacagcaataaaacaaaacaaaaggcatggatttttaagtatgtgagtaattttttcgggtgtgggtatagatcattcaaaattttcaagttcaagttcgacagactggttaactatgatgttaacagttaatatcagtattaactatggtaagactagaagaggaagggaaggtaaaaaaggtagaagatgttttgagaaaaagataatgatactgacttaaatatattcctattggatatccacatccagtgttctagtaggaacatgaaagcttagaaaaaggacagatactcaacaaatgcttgttgaaaacatttatacctgcaatggactgaatgtttacatcccccaaaaattcatatgttgaaatctaaccctcaagctgatggaaggaggaagagggagcctttggggggtcattagatcatgaaggcagaggcctcgtgaata

SEQ ID NO: 552734 - DNA, 604 bp, Homo sapiens
tgtccacccacagaagaatggttaaataaactataatacgtgcattttatgtacccataccatgaaacattaagaagaagacagatctacatgaactacgtagaaaaatttccagaacatagtatcgggtaaaaataagtaaattacaaacaacagcaataaaacaaaacaaaaggcatggatttttaagtatgtgagtaattttttcgggtgtgggtatagatcattcaaaattttcaagttcaagttcgacagactggttaactatgatgttaacagttaatatcagtattaactatggtaagactagaagaggaagggaaggtaaaaaaggtagaagatgttttgagaaaaagataatgatactgacttaaatatattcctattggatatccacatccagtgttctagtaggaacatgaaagcttagaaaaaggacagatactcaacaaatgcttgttgaaaacatttatacctgcaatggactgaatgtttacatcccccaaaaattcatatgttgaaatctaaccctcaagctgatggwaggaggaagagggagcctttggggggtcattagatcatgaaggcagaggcctcgtgaata

SEQ ID NO: 552735 - DNA, 544 bp, Homo sapiens
ccaagccttgcattttaaactaaggattttgaaaattaacctgaaagctatgggaagccatcaaaggatttcaaggaggaagtgattttttatttaggttctggtagcagcataaaaaatagattggaaggggtcagactggaggccagttaagccaagtaaagagtgatgtgtgcagaagcaatgggggaagaaaggatgagaccacatctgactggttgtgggcagtaagtgagagggggagagctaggatgatgtcctggtttccagtttgagttccagtaacagaaatggttttgccattcactaagttaaaaaatatagagtaagaagcagatttggggtaaaaggtccccctcactcagaaattggctgatttgtatggcaacagaacaagggaacatgggccgggtgcggtggctcacgcctgtaatcccaggactttgggaggckgaggtgggcggattgcttgagctcaggagtttgagaccagcctgggcaatgtggcgaaacccatctctaccaaaaatacaaaaaaattagc

SEQ ID NO: 552736 - DNA, 564 bp, Homo sapiens
ctttttttgttttctgtgtcttaagaaaagtaatttagagaaaaaatacatgtaaaatgacctttgagtattttatttcagcactccaatgaattgttggtcctccctgggatgcatatcctcattttggagatgactgtgaactccaccgtgactgtaatcatgtccttattttgtgtttcttagacacttgcatcatttattcactcagtcaacaaatatttgaacaccaagtatgtgccaaattctcttctaggctttcagtaacaatcaattcttgttaaatggatgtgcctgaaaggaattttacccgaaatccctgatggtataagttatgtgataagattaattttaaattaatattgctytctttctcctcccatgttctagtttgtttatggaaatgccattcaatatattttgggaaaaaagtatttgttgtttgcagacatttgtttcaatgtcactcctgatggcaaaggagagatttaatgactcagtttatcccaggtattaatcctgattgaagtcttttgttttatttggagaaaaccatgtaagtag

SEQ ID NO: 552737 - DNA, 648 bp, Homo sapiens
tgagccacttacacgagaaacaatggggatgtttatatacgaatacaatttctcagatccacagaagtcctactagatcagaatttctgtaagcatagctggcagatacattttaataagccttcttaggcaattctaagtttgctaacatttgaaaaatactgtattcaaattacttgagagatttgaaaatgtttgaataactttcaggtctttttaacatacatttatttatttatttatttatttatttatttatttatttattagacgaagtttcactcttgttgcccagcctggagtgcaatggtgcgatcttagctcactgcaacctctgcctccygggttcaagcaattctcctgcctcagcctcccgagtagctgggattactggcatgcaccaccatgcccggctaattcttttttgtatttttagtagagacggggtttctccatgttggtcaggctgggctcgaactcccaacctcaggtgatccgccccccatggcctcccaaagtgctgggattacaggccaccacccccggccttaacatttatttttaaactttgtcgaatcaaagaagcactttcaaaaactaggtatcttgtcactataaaggaaagcttgtttatgcttccatatcatc

SEQ ID NO: 552738 - DNA, 690 bp, Homo sapiens
ctcatgtattcaacatgagatatgtattcatctcatgtattcaacatgagattcaacatgttataatatactgtgctgaaagtgaaaaacagagcggctgtatgagtattagaagtacagtatctaatgaatgcatatcacttcggcatcatcataaagctgagaaattgtaagtcaaagcatcataagtcgaggaccgtctgtaatcactgcaggatggaacataaattgcttaacctcgctaagcctcagtttcttcatctgtaaattggggatatgaatggtacctacctgaaaggtagttgtgagaattaagtgagaaatgcgtktatagtgcatgtctcagtactggcatgtggtaagtgcccagtaaatgtgagttgtcagtaccatcatcatactacccagcaactcagggccatggtgtctcctgctgtttggtggtgtttgggaggtgagtgagtgtgagggtcctccaaaggtcacagagctgctcttttaactccccctgacagacacacacacttcagtatctaggactcgggaaaaaggacactaagcagattatgactccatttcgggaattaaatcaaaactcaagactaactcaatttggcttctgacaagagggaaaggttaaaagggagtgaggaggcggctgggtgtgcgttcagaattgcaattggttct

SEQ ID NO: 552739 - DNA, 680 bp, Homo sapiens
aagtcatgtcaaaagtcagccagcaagtaagctgtgatgaaaagatcctccagagaacaatttgcttcccttttacttttcamcatcatagctttgcctcttcttggtaatttctatataaaccaacaaacaaactctggtttttataaaaacaactcagggcatgttgcatgcttacattttaggatgttcgtagagtatgctatcatattttaacctcagagccttctttgagccaaacgggattcctcctaacctctctacctgtatctaaacaaacttcagatgagcacagtctgcagattgctgactttcagcatatcatcatcaacacagcaaaaccaaagattctccaatagaatctttcaaaaccagagaatccagaaagactcggacagcaggactggtggaccgtgaactcaagttgcacctctgatctaacttaatgcttacatatattttcaagaggaaaaactttgagcacacatagtataaaagttacttcctggtccacactgcaatacttttctcctactctcccagaaagctagagaaaacctttttaacaaataatacccagaaaagactttctgcagaagtactattttcccagctcaatgtcacaattatttagtgtgttgagcactatatgtcttttaatttcctataatccctaccca

SEQ ID NO: 552740 - DNA, 654 bp, Homo sapiens
gcttttggtcacatgcaccgtgtactcccacagaacacacaagggatgaaggcctgacctttgaaggcagcacggaccatgatgaaaagtaatttacaacaacacactcattattacatcctcagatgatgagcttggagctatgcattttagatttttcccagtgtctgaggtcagttttgttttaggaagcaagaaagttcaggaagaaagaaaacaaagttcagaaggaggcaagattaaaaagaaaagaatacaacactaatgctttaataatagagtcaaaaattcatgaaataaatgttacacgtaagacagtataaaactggtaagaattctgtttttaacatttatgactatcstaacagatatagaaacatatcttcactaaaaaacatgcacaaggaatgtttgtagcagtcctattcataatagcctcaaactggaaactattgaaagtttaccaacagattagatattttgcagtctatttatgaaatgaaatactataaaacaagcatgaataaactattgctatatgcagatacacagacatagtatagaaccaaagaaagcaggcacatggaggagaacttagtatatgattctatttacgtagaactcaaaaatgcacaaaactaatctatgggttag

SEQ ID NO: 552741 - DNA, 535 bp, Homo sapiens
gatcacctgagttcaggagtttgagactagcctggccaacatagcgaaacctcatttctactaaaaatacaaaaattagccaagcgtggtggcacacgcctgtaatcctagctactcgggaggctgaggcagaaaatcacttgagcctgggaggcrgaggttgcagtgagccgagatagtgccactgcactctagcctgggcaacagagtgagactccgtctcaaaaaaacaaaacaaaacaaaacaaaaactaggcccttgccactaatcctgaacactgggtactgaagggagttggggtgcgaggaggatctaacagatttctagaattcctttgggagcttgagcttgacaagtgttgcaagacccaaaggccatgactgagagtgcccagggctgagacatgaagcaaaacccagggtaagtaggcatctcattaggcaagtctaatttagcatctttcacatcattttttgtgtgattttttaaaaaactatgttagagaattacagtggtgctgctgctgctgctgct

SEQ ID NO: 552742 - DNA, 1258 bp, Homo sapiens
ctcagctcagctcactgcgacctctgcctcttgggttcaagtgattctcctgcctcagcctcccaagcagctgggagtgtgtgccaccatgcccagcttttttttttttttttgtatttttagtagagatagggtttcaccgcgttggccaagctggtsttgaactcctgacctcaggtgattcacccgcctctcaccctcccaaagtgctgggattagagacatgagccaccgtgcctggccagaagctgtaagctttctcttggctaaaagtgcttctttcttgtctctctgggtcactgttgaatacatagcacatagtcaaggctcaacaagcattttctaaacccataaaagatgcatctgttgtgtgaggccttgaatgctgagttcaagagtagagcgattcaccgagaacttcacagcagggcaatacccagcatgatgagagaagtgcttgtgttatctgagaaaaaaaaaatatcccaaaggatttcaaagataataatagcaaagtaaatttcaagagtggatctaaattcaccaaccccggtgaaagctgaaaattaccatcccagctggtggaaatgtcaattcaaacttcgtttataaaaccatttcaggctctgattgctaaattattatttcatatgagaaggagcattgtctggataaaaaacgattgtgaaagtaaaaaaaattcaatttactcaatatccccctccctgaaaaaaaaattctttttaacactaaaagttatgccagataattgcagatataaatatcacttagtgcagatgttgtgtataaaatgtaattattactcatggaaaatcaatggtggcaaatgataaaatccatgattggagtctttctactgagcagaaatggattagcgcttgggctgtggtttatgcactttttaattggaaatgatctctaactagaaatggatctcgacacagggatgaagcagctgattgcaaataaagatgtaacaaaagccaagctctctggaaatgcagggagttcagtacagaaaccatttccccatcccatcccaaacacgtctcctcctcactctccctcgtttattgggcgtttgcttgctatgatccagccctgtggccgacatctgtgactaagagagagagaaaagcaagcttcctcctaaatgatgcctgataacaagtgagtaagtgggataaccacggagtacgaccgagagatgaggaaagaagatgtgactagagagacc

SEQ ID NO: 552743 - DNA, 635 bp, Homo sapiens
cacgcaaaatctcgtgctctttgccggaaatctcggcccttagcgggcgggcgccaaggcccggcagagccagttccggagcggccccaaactccctttcccagaatgcctcggtttatttgcatcgtttggtcccggtgacgtcagctgagtgaggtcgtgcctcgaccaatggacagcctcggggtgttaggacctggccatataaggtaaacaaagctggtcgcccaatgaagaggcggcgggggcgggcgctgggccggggaggccgggggcggagccgggggcggggcgaccgggcggtgtttacagaccggcacatggcgcttccggttgacgttgctgacrgctagtgaggctttagcccgcttcgagcgcccgggggcggtaaggcgcgatcatagcagctctaggtgaccttggtccggctccttgcgccccctggccccagcctccttcgttgagacactatttgttgagtctttcctcttttcctggccctgacctagcgtggggcgacagaagagcaatagccgggtgggggctgtgagaacggctggggttgggagcgaatttcggaaacccggaggacgagtatagccttgcaagatggaaaatgccctcccgggctggcg

SEQ ID NO: 552744 - DNA, 552 bp, Homo sapiens
ggggacgacaatgagtggcacagaagattgacatgttagcttatacgcctacataattctgttaaattttaaaaatagtagttatgtattactttcacaattaaaattacaaacacatttttttcaaaataaatattttaaattctaggtccttaacttagtaactgacaaattaagtaaaagcctcagaattaaagttttacatacctgcaacttytaattggcttctaggaaagaacatatgaaatctacttttcatgccaatcaagttctgcccctcccacgcacaagggggaatttgtgctgggtgtgaattgacatatttcacttgctaacactgaagcatttggctttgattagaatccaacttaaatatttactttatattcacaaaataatgagaaatgaaatgacactctggagattaaaatgcatattcttgaacagagagggggaggattataacacatgactgaatacaatcactggatttaaaaaacacagaacaattcctgttgaattaaagccccacataccagttccctaactaaa

SEQ ID NO: 552745 - DNA, 895 bp, Homo sapiens
aacattaggtttttcctctcaatttctcatcgaggtatagtttaccaacagcgaaatacccatattttatgtataaagtttgataagtttttcaaatgcttacaaacccctrtcatgatttagcacattttcattacttcagaaagttccctgaggccctcttccagctaatccctgttggttccactctagtgatgtctttcattataaattagttttccttttaaaaaagaccgagttttcaaatgaaataaggtgcctaaagtgtttagaatatttcttggtatttaataagtactaaaaatgactttggttattattagtatttgtgcacagagttacaggctcagatgacagatgcactgcagccactagagaagaatatgagggaaaattcaaactgacaggaaatgagttgcatataaaacattaagaaggtaaagaggaagattagaatatttaagttaaagcaagatattttttaaagctcattgaatgccttctagatgttagcattacacaacaagtttatgttattttatcttcataatactctaagatatttttatcccctctgcacccatttagcaaatgaaaaaaaaaaaaaaagaccagagaagttaggtagctttccaatgtcacatagcaccattaagtaataaagctgagattcaagtatctttccaactctgaagctccatccattctaatagaccatcatgagctctatattaaaaagcacataagggaaaggaaaataacattgattgggtcttaaaatggaaagacattaagcttggtgctttttgcacattatttcattcaattatcagtgatgttattttttccccattttactcttgtggaatatgcaatatagagaagttgagcatca

SEQ ID NO: 552746 - DNA, 667 bp, Homo sapiens
ttctgtgcaaaagcctccaatggctttctttctcataaaatctagggtcctacaatagcctaaaggaccctagataatttggtcttctagttctcctgacatctctttctactcttcctctagtttaatctcctttagtaatattggtcacttcactgttccttaagcacgaatagatacgctcctacttcaaagcttttgtaattactattctctgggttggtctagctattcttctagatagatgcaaggctcgctccctcacttccttcagtgtttattaaaatattatcgttacaataaagcctttcttgaataccctatttaaaattgcacccctcatcctaagctctctttatwctttttcccaacttacttttcttaatatttccccgaatctgagataacatatattacatacataataatatgtgcattatatatttttgaatttccttgattcaaagacacagaaatttatatttatagaacattttaacatctctgaaatgaaaatgactcacaatggatggagtcttattttaactggtagcatgctttatggtgatacttgaaataattatgtatttaaaaatcactggcattttagatttaattaaatattcaattaaatgtggcaaaacatttattgtttatttctcccgat

SEQ ID NO: 552747 - DNA, 601 bp, Homo sapiens
agtagctgggactacaggcgcacaccactatgcctggctcatttttaaaatttttattagagttgaggtctcgctgtgttccccaggcagactggtctcgaactcctgagctcaagtgatcctccaaccacaggtcacaaagtgctgggattatgtggtataggcatgagccactacacctggctgataatatttctaacatactgaagactcatattagtaagataaacagtgagaattcacagaagttctcagttggtaatttttaaaagaaagacttttttttttttttttgagatgaagmcttgctctgtcgcccaggctggagtgcagtggtgtgatcttggctcattgcaacctccacctcttgggttcaagcgattctcctgcctcagcctcccaggcagctgggactacaggcatacgccaccatgcccggctaatttttgtattttaagcagagatggggttttgccatgttggccaggctggtctcgaactcctgacctgaagtgatctgcccgccttggcctcccaaagtgctgggattacaagtgtgaactactgcgcctggctatgttttgacttttaaacacatgaa

SEQ ID NO: 552748 - DNA, 1011 bp, Homo sapiens
tcctgctcttgttcttctttccttttttaaatataaaatgtatacatataaagatgtataaatatgaaggataaaatccagtgagttttgggaagtgagttatacccaggtaattcacactcgtagcaagatatagaacatttccatcaccccagaaagtttcttcacattccttctcatcccctccagaggcatcctctattatgtgtttttttcaccataacttagtcgtttgtcaacatattcatataaatgaaatcatacaaatgtactgttttgtgtcttatggctcaacacagtgtctgtgaggctcatctatgtcattgtgtgcatcagtttagctcctttttaactgcttcccctgccacccatgaaagagtcaaagggtgtagtctctgaagaagtgggaaccatcccccaatcagaggactgtaattcaagaatggaaacgatgaggcatgaaggtaaaaactgagaaatgaaggagaagtctgtgtactgaaagtgagaatttttattgatgagtaatatttatttcattgtgtgagtataccccagtttttttctttttttgagacagggtcttactctgatgcccaggctggagtacagtgccacaatcatggctcattgcagcctcgacctcccgggctcaagtgatcctcctgactcagcctcttgagtagctgggactatkggtgggtgtgcatcaccatgcctggctaatttattttatttttttagtagagaaggtgttccaccatgttgtccaggctggtctccaactcctgagttcaagcagtccacccaccttggcctcccaaagtgctgggattacaggcgtgagccactgcacgcagccacaatttgtttattcattctcctattgatggacattgggttatttcttgtttcaggctatcatgaataaagccactatcaatattcatctacaaggctttttttggaaatacattttcatttctcttgagtaaatatgtagaagtagaa

SEQ ID NO: 552749 - DNA, 1088 bp, Homo sapiens
cagtcctgaaaagcagtcatggaatcttgttttctacctcaagaaaatcctagagtacatctgaacttacacctgagacaaccaggaaagcccccagaacaaacacttttagggaaagaagtctggtgcatgggtgatgccattcatccagacagcccatccaccagccacacacaattgtaggcaaatttattgagaacttcaccatgaatacacaagctcacacacacacacacacacacaggtttgttccagtcacacacacatttcacctcagttctatgaacctaaatttccagttttctgcgcctaccccaatatctacttttactctattaagttttgtcaacacttacaagactctcctggttttcttagaactcagatatcctaatattagattttcaaaataaaacaaaattcaccaagattgtgactaagtagtagttatccacattcagaggatgaactggtccacaaatatctaactcatccccgatttctttccttgtctttcattaattgcttccattaccccaaccccagcctgaagaggtgttatggcccagttagcctgagactgaaagagtagacataaaagcctcccattaattctctgtcatagattttttaagcttgaataatgtttaaaagataaaaaaaamctcccataaaatcctactgttgctctacattatttttattgtgttacttcaaaatgaacagatataaatttcccatacatatagctcttaaattacttcaaaactcaagcaaagctgcaaattaaaaacaagcaaacatacaaaagccactagagttcatatagaaaacatcagtgtgataaatgatattttgctggaactaaattgctggcgttgggtttaatacacctactatttgtatgttttatgcttcactttctgtcctcttgattcttttgactttgaacaatactggaagcataccttaagtctttcttcaagttatcgtaggattaatcgtttttggtaaataagcttgtttaactactaatccattagtttgaggggctgataaatttaatagtgcaccacaataagtatata

SEQ ID NO: 552750 - DNA, 570 bp, Homo sapiens
cagaggaggtcaggtcaatgaagatctcaccattcagctcaagcctccaggcactttgaggtagctttcattccataattaagaagctttgccagtagacattaaattgttctagttgaatttccaacctagcccctatgcaaaaccatggccaaatttgatggtttctccataatcagaaagtgtgccttccagtatctattaattgtatattttatcctgggatgccacgctagaaagaaacagggtcttcacaacatccttgtttattgcctctgcagtccactctgttccaggctggttcacgttcaactggggctgcttagctaattcacaaagtagtagattccaggcctctggtcaaaatacaggcttctgttgttttactctaataatagaaacaaatatttgtttctatttggcacttaatatatgctgaaatcctcactgcctacctgccccagtctagggagaactggcagagctaaagcccatggaagcagccatccctggtcagaagccaygcaaggagctttcacctctttggctctatttttacattttcagggt

SEQ ID NO: 552751 - DNA, 661 bp, Homo sapiens
agaagcatataggtgatttgtaaaactaatctgtctctactttttgataactttgcttaatgtgtcagaattacataattcctaatttatctaacttactccactatcaccttttgtgtttgtcctgatcatattttacctttgttctatttttcctccctccctcccttccttccttctttccttcctccttcttcttccttctttccttcctccttcttctttccctttcccttcctttctttcctcctctctttctttcttctttcttccctttctttctctttctttctccttccttcctttcttctttctctctttctgcctctgttttattgacaaatttgttttctccataatattcattgttattaaaatttgggaggaaatttgaaaagaattcattgtaattctattatttattggttacctttctaattgatacatatatttaattttgaagtctaaattattyagtagcatgcttcctacagttaagaaaaatcattgtttcatttattagtcacttaaagttcctttctcaagccgtcccacattccttgttactattttaaaaattagagttacacttttttttaacagtcaattttatcagcatattttattattatagatgcatccattccattgtttcctcaat

SEQ ID NO: 552752 - DNA, 661 bp, Homo sapiens
agaagcatataggtgatttgtaaaactaatctgtctctactttttgataactttgcttaatgtgtcagaattacataattcctaatttatctaacttactccactatcaccttttgtgtttgtcctgatcatattttacctttgttctatttttcctccctccctcccttccttccttctttccttcctccttcttcttccttctttccttcctccttcttctttccctttcccttcctttctttcctcctctctttctttcttctttcttccctttctttctctttctttctccttccttcctttcttctttctctctttctgcctctgttttattgacaaatttgttttctccataatattcattgttattaaaatttgggaggaaatttgaaaagaattcattgtaattctattatttattggttacctttctaattgatacatatatttaattttgaagtctaaattattcagtagcatgcttcctacagttaagaaaaatcattgtttcatttattagtcacttaaagttcctttctcaagccgtcccacattccttgttactattttaaaaattagagttacacttttttttaacagtcaattttatyagcatattttattattatagatgcatccattccattgtttcctcaat

SEQ ID NO: 552753 - DNA, 764 bp, Homo sapiens
atttccttaagtatcaagtaatctgtattttgcaaaaatgattattgcagagagaaatttgaaaaaagaatatttcagcgatcaaagtctctccggggacaggttaaagaaaccgaagatcataacagatgtttttagctatctagttagctagggctatgatgcaaataattgttactgccattatctttgaaaccagatgtctgatgtccccatgagagacaacaaaataataatgataatggtatagatgattttcaagcctattgctgagttacaacttaatattgatttttgcctgtatgactgctgacaggcatgccaaaatgttgagaccagaaacactttttttcctaaattttgctggaatatcatttacaattaagacctaatttattattagtgatggcttttactgtcacaatatgctaataagattacagaaataggaatagagaaacaagaatctctccagaaagtctctgtcaactgatttgagcatgaaaaactgttaaattaattgcatgacatgtttattcaaaatttcctctgtggaagcagcctagtgcctggcagtatttttgttactctaattttttggttaggttcagaaaaagaatgaggtttktagtggaatttcttcagaggctcaattcattttgaacatggcacactgcctcctgtttagcaagttaactggcctgaatttagcagagcatctgccaaaggacaaaggtttccaaaggcataaaggcctttggaaa

SEQ ID NO: 552754 - DNA, 1320 bp, Homo sapiens
tggaaaaaacctgcacttttctgcacatgtatcccagaacttaaagtataatttaaaaaaaagaaaaaaatactgattttaaaaacgaataacttaaaactgccacacgcaaaaaagagaatcaaagtggtactcaaaacattttcctttccttctgaagattttacgatgcattgttatcattaaccagtcttctactattaaacttaaatggccagtttaaacaaacagccctgataccattcctccaccactgattaaacccggggtggctggtattagggataatattcatttagccttctgggcagactaggtgactttgccatctccagcagccttcttgtccactcctttgatgacacacacccacagcaattgcctgtctcatatcatgaacagcaaagccacccagaggtggatagtctgataaactctcaacacaaatgtgcttgccaggaaccacatcaatgatggcagcatcaccagacttcaagaatttagggccatcttccagctttttaccagaacggcgatcaatcttttccttcagctcagcaaacttgcatgcaacgtgaaccatgtggctatccagtgcaggggcacagccagcgctgatttggcctggatggttcaggataatcaccggagcagtgaagccagctgcttccactggtgggtcgtttttgctatcactagcaacattgccacaacaaacgtccttgacagacacattgttgacactgaagcccacactgtccccaggaaaagcttcactcaaagcttcatggtgcattttgacagattttacttcagttgtaatattgactggagcaaaggtgaccacyataccaggtttgagaacaccagtctccactcggccaacaggaacagtaccaataccaccaattttgtagacatcctggggaggcaggcacaagagcttgttagttggacgatttggtggtaggatgcagtccagagcctcaagcagcatggttccactgacattgctatccttacgggtgactttccatcccttgaaccaaggtatgttagcagttggctccaatatgttgtcaccattccaaccagaaattggcacaaatgctattgtgttggggttgtagccaattttcttaatgaaggtgctgaattgattgcctcatatctcttctagctgtagggtggctcagtggaatcaattttgttaacaccaacaattagttgtttcacccccagtgtgtaagccagagggcatgctctcgtgtctgcccattcctggggatgctaccttcaaattcaccaacaccagcagca

SEQ ID NO: 552755 - DNA, 474 bp, Homo sapiens
gcctgggcaacagagcgagaccctgtctcaaaataaataaataaataaataaataaataaataaataaaaattcagctcatttttatattttaaaatgaactcgctgtttttaaagctaatagttttaacaggccaagcccaaataacaaaatttgcatcagactgttttttagtgggtaacatatggagaccttgtggtgtttctctgtcatcttccctgaaatttctcagagctttcaagtttaattttggtcttcgtttcagtaaaaggcaggagcagggcaatctttatagctttatagcttaaggttagccttgctaaccagtggttaagtgagagtgagacagagggcgagatgtgatgtggyagggggagccttctttcctggctgagtgaagggaagaaggctttgaggtgatactagtgtagtagcatatttgggctctcgttcagctgttggatagcaagcttc

SEQ ID NO: 552756 - DNA, 474 bp, Homo sapiens
gcctgggcaacagagcgagaccctgtctcaaaataaataaataaataaataaataaataaataaataaaaattcagctcatttttatattttaaaatgaactcgctgtttttaaagctaatagttttaacaggccaagcccaaataacaaaatttgcatcagactgttttttagtgggtaacatatggagaccttgtggtgtttctctgtcatcttccctgaaatttctcagagctttcaagtttaattttggtcttcgtttcagtaaaaggcaggagcagggcaatctttatagctttatagcttaaggttagccttgctaaccagtggttaagtgagagtgagacagagggcgagatgtgatgtggtagggggagccttctttcctggctgagtgaagggaagaaggctttgaggtgatactagtgyagtagcatatttgggctctcgttcagctgttggatagcaagcttc

SEQ ID NO: 552757 - DNA, 507 bp, Homo sapiens
cttttctcaaaaaaaaaaaaaaagttaactaccagaaaatatatatgcaattaccaatagtgaagaaatcataagacatacaaacatatcccacagactaaagtttatccagaaacaaaagactgaagtttgttagtttttaaatctcctagagtaatttagagcattgccagttgcagtggcttgtatctgtagtcccagctacttgggaggctgaggtgggaggaccactttaggccaggagttctagactggcctgggcaacatagaaagaccttgtctccccaccaaaaaaattcagatcattactagaggtaataaagggtacaataaatgttaaataaaacaatartaaataagcaatgctgaaaataagtggaaaataaaatccaaagcataaataatttaaacagataaagtatatgaagaaactaaaaagtataaaaatactgcctgtcaataataatggaggaaaaaactagatgaaagcatttgtaaatcttaagt

SEQ ID NO: 552758 - DNA, 927 bp, Homo sapiens
cagtatataatgttattaataatagtcttcatgctgtacattagatctctggacttattcatcctacctaactgctaatttgtatccttgacctacatctctccgttttctcccccatcccyaccccttgtaaccacagttctactctctatttctatttattctaccttttctctttttagagtccacatacaactgagatcatatactatttgtatttctgtgtctggcttagttcacttagcatatcctccaagtccatccatgttgtcacaaatggcagtatctcctcttttaagaccgaataatattccactgtatgtatgaatcacaattgctttatgcattcatctgtcattggacacttaggttgtttccatatcttgattattgtgaaaaatgccataaagaatatgggagtacagctatctctatggagtgctgatttcatttcatttgtgtatacacccagtagatggacttaattttaaaaactgatacttttaattttattaaagagataaattagttgttaaataaatgcagtaaaatgtcatatatattttttccaaaaaatacatattaaataccttattaaaattgtagattttaattcaataaaacatttttattaactttaataaacagtcatccatctactttttctctgaacttgtagtatgggtttctgaaataatttggaaatattgaggtccacttgccgatgaacttgcttccttatttgcaaaatatgataatgaattatcttaactgccaggacatgattgttgtgactataatgtgacagattatagagaaaggcctaaataaaagaaacatcctacagaaatataaagcattttatcacaaaaataatcaaatatttgttccatattttttgagaatcaaaaattattaatcaagaag

SEQ ID NO: 552759 - DNA, 601 bp, Homo sapiens
tgctctctaaatatttgtccagtgaatgaatgcatgaatcttagaaataaatatagtaatatcttaggtatctggaatatctgtagacatgttaagtgtaaaaactatgyaagtataactttagcagagcattttaaattaaaattttaaaaatgtttagaagtcacactttcatgttaacaaaaatataaggtaattctagaaaacagaatttgttttataatttcacatatgttaagtaacaattagaaataaagcttaagtagaaacatgtaaaaaacaatgattggtaaattagaaacacctacagtttaatgataaattcataaacctcatgttgttttcatatttttagtgagccaattaaatctaggcttagtcttggttgagttatgaagatcaggtttgtggagatattgaccaataagtcgcaaatggttaaaatatccatagttctttcttgctccaggcaccgtgctaaacagaagaagatgcacaggaagaaaatactcaagccccagtctgtctccaagaggacatgcagccctattgtaatagttcctcaaatgtagtaggattagaattacctgagtaatttgtt

SEQ ID NO: 552760 - DNA, 1098 bp, Homo sapiens
aaggcatgaaaggacctgcagccacggccccatacgtttcaagagaggcaaggctttcaccctccgtgtctttcacagccatccgcccacagcctcttaacttcctgacattaaacaaaaacgaaaccgaggtttccctaattggggatcatcatcaagaatctgtcatggggtctcttagaaattaattcaactcgattgttcttcagacctccgctaaggagccggcgtgttactctcgacaccaacttgtcccatcttcatcctatattagctccctaacagggttgcacgatcagctcctaggctgcaaattagaaaaatgggcgatgattccagcagctacgcctcggcactctcacgccggattactgtgatggtctccttgcaaggcttccggatctttctatgtgggttgaaattggttccaactgtaacttcctgttgatctcccaccctgaattccctcattgatgcaacattttgttaaaaaagaacttcaccgaattacccatttcatggaaattgcaatagggtattgacttgtatagttaatgaagctttcaaaaaagcactcctgtagccatcatctaaatgcccctctggccaccaaaactgtgcatgtaattcactgtagtgaggattcctgagtctccctaagggagatccagtaggatcagttctgggtgggatccgtcagcaaacacaacctattgcccgcctccttctggtttccagtcccggggggtaattgatgtcttagtgcacacagagccggaccatggagctaagtagatatgggtttccaactcatcccggccacttcccaggggcatgtccaggggcaagttagtaactctcttgaacctcagtttcctcatctgcagagtgtggatcatcacaaacctaccttctggggttgctaggggattaaaggagataaggagcatagcagggctggccctgtgcctgcctggagtgggcaccaagctgacttcgctggggctctcccggccccacatacctgcaatggttttgcctttggctcgatgtctgaagcctttgcatttctgaagggagtgatgtaaatcaakccat

SEQ ID NO: 552761 - DNA, 396 bp, Homo sapiens
gagcagagagaagtgtgtaggttcctggcagctttccggacccagatcattctaatggctggggggagtccacctcttataaggcctgaaacttaatacaatttgagggaggccctcttttttaaataaatagaaaattatgggtacaaatagaatatttatttagaatgggaaataaatcaccaaaaataacacttttttttttttttttttttttttttagatatagtcttgctctgtacccagatgggagtgcagtggtgccatggctcacctcagccccaacttcctgggctcaagtgatcctcccacctcagcctcccaagaagctaggactacaggcackcaccagcacacccagctaaatttttttgtttgtttgtttgtttgtttttg

SEQ ID NO: 552762 - DNA, 396 bp, Homo sapiens
gagcagagagaagtgtgtaggttcctggcagctttccggacccagatcattctaatggctggggggagtccacctcttataaggcctgaaacttaatacaatttgagggaggccctcttttttaaataaatagaaaattatgggtacaaatagaatatttatttagaatgggaaataaatcaccaaaaataacacttttttttttttttttttttttttttagatatagtcttgctctgtacccagatgggagtgcagtggtgccatggctcacctcagccccaacttcctgggctcaagtgatcctcccacctcagcctcccaagaagctaggactacaggcactcaccascacacccagctaaatttttttgtttgtttgtttgtttgtttttg

SEQ ID NO: 552763 - DNA, 2231 bp, Homo sapiens
gcaaggtttttaacaacaacaacaaaaatgtcagcactgtcattgtaactatttagacagcttgaatgggacgaattgttttattttgtgaaacaggagaagggtggctgggaaaggggaggtgggaagtgatgactcctatggcacacaggtgtatgttctcaggcaaatctgtctttgaatttgaggttgtgtatacatattcccttaaaatgatgcctgtgcgtcttcttgaaagtcttcctctgttacccgagctggaatgcagtggcacaattatggctcactgtaacctcaacatcctgggctcaagcgatcttgcccctcagcctccagagtagctgggactgcaaagcacgtgccttcatacccagctaattttcatattgtttctagagagggatgttacccaggctagtcttgatctcccaggctcaagtgatcctccttcctgggcctcccaggcagtgtgggattataggcatgagccaccatgcctggcctcctttatatttatttttaattatttatttattttttgaactggactctctctctgtcgctcaggctggagtgcagtggcacaatcttggcttactgtaacctccacctcccgggttcaagtgattcttctgcctcagccccctgagtagctgggattacaggcgcccgccatgacatccggctatttttttttttttttttttttgtattttcagtagagacaggattctattatgttggccaggctggtctcaatctcctgacctcaagtgatccgcctgtctcggcctcccaaagtgctgggattataggtgtgagccaccgcgcccggcctctgctactttttaaaagtctatctccagaagtctgctttctcattttgaataccgtaggtattcaaatgaattcactttcaaatgaattcactaggtgctgttctacccttctgttagccttttacgaaagaatagcgtgaccttgaaaagcatacatttatgcatagtagtagtgtatgcaggtatatttatttatttggttggttggtttttttattttttatttatttatctgttttgagacggagtcttgctcttgtttcccaggctggagtgcagtggcacgatctctgctcactgcatcctccacctcccgggttcaagcagttattctgcctcagcctcccaagtagctggagttacaggcggccgccactgcacccggctaatttatgtatttttcagtagagacggggtttcaccatgttgagcaggctggtctagaactcctgacctcgttatctacctgcctcggcctccgaaagtgctgggattacaggcttgagccaccgtgcccggtcacaggtatattacgatgttggtacactttgtattcacttggactacattttgctagagatgatacctgtgacacttctctgtgctctgcgttcctctcctgcactcgtaacagatgtatcttgctgtctatacggaacctaaaaatcytccacagctagcagcttctactagttgtttggaactagaataagaggtgattctctgtgataacaattttgttagttttcttagtttgtttatatctttgctctttttgtagtttggattttctaattactttattaatgcaatttccttttgttaaactttattgtccttaaaccagcttggagacgtgctgggagataattttccatgggtctcacactttcctgtacgttttgcgaacagaggctgtgactgcctttgttcttttctgtcttttcaagattatttctatatacagtgagtagctttggaagatgctgtagtgacttcacagcagcggtcaggtttgcatatctccctggaaggtagagctggtatctcccgctagtgcaaagggataggcgtatttcccatgattaaagattccagctcctgaaggttagggtttctctcctataatgcaacacactgcatgtgcaggtggcctgtggccctattcaggttgctctgtgacatttgggacttggggaactagagcccagtggtcacaagataatgttgatattctggctgcccctgttagtgtaagtaataaataccttgtctctcacccaggagacttctttcctctgccagcattttattagcttgtgacaggctaacttgttagtttgaaagtagtgtaaatctcagatccttcacaggtcttgatagtatgtaggt

SEQ ID NO: 552764 - DNA, 623 bp, Homo sapiens
agattctagtgatgtcttatggactaaggaaatccgtagccccactgctagaaaaamctttgcagttttatgtccaattgagatgggtgaaggcaagccttattggacctttctgagaaggggcaggggaaatcaagggaaggggctctgaagctggttcagcaggctggggtcgaagggtgacggaccagacagcgaggaagaggtagcccggcactgtgggccaagtgtttattctgggagaaagggtctgagtcccgtttaggaaagcggtggtgtgtccatcaaggtggtaggttagtgacacatggcagcagggttctggtgcaggctcagatgtcaggcagtggagcctgtatcaggcctcatgtggctggaccatctaggggataagaatcctgtcctggggtgtagagtgttagaagaagctaggctgccaccatctgctggggttcaaaatagatccctagactagaaaagtattagctggaaaggcctggaagaagacaggaaaaataaagcagtacgttttgatccaatgtatctgttttcctcatgataccttgtgtgtttatgtatccttaacagtagtagctatcgttctctgcaaaattaacttgctt

SEQ ID NO: 552765 - DNA, 726 bp, Homo sapiens
agagaaaacaataaaataacttgatacgaagacatgctaaagtatatgccaacaaagcagatggttataattcaaaaagtggattggaacacataaaaacagttagatacattggttcatatacactagttgcaactcatacatcactttggaggataccatgaaaccaacactctattctgaacagtagtaaataaagggaaataatcatatatttatccttactatacacacgtaacattatatagtgaaataaacagttcataaaacagcatttatgcgtaccatatgtcatacattttattttcctatcttttaaattttwtttcttcataaaaatgatttcatgatgctctaaattgttttcccactgccctaataagtaacctgagattaaaaaatgatatatttatcccaactcttaaaatttataaatattcaaatgtgatttaataatttatgtatatttagtcaaaataatttgaaaatatttagaggtagtagaatatggatttgtctaaataattaaataaaaatgaataaaataaattaggtctacttctggagattttaatccatcaaagaaatatagaagggaattacaataaaggcaaaagttcctggattgcaaaataagaaaagaaaataaaaaaaaaaaaaaagaaccttaaattaattaattcaccagtgacacaataaacctgtgaagattccaccaaatatgac

SEQ ID NO: 552766 - DNA, 546 bp, Homo sapiens
tctgccacctcccctgatgtttatgatgtcacccatatttgctgggatctgtggggtccaagagatgggggagggggccctgaatcttctgagttgaagctgacagagctgaactgaactcaagacttttctgctactcagtagaaaacggaggttggaaaggaagcatgcrtatagtaggaaagtaaggtggtggttttggcacacctgcgtgagtggcctgaacattcacacccacaatccagggctgaatgagggacagtgaatgcagcctttggtggggtggctcttcctccccgtccctggtcatgtgatgggcactggtgtgtacctgagcatttcctcctcgctctccctcctgggggtaggtgtcaggggaacagagagggctgggtgagtggtgaacacagccatctatcttcctgctccccaagtccccctttggtgaggatgttgccaggagcaggcaagagctgggagggcaggtagtgatgactaggaaggaaagaggcagtcccgggtgcctgggtgacctggtggccagag

SEQ ID NO: 552767 - DNA, 567 bp, Homo sapiens
atggaacccctatttacagctggttgatcagaagtaggagaggcttggaagctgcaactgacatagaacatggaggcagtcttgtgggactgagccttaacttgtgggatctgacactgattccaggtagtgtctgaattgaattgaataggacaaaacaagctggtgttggaggattaactgctgtgggaaaaaaccctcacctcacagatttggtattggaagtgttctatgggcagaaacagatcatggtaccctccacatcatcacctttaataatcttttamtagcgtctttttcccatgattttttaggcacagaatattagttctttttttttgagatggaaaagacgcaagatcagcattagtttattctctttgtaaatattaactggctcttccttaatgtattcatctctgctttctggcatacattaccctctatggtcctagaaagtaatagtcagtgctgttattctcagcaaaatagcaacataataaaagctgtcagcataataaacatgcaacagaggacaaccaaatttgaggcccctctttttattat

SEQ ID NO: 552768 - DNA, 560 bp, Homo sapiens
gtatgtgttccaataccttatccagtaccttttctctcttaaatatctttgcatcatcatttcaacaacgattatgytaacttattacttgaaaaattgttttgaaggcaacaccattggaaaatttcctaaagagaataatttctcctcctattcctgtccaggtatgatgctctggaccaaggacatcagcttgagaacaataggaatagttaatgcaagtagtttttggggaaaataaagcattttaaactcaatttttctgagtaattatctatattatgtgaattactcagataaggacttaggtctttgaccatgtggaactgaactttaattgaaaatggagtgttaacttctgctgagtccttcttcccctgccagcttaacatgcttagggagatgagatcataaagtattgtgaccatttctccgcacagtttttcagatcaacattatgaccaaagattacatttctaagtgttttgaagttgtgcaactatgagagaaaatgttaggttgaaccacaaaaatttgttttgtaaaaaatgatcaaacat

SEQ ID NO: 552769 - DNA, 638 bp, Homo sapiens
ttttataagtaaagacatgggggaggaagtgaggatttgggagatgctcagagactagtggctagaggaaatgacttgctgtggaaagaaagaagttggaaaggaagatagcaacctgacagtgagggcttgactgtaattatttcgcacacgattttctatctcataattggtctaatataccaagtgtcagttttcgttgaacaaaacactgaaataatggcacttaaatgagatgaagtcagtgttaatagcttttgaaaagcgtatctgttagttttctcagtattaaatttgcttgtctgacacatcattatttattaattagtgatgaaagtactctaaaacttctaaggaaaaccttcacagattgacaaatcagaagtcaggcattccttcmtttctaaattttaagagtcccctaccactccccccgtattatttgattcacatcggcaaattttcagcaaactcaaagtagttgcactatgtcgcattctttcagttggaggggacctagaaggagtggtgtgatcacagaaagtacataaaggcaacactgaaccctgatgtttttggaataatattcagtattttgtagttactaagaatttgagagatagataacccactaggca

SEQ ID NO: 552770 - DNA, 441 bp, Homo sapiens
ggggaacatcacacactggggcctgtcgggggggtgggggaacaaggggaaggataagataaggagaaatacctaatgtagatgatgagttgatgggtgcagcaaaccaccatggcacacgtatagctatgtaacaaacctgcacgttctgtacrtgtatcccagaacttaaagtataatttaaaaataaataaataaaaggtcagagcccactgaaaagtaaatatgatctattaattagctattgggttatggttccttaaaccccgaaagtctaagatgttaattaggcctggccctgcctgtgtatggtttgtgtcaatgtatatctaaacacagtggaatggagtaaaagtagctctatctgagggaagaggactgagaatgagacaggagttgataaaggagagcaatgtcaatttcaccaggctgacctggaag

SEQ ID NO: 552771 - DNA, 1042 bp, Homo sapiens
caatattaaggatcaaaatagtgttcgctggatactctttcttttgattattctgaaatttccagagtacacattaaggaaatatttttcctgagaacttattttaccttaagtgacaacttgttaaaagttaatattaaatagtgcatcaggctgaattctgtgtgtgtgtgtgtgtgtgtgtgtgtgtgtgtgtgtgtgtgtgtatatatatatatatatatatatttttttttaagacggagtctctctctgctgcccaggctggagtacagtggcaggatctcggctcactgaaacctctgcctcccgacctctgcctcccagcttcaagtgattctcctgcctcagcctcctgagtagctgggattacaggcatgcatcaccatgcctggctaatttttacatttttagtagatatggggtttcaccttattgaccacgctggtctcaaactcttgacctcaggtgatccacacacctcagcctcccaaagtgctgagattacaagcatgagccactgcatctggtctgaattatctttaataattatatgtgaaaagagatacagtactagttacacatgcatcytgtcttgtacagaaaatgattatcttgctcacaactactgcatgacttaaatttattaagagtaatctctatttctgatacagattaataacaacttttccattctaagatcttctatctcatcagagatatccaaccaccagtattaattctggcaggcattaaaaatttggtgtggatttggctttgcaaggattaaaaaaaaagtgagatgtcatgggagaagcccataacttcaatcttgtaacggtttgcatcatgttaccaggcaattatttacacatcagtcagaggtgagcagagtttactcatagcaactacttcaaatcatgacatctaactaggatgccttgatgagatgctgaaaagataattataaaagtcattcggggggaaacgattttagtgcttaagtaatcctttggtgtttattcaaaattagttagatttt

SEQ ID NO: 552772 - DNA, 681 bp, Homo sapiens
attatcaagagcccatagacaaggcagtggttacagcaaaacaaatatcaggaaggacagacttaagtttatcaaagctacaaggctcattggattaaaagaaagcttctgcttactgtgtaactaggttcagctatagctgtattagagttgaggatagcattgagtgattgtaaataaatttttgtatyttgcttgcaatacaaaaatcctttttatcggtgggtccaatgtaaacaggcatgcacacacacattaaatataattaacaagtatttattaagcacctattctgaacaaggtattgtggtttggctctctatggagacagtgttatataatgtacatactaaaaatattttattgaagactctcaacctgacagtggtgctgtatgtgtgaaagtgcctgaagagattggctttattattaatacttttttcccaaatgcttatttgaagactatttggggtgaggtggaggtgtgggtggggaattgttggggaaaattcaaaaagattgattgttttaaaaaaagggacacaatggatttgctattttctgactcaactacagcttttcatagtggagatatccaaattctattttcctagtgaaattatatttgtcctgcttgaaaacactcttgcaaattttcttaagaaaaaaacctacacagat

SEQ ID NO: 552773 - DNA, 666 bp, Homo sapiens
atgttatgcataaatacacagctgacatcctgactttgaaggctagaccaacaccaccctcccaaggtcactaccactccagttagggaacacatgcaacaagaatacccatagaaaactttcactctttattgattcggctctaaatctccatctaagtcttatgttgctgatccgagcttaactatggacaaaactcaaaggcctctacttggtacaaggtcagtrctggaagctgtgtcccctatattctggggtatttgttttgttttgttttttggcctaaggcaaacagaaggcagctatgtgcatctgccactggtagctttcctcctacttcattaccttacagcttcatgggaaaggggagaaagtgtagaaaccaaatagttccaaggtaagaggattgtgatcacatcttattctatttggaatcactttcatccaaaaaaagagccacaacaacaaagagtgacccatttttaaaaatgatggctccattttgtgaccttgagactacattttgtccttgtctcataagagagttctgtcttcctggggacaaagtatgtgcatattagaggagagagaggaagagcagagggttttaaatgccttatagagaataaggactttttatttggaaaatggaagcacaaataggca

SEQ ID NO: 552774 - DNA, 657 bp, Homo sapiens
gatcaggttcaacttgacagtgaaactatgttgctggctagaataattaagctggttttacaaagcctctgactccatgtattttaatcatgagcttcataatcattaaatttaagggccagagcacaataactacaaaaatgatgataatgatagacagacagatagggagatagatagatagatagcatctaacatatgcctgattgcatctcccaagcatctctcaaattcacctactttctgtctccactgccacaactctggtctatgcctctagcttttgttcacctggaattagtgcaataaatacccggrctacttatatctaattttccccccactcttgacaattcattctgaatgctgctgccagttagctttcagaaatacaaagttgatcacacactcccatctcagcttgaagctcttcaaaggattgcagtggggtggagtggcgggttagaaggatgttgtttccaggaattcaagataagagaggtaggaacctagtgggttatgagtatgtagacgagagattattccagaaaactggacaaggttgatctggaagggccatatcagcatgaaggggtctggcctgaacattattgagaggggcatagggagttattaaatgtatctcaacaatgtgca

SEQ ID NO: 552775 - DNA, 1090 bp, Homo sapiens
tgtcttatttaaaatatccttagtatgtcttatagtaaagataatgctgataatgatttcatctctaagatgtattaatatatttgtactgtttgccaaaatcacaaatcatttatgtttttattccttttcaaaatggtgtcagagacatacatgcattttcccaaatgactctacttcactattatttacatggcttatttcattagtttatagagggtttgagaaaaagaatatgtagataatttaatggtttttcacaaattttaagcttgtgattgtgctcaatgagaaggtaaagttattaaaacttatttgaaatcaatttggcatctgattttgtaccccaaaatgtgtggacatgaatagaatactgattcttaaaccccctgacacayaaaagcgacccgaataacttgctaaactgcagactattaacttgcagcactaagaaattctgattcaggaggtctagaaaatggctctttaatcatcatctttaaaagacatgccaaccaattttaatatgtttcccagtgtccacaatttgagaaaactagtagaggctaggtttggtatatgtggtttatttgatcagttttgtgcaccaaccaaaactatctagtccccagaatgaattctctggcgcgatcatatctattttgctaaatatataaacttttttcagagcacttttaggttcagcaaagctaagcgctgagcattgagagtttctataccgtcttcccccacacatgcacagtttctcccatcatcaacatcctgtacttcagtggtgcctttgttacaatcagtaactagaattgacatgtcattatcaaccaaagttcatgggttacatgagggttcacacttgcagttctttgggttttgacatgtataatgacttgtatccaccattatagtgatttacagaatagtttcactgtcctaaaaatcctctgtgctctactcatttatcactccctccaagcccctgacaaccactgcctctattgctttgccttttccagagtgccgtacagttggcatcatgccccatgtagccttttcagatttgcttctttca

SEQ ID NO: 552776 - DNA, 563 bp, Homo sapiens
tcattttgatttgattgcaaaatttggggggtttttttttgacatttctgcaatatcaagtgtatttattgaaaaattaggggtagccccaaagaagcaaattcaacttctatccccttttaacctacggttttcacatcctgccaaaggtgatgcaagcactaaccctgagygacaggacctcgatgtagccttatcctgtgctttgcaccacagctcttgtgggagactctgtcattcacagtattgaatagtgaaaggtgatggttagagaaatttagcattgtctggtttaataaatatcaggaggaagctggcagataagttttaaccccaggacatttaaaaaaacaatcaaaatactgttctccatccatatagtgttcacacaacacagtatgtttatactagagtttagagacagagtaaagttgttctattatacctcaagggcaagcttaaggtctaattcctccaggaagacttctatgattgtcccaactctaaataattactccttcaactacgtgaccacaagacctcgttagcaccaatgaaaggca

SEQ ID NO: 552777 - DNA, 563 bp, Homo sapiens
tcattttgatttgattgcaaaatttggggggtttttttttgacatttctgcaatatcaagtgtatttattgaaaaattaggggtagccccaaagaagcaaattcaacttctatccccttttaacctacggttttcacatcctgccaaaggtgatgcaagcactaaccctgagtgacaggacctcgatgtagccttatcctgtgctttgcaccacagctcttgtgggagactctgtcattcacagtattgaatagtgaaaggtgatggtkagagaaatttagcattgtctggtttaataaatatcaggaggaagctggcagataagttttaaccccaggacatttaaaaaaacaatcaaaatactgttctccatccatatagtgttcacacaacacagtatgtttatactagagtttagagacagagtaaagttgttctattatacctcaagggcaagcttaaggtctaattcctccaggaagacttctatgattgtcccaactctaaataattactccttcaactacgtgaccacaagacctcgttagcaccaatgaaaggca

SEQ ID NO: 552778 - DNA, 563 bp, Homo sapiens
tcattttgatttgattgcaaaatttggggggtttttttttgacatttctgcaatatcaagtgtatttattgaaaaattaggggtagccccaaagaagcaaattcaacttctatccccttttaacctacggttttcacatcctgccaaaggtgatgcaagcactaaccctgagtgacaggacctcgatgtagccttatcctgtgctttgcaccacagctcttgtgggagactctgtcattcacagtattgaatagtgaaaggtgatggttagagaaatttagcattgtctggtttaataaatatcaggaggaagctggcagataagttttaaccccaggrcatttaaaaaaacaatcaaaatactgttctccatccatatagtgttcacacaacacagtatgtttatactagagtttagagacagagtaaagttgttctattatacctcaagggcaagcttaaggtctaattcctccaggaagacttctatgattgtcccaactctaaataattactccttcaactacgtgaccacaagacctcgttagcaccaatgaaaggca

SEQ ID NO: 552779 - DNA, 563 bp, Homo sapiens
tcattttgatttgattgcaaaatttggggggtttttttttgacatttctgcaatatcaagtgtatttattgaaaaattaggggtagccccaaagaagcaaattcaacttctatccccttttaacctacggttttcacatcctgccaaaggtgatgcaagcactaaccctgagtgacaggacctcgatgtagccttatcctgtgctttgcaccacagctcttgtgggagactctgtcattcacagtattgaatagtgaaaggtgatggttagagaaatttagcattgtctggtttaataaatatcaggaggaagctggcagataagttttaaccccaggacatttaaaaaaacaatcaaaatactgttctccatccatatagtgttcacacaacacagtatgtttatactagagtttagagacagagtaaagttgttctattatacctcaagggcaagcttaaggtctaattcctccaggaagacttctatgattgtcccaactctaaataattactccttcaactacgtgaccacaagacctcgttagcrccaatgaaaggca

SEQ ID NO: 552780 - DNA, 558 bp, Homo sapiens
aaccttctctgtaactgtctactagttaattattttctgagtgtcctttttcatattgcttctagttgagaagagcagttctatagtttcactgaactttgcttccaaatttcaaagttagctgattggaaattgctttggggttgctttcraacgttatccaactgctcacatactaagttttcactttgtgtctgccagtgactctcaattaaagtcaccatagtctcctccagcttcttcattcttcttcacatctcaatttgctgaagtaaaataaataagaacacccctatttgttttatctgtgattaatcaatgacacttgtcacctcctctgttggctaaatatttaatacaaaggaaggtagagtcatgaaactgttgtgccaatgcctctgtagaaaagacatgtgtaggaacaaattcagtccacacagtacttctcaacctcaggttggccactggagactaggtatttgtaaggctccttgtactgattctagttattaaatttgacatgcagaatgcatttggaaacttagagcaaaatgcatt

SEQ ID NO: 552781 - DNA, 676 bp, Homo sapiens
ttagaccagtttcatcaagattaacattctaatctaggagtagctttatttatcaatcaaatttttttttaaaagacttggaaatctctagctttttcgtttatcctagcacattgccagatggtttgatgaagtggaaaatgtagccagacttgaacccactaaacatctgcttcttaaaccaaaagaaagaaataccaggagattttttttccttaaggtctttacatatcactaaagccttttttttttttttaaattgtagaaagcctacctctgatcacttcaaatcagtaatatgttgggggtaaagtgcatatataagtctttcccctattgaccaattgcatataagctgattcacattaaataaacattttaaggctggacacagtggctcaggcttgtaatctcagcactttgggaggccgaggaaggaggatcagctgaggtcaggagttcgagaccagcctggccaacatggagaaactccatctctactaaaaatacaaaaattcgctgggtgyggtggcaggcgactgtaatcccagctactcgggaagctgaggcacgagaatcgcttgaacctgggaggcagaggtcgcagtgagccgagatcatgccactgcactatagcgcaggtgacagagcgagactctgtctcaaaaaaaaaaaa

SEQ ID NO: 552782 - DNA, 673 bp, Homo sapiens
caagtggtcctctcccgtcaacctcctgagtagctggtactacaggcatatagcaccatgcccagctaattgttattttttttgtagagagagggtcttgctatgctgcccaggctggagtgtagtcacgtgatcacagctcactgcagccttgaactcctgggtttaagtgaaccctggcctaagactcccaggttgctgggattacaggcacacgccatcacacccagttatgttgtcaatgttatcaatactttaaaggcacacttgtctgctttctacactgttgccggagaagggtcataaagtgaagtttggcagaaaagtttggccattgtctagtactgagaatgtgtggaagtgaggaaaggggccagtatattacacatctatggtgagtagttgtgtcatcattaaaggcatytgaagagttgccttttgatgggtccatgctatgggataaaggttacatgttaggaatcctggccttttgtcatgagctctagcagtgttcaagtatggaaaactttagtcactttactggagcctcttcttttatttacttacatattgattttctgtatacaattttgtgtccttaaaactttttttatgtgtgaaatatgacacatagtaacatatacaataaacacctgtttcaccaggcaggtat

SEQ ID NO: 552783 - DNA, 1277 bp, Homo sapiens
attctggaaaacctctcagccctaggaaaactgggatagttgagtactctacaaaatagtatctagataatccctatcatcttgcctggggcgcttttcctattcctctgtgcctagagtttcctcttcccccactcaccaacacagagctttctgcttcactctccacacccactccaactaggccccaagccatgtctacagcctgggattgcagcagtgggttctgcccatgtctctggtgcatatcccatctgtcatcggactcctggcacagaaaatttaatgtcaggaaagtgaagggttttgggagacacatggggaaaaagcagatgaactctattgtctgggctagctaactttggactagcatggaaaaacaggctcctttcaaaccggttcagacaggcagagggtattaggtttctgcacttagcttattttcaaagggaaatcagagaactcagtttcaggtcctttccagtgctaaggtgctgtggtttgtccccaggtcttgtccccacaaagttagctcaagaatccttcaagcttctttttttctttctctctcttttttttttttttttttttttttgagatggagcttcgctcttgtgccccaggctggagtgcaatggcacaacctcagctcactgcaaccgctgcctcctgggttcacacgattctcctgcctcagcctcccaagtagctgggattacaggcagtgccaccactcccagctaatttttgtatttttattagagacggggtttcaccatgttggccaggctggtctggaattcctggcctcaagtgatctgcccacctcggccacccaaagtgctgggattacaggtgtgagccaccatgcctggccttctttctcttttctttaatgaccttgatctacagaatttgggtccttcaactgttgttctgtgcccaggagcagtcaaaggccaaagggctagagaaaaatgacattcactattcatcttcaaactacagacatgatggttacggccattgggatttttcacggggctgctttttatttccctctggtgaggtgctctgcagaaggggattcttatcctccaggaagatgatgasagattatggcccaattgactcagctcccttgggttccctggggtacctgtgtcttccacagccctcctcttgcaacacagagcctattccttaacggaaagcactggccctgtgaaactgcttcccctcaggaccctcgcatgatgccacactgtctacaggga

SEQ ID NO: 552784 - DNA, 546 bp, Homo sapiens
taaaagaaatcacccacccagcgagctagagtctgaaaaatctgcatattcccctacattagcatccctttgatctgtaaggatgcagagggaggcatacygcactagactgtggcagcagcttcatcctttccagttcatttcctacttcctgctttgtgggcatagattctcacacatacctggaaaccaggtaagcatctggaccagtgaaatatgtgacttctggaagcccattagcaatcaagctctggtattagagttaaacctttgataacacaaacaaagctgcttgtgcttctatttcacagcactggaaagagttctacaatttcccaacaaatgatatctgaaagcatcattttacaggtgagaaaatgtagggattcatttctcaaagtacaatcctctggccagtggcatcagtacaacctgtgggcagattctttcgattgctccaccccaggttagctgaagctggattcgcagtggaaaggcctaggaatctgcattttaaacacactccatccccgcccctaggcaatc

SEQ ID NO: 552785 - DNA, 546 bp, Homo sapiens
taaaagaaatcacccacccagcgagctagagtctgaaaaatctgcatattcccctacattagcatccctttgatctgtaaggatgcagagggaggcataccgcactagactgtggcagcagcttcatcctttccagttcatttcctacttcctgctttgtgggcatagattctcacacatacctggaaaccaggtaagcatctggaccagtgaaatatgtgacttctggaagcccattagcaatcaagctctggtattagagttaaacctttgataacacaaacaaagctgcttgtgcttctatttcacagcactggaaagagttctacaatttcccaacaaatgatatctgaaagcatcattttacaggtgagaaaatgtagggattcatttctcaaagtacaatcctctggccagtggcatcagtacaacctgtgggcagattctttcgmttgctccaccccaggttagctgaagctggattcgcagtggaaaggcctaggaatctgcattttaaacacactccatccccgcccctaggcaatc

SEQ ID NO: 552786 - DNA, 698 bp, Homo sapiens
cgcaaggacagaaaaccaaacaccacatgttctcactcacaggtggaaattgaacaatgagaacacttggacacagggcagggaacgtcacacaccgtggcctgtcgggggattgggggctggaggagggatagcattaggagaaatacctaatgtaaatgacgaattaatgggtgcagcaaaccaacgtggcataagtatacatatgtaacaaacctgcacattgtgcacatgtaccctagaacttaaagtgtaataataaaaaaaaaaagaagaagaaagtaaagattagaaaggtgaagcaaaaaaaatagagagattcaaagatattcatgccttgagttcaactttttagggcacaaattcacatttctttgtaaatttggaagtcgtttgagaagaaagttgtctaagkgctaactgaacagtgtcttttacatcactgagctcatcgaaacctggagaaaagtacttgcagtttttcaaatttgaatcaatttatctttgatattattaaatggtcttatattctactaacaactgtttggtggcttaattgaagatctttcactttttataaaatggtatttttagtcttttccattatcatttccaacaaattttcataactgagataatttattttactctttgtccacctaaaagtgatttccattttcgttcaagaatccaagcca

SEQ ID NO: 552787 - DNA, 649 bp, Homo sapiens
cactacaccaaacaacaacagaatatactttcttcacaagataatttaattttaaaatgggcaaaggatctgaacaaatattcctcaaaagaagaaatacaaatggacaaaaagcatgtgaaaagatacctaacatcattagtcattaaggagtgcaaatcaaaaccacaattaggtaacacttctcacttgaatggctataataaaaaagacagacaactacaagtgttggtaagaatatgaagaaatgagaaactttatatacttctggtggcatgtaaaatggttgagtcattttggaaaacagtcaccctaggcctcaggctggtaaagggtatcagagaggtgctagagacaaattgctgaagaggtagaaaatagggtaacactccagagctaagaagagccaatggagttcaggaaataatacgaaaactgagaaggttggagaagggatggttttggtcacatgactctctcttcctgagaaatcactgtacagcacygaactccaacactgtggagctgcaaataagttcatatgcctcatgtttcattttcccacgtatcagttctggtgggcgtttaccacgaaagtaaatcctcatataccccaacatttttagttccagactctagagacacaaaa

SEQ ID NO: 552788 - DNA, 1340 bp, Homo sapiens
tgcttatcagagctggacatcaaaggctgtgtttttaaccacagctctaccagcgcccaagccagtgctgtgttttaagcccttaagggactctgacagttttctttatgaacctttattctacagttctaaatagcagaactgtggattgtagggaagagggttggaaactcacagccatgaggctgcatctgatcaaaaatacattttatttagctaaaagaacgttttgtgtgtgtatgtgtgtgtgtgtgtgtgtgtgtgtgtgtgtgtgtgtgtgtgtgtgttttgtagaggtggggtcttgctatgctgcccaggctggtcacgaactactggcctccagtcatcttcccacctcggcctccygaagtgctgtgcccagccctaaaataatgtttttaaattaaaacattttaatttaagtgtctttcttaacatgtaccgcataacctgtttggccttttccatgttgaattacctgcctggcctgggaagcatcggaatctgtgaccctgtaagagcccatctctcatcctcactgtgatggcagggctggtgccttgggacacttgtgttttgaaggtgcttcatctcctttctcttggaaggtactttggggctgcctcatctgcactgagaaatcagaccgagggcccagaaaaactgatagaaccctcacccttccctcacttcaccaactttgccttccccttcccactctgccaaggactccacagtcccagacaggggagcctgtgttcccagggccagaagtccactgtgtgtgggcagctcaaaggggccaggctgccagcattgacctcatgatcttcagtggacccagaagtccacaaggcctggcattgaccgagaccactgggctcaaggctgggctactgccacctggtccagagagcctacaaacgcaaggcagctcccgtcccaggtctgctgcgcttcaagacagcaccaacagcagctgaggtgagggccccaggcccaagagacggggctggctggtcccctgagtgtcgtaaggactatggctacgcctgtgttcacacgttcccaaaacaagtcctggacagcctgtctcatgacaccaggaaacagttgcttgatgggaaaactgctgtgtgtgtgtgtgtgtgtgtgtgggcgcgtgtgtgtgtgtgtgtgctggagggaagaagaaaggaagggaaaaaaaacaagagagcactgagcaattccaaaggcgtgtggttttcttcttgtggtttgatgcaagggcttggtggtttaagtaaagccctgagcccagattgtgggacagttaaagactaggtggagcaggg

SEQ ID NO: 552789 - DNA, 520 bp, Homo sapiens
aaattcaagatcaatcatagacttgtgaaatacttacgacctatactttataaacaggcaaaactcagcaggcacttcacaagaggatattcaaatggccaataacagatgaaaagtccaagaaaatgcaaattcaaaccacaatgagctacccccaygcacccatcagaatggccaaaataaaaaagactaacaataggctgggcatgatggtgtacacctgtaatcccagcagtttgggaggcccaggtggaaggtttgcttgaggccaggaattcaagattacagtgagctatgatggtgtctctgcactccagcctgggcaatagagtgagactctgtctcacacacacacaaaaaaagattgacaaggctgggaagcaattctaaaattccaaaatgcccacatggaaggtgggagtttaacttggaactatcaccttagaaaatatgtggacagtagttcataaagctgcatttctatgtatatacttgaagtgaataaatgcatatatctacc

SEQ ID NO: 552790 - DNA, 734 bp, Homo sapiens
tgaccaacatggagaaaccccgtctctactaaaaatacaaaattagctgggcgtggcggctcatgcctgtaatcccagctactcgggaagctgaggcaggagaatcgcttgaacccaggagatgcaggttgcagtgagccgagatcacgccattgcactccagcctgggcaacaggagcaaaactccgtctcagaaaaaaaaaaaaaaagataaatatatcttgtataaatacatatcatatatcatatacagataaatatttatctgttaaatatatatttataaacatttattgtgagaaaagaaagtacttcattaaaaraagtctatcgccggctgtgcgcagtggctcacgcctgtaatcccagcattttgggaggccaaggcctgcggatcacgaggtcaggagatcgagaccatcctggctaacacgatgaaaccccgtctctgctaaaaaatacaaaaaattagccaggcgtggtggcgggcacctgggtgcgtgtagtcccagctgctcggggggctgaggcaggagaatggtgtgaacccgggaggcggagcttgcagagagctgagattgcgccactgcactccagcctgggcgaaagagcgagactccgtctcaaaaaagaaataaataaatagtctattgcctaagaataatatcctattcctcatttctcctctttacacattacacaccccactaactgtgtgttctagattcacgcat

SEQ ID NO: 552791 - DNA, 784 bp, Homo sapiens
agcgaaaagggaaaatggtcctatttacaaatgacagatgtgaaactggggttcacatcaacagtgtcactgccaggaaggagggtcatgctagccatgtcaccggtagtgtggcccgcagggacgccgacctgctggagcgtcgtgccagcatgggctgtggcaascacgtgggccagcaggaggttcccgctgcacagctgtggggtgaggatagactgggtggtgatatcggccattacaggggcctcttctgctggcaagagtgtgacagtagcaagtagatggacaggcctgcgtgtgaggacggaatgcaggaggggttcttgtgcgcctgggtgtggggccctcacgggaaccgtggagaaatggccaggtaactgcgtcatgtgggctagtagattggccagggcttcgaactgaaggacgataacggggagtagctgtcaggccctgggagtgcctgagtgtaagtggagatgggtttggggtcactgagggatgcgtgggagccatccctgtataggtacaggtcatagggagatagtctcgtgaggcctgtgagtgtctagggttgtcctgggtgcctggggctgactgtggcagaaatctggggaaggctggagagaagctgggagacccaggagagtccctgaaggcagggggtgaagaggtgaaagaaatgggggagggttgcagtaaggtccgtgagtttgtaggtgattcctgggtgcgggaagctgactccaggtgaaatctggagatggttggagagtagctgaga

SEQ ID NO: 552792 - DNA, 700 bp, Homo sapiens
ggagatttaaataatacattttgtgcggttgagkcagttaatttttcagtgctgacttccagagttcacattcaacagctcatgcataacataatgtaaggtgtatttaaatacccgaaagtaatttcatcaggcaatgaaccacggtgtcttttccgtgtgttcttactcagaacacattcaccagttcacttggcatccatcacttttattttgtatccgatactcattgtctgaagtaataatgaataagtgatccaaagaataaagtattgctttgaactgctgacacagtgcagagtgctgtattatgcaggattgtgctagtagccaaaatacccgtttagctcagagctctttgcagaaagcatgccattgcccccatatttgtgtataataaatattctatagtgagtgattaaaaatggaaagttgtctgctttgttcagtagaacaggaaatggtatattacatatttaattttaatcctatcactccatagacacactttttcatgaaacatatttgaaaatctgctttttatttctacaatgtaaaatgttaaattgaaatagtagacaacgtgagacaaaaaatgagagaacactttaatatttttatcagaattgtttgggatgcaaacttacatacaattaaaattttccaggaaaaacaaaatgtatcctactaaaatgccact

SEQ ID NO: 552793 - DNA, 819 bp, Homo sapiens
aacaggctaactagtgcactagtctccttagtacactgaaacaaatgacatgactctatctaaccatctgcctacttatccatccatccacaacagcggctgcatacattaccccatactgaacatatttcctcagacggctctagaaacaaaaggattaattcatcagtacatgtagactaagtatccggataagaataactcatatactcttttgtaaaataaagcatcagaataaaggaattaaggatgagtatacgaggtagtattaaacaggatgacttagggtttatggaaagatttttcaacataaaggcaaagaagaactatcctgaacaatcagagagcaatatgtttctgaaaataattttctgtgagaataagagtgaaatgtttaagaatatttgtcttggcctggcgcggtggctcacgcctgtaatcccagcactttgggaggccgaggcgggcggatcacgaggtcaggagatggagaccatcccggctggcatgctggaaccccatctctactaaaaatacaaaaaaaaattagccgggcgtggtggcaggtgcctgtagtcccagctactcaggaggctgaggcaggagattggcgtgaacccaggaggcggagcttgcagtgagccgagatcgctccacggcactccagcctgggcgacagagcaagactccgtctcaaaaaaaaaaaaaaaaaaagagagaatatttatcttactttcttaagaaaagtccaatarcacagccaatgtgaggtagaaacagggactgatactggtatctctggccacaaacaataattct

SEQ ID NO: 552794 - DNA, 547 bp, Homo sapiens
aggcaccaacgaggagtttggattgagaatccaacgtgtgtaaagattaccacctgtaatctgttaagctgttaytaccagcttaacaagaaatatataacaagtcaacaaaaccaattataatgtttgcagactgaaattacaatattccctttagaggcagtaaaagttataaatttggaaatgttaattatgaggtaaaataggtatttttaaaggcaagataaattttacaagttttgtaaataagcatttaagtacaagtatcttacaaggatattgtgcagtggtttattttacttatgcatttttttttcttacctggaatatggcctcggcaagtgtaaaagaattctttgcaatagtctttgcagagcagaggaagtactaggtctctttccaagacttctctctcaggtgagtggaacaggctttgagaatgtggagagcaaagtgcacatttgatttcctccagtaacttcccacattctgtgttgttggtaacagaaaatatctgaaagccataaatcagaagcaaacttttttt

SEQ ID NO: 552795 - DNA, 558 bp, Homo sapiens
caatgataatgacaaagattatcctaatgatatgattgtcttgtgatacactggaaatagtagtaggtttgagatgaggaaactcaaattctagtcctgatattctccctagcttcatgcttgcataacccagtttataagttcccctgtaagacagagaccagactgtgttgatgtctttattaacacatcataaatagtgaatataaatagcggatgaaaagttcaacaccaagaaaaactcatacctactcaacaggccctggtgtcctcttctgggctggctccctgggttactacagcctgtcttcacttctcagcagcagttcacctgaaaggactggcaagagctctgggcctctccagacattagattccaagcataactgattctcagccacagaaagggaaattttttttyccctcatcttattttaagacctatcttcataatcttcaatttatgctccaggttttatctctttcccgaattattaacaatagcagcatccattcactataggagaaatcttagttctacccagagggatgtggaat

SEQ ID NO: 552796 - DNA, 558 bp, Homo sapiens
caatgataatgacaaagattatcctaatgatatgattgtcttgtgatacactggaaatagtagtaggtttgagatgaggaaactcaaattctagtcctgatattctccctagcttcatgcttgcataacccagtttataagttcccctgtaagacagagaccagactgtgttgatgtctttattaacacatcataaatagtgaatataaatagcggatgaaaagttcaacaccaagaaaaactcatacctactcaacaggccctggtgtcctcttctgggctggctccctgggttactacagcctgtcttcacttctcagcagcagttcacctgaaaggactggcaagagctctgggcctctccagacattagattccaagcataactgattctcagccacagaaagggaaatttttttttccctcatcttattttaagacctatcttcataatcttcaatttatgctccaggttttatctctttcccgaattattaacaatagcagcatccattcactataggagaaatctyagttctacccagagggatgtggaat

SEQ ID NO: 552797 - DNA, 548 bp, Homo sapiens
aaaagttttggaagttactcaatgyttttctggaaaatttcagccaactagggctaggacaaagtgatattttacacttgagctgggaaagaagctgagttgtttatttggtttttaaaccagaaactcatgaaatatgacatctaattctggctgtgttcttatctattgctgtgactgctcgcagcttattggtccccagttgaggacatttatttcctcatctattaaaaaggatggtaaacagttgcctaattctaaagtttggaaacaaaaggaattctgtagcttcactaatttagtgacagatttaattcctttacaactcctgccatctccaaaccttttaattttccccaaaagcaaatttacattttattgctgataaagaacatgatggagacttgcctaattaccacttgaccaggataaccagataaacagtgtcaggaattaaaaatatggcacaaaactatggccttccatttatgtgttaataactcacatggtattctcatggtatatataaatcccatatactactcacc

SEQ ID NO: 552798 - DNA, 502 bp, Homo sapiens
gcccctgccctgcacagcagcgggcttagaccagcctggtgttttctcccaggaacctggawgagagagagagagagattgactctaattgtgtgctgcacctgtcattcatgaattgggacactcaccgccctgcagcctgagaggaaatgaaaatctgcccacatatggagaaggaagagggaaaatgagcttgcctccttagacctggccgtgtccctgcccacctctgaccatggctccccttcatgcagctgaaaggggcctctgttcttcccagctccagtcctcccacaagtacaaagcgaagaggtcagaagcccaaaccaagcagctggggggaatcattcaacaagcccaaggtccagggagggtgtgggcacagggtcccctctgatgggggaaggagttgggacttactgcaaggcaatggacgctggtgatgaaaccttttaggaaaatcctcttgatgtagagtggataatggccccaagggggcaaa

SEQ ID NO: 552799 - DNA, 502 bp, Homo sapiens
gcccctgccctgcacagcagcgggcttagaccagcctggtgttttctcccaggaacctggaagagagagagagagagattgactctaattgtgtgctgcacctgtcattcatgaattgggacactcaccgccctgcagcctgagaggaaatgaaaatctgcccacatatggagaaggaagagggaaaatgagcttgcctccttagacctggccgtgtccctgcccacctctgaccatggctccccttcatgcagctgaaaggggcctctgttcytcccagctccagtcctcccacaagtacaaagcgaagaggtcagaagcccaaaccaagcagctggggggaatcattcaacaagcccaaggtccagggagggtgtgggcacagggtcccctctgatgggggaaggagttgggacttactgcaaggcaatggacgctggtgatgaaaccttttaggaaaatcctcttgatgtagagtggataatggccccaagggggcaaa

SEQ ID NO: 552800 - DNA, 502 bp, Homo sapiens
gcccctgccctgcacagcagcgggcttagaccagcctggtgttttctcccaggaacctggaagagagagagagagagattgactctaattgtgtgctgcacctgtcattcatgaattgggacactcaccgccctgcagcctgagaggaaatgaaaatctgcccacatatggagaaggaagagggaaaatgagcttgcctccttagacctggccgtgtccctgcccacctctgaccatggctccccttcatgcagctgaaaggggcctctgttcttcccagctccagtcctcccacaagtacaaagcgaagaggtcagaagcccaaaccaagcagctggggggaatcaytcaacaagcccaaggtccagggagggtgtgggcacagggtcccctctgatgggggaaggagttgggacttactgcaaggcaatggacgctggtgatgaaaccttttaggaaaatcctcttgatgtagagtggataatggccccaagggggcaaa

SEQ ID NO: 552801 - DNA, 542 bp, Homo sapiens
ggcttggccggagaggcagcccagggcaggacccagtcctgagtcctggagcagggccagggaggcgcccatcccgccccggccagccgccctctctgctgtttcttctatttgttcttcttttcacccacagctctgtgttcctgtcatccctcctttcagcaaaagtcctgttcccgttccctctgtccccacccactcctgttcccccaagaaaataagctatcgttgtatttrcaatctatggattagaggtttaagtatttattattattggttaattattattaattatgtaaatttgcctcccatatgtctgttgcgttgggtttctgaggagaccctgggtgaggaggatgcactggcttcccgcttctcgccccccacccctgtgctgtccgggagacagtggtctggggccactggttgggcccccttctcccttcccccttccccttgtcccttctgcaggccgttgaggggggctgtctgtctcagtctgtctctgctcccactcttgaggcactggttaccgcaaagtg

SEQ ID NO: 552802 - DNA, 3734 bp, Homo sapiens
tttttttttttttttttgagatggagtctcgcactgtcacccaggctggagtgcagtggcaccatctcggctcactgcaagctccgcctcccgggttcactccattctcctgcctcagcctccccagtagctgggactacaggtgcccgccaccacgcccggctaattttttttttattattattagtagagacagggtttcaccatgttaaccaggatcacactgctttatcttaaacagaaagttgcaaactaataaaaataccatgccgacaaactgaaacacatatcttgctgatttctctgttgttcggtgtcattactatggctatggctattgttttcttattcttgttatatttcggactccgtgagtctgatggtgatgttgctggaaggtgctaggatggggctggctgtctccgctgcctctcgtccgtctcaaaaaaagaaaaaaaaaaaaggtaagagtcaaacctggagaaactctgtatagacagacttgaaacaatctgaacaccaatttcttaactggactgatacacatcaaatatgtttaaactaggagtgagtaatcatacacacacacatacatacacaaataataatagagatactatgcaaactgtaaaatttagttgcctttagaggattctaggaatcaagtcattatttcgaagatgactatataaaggaaaataatcaggcacttattctatctctgatagagaaactctatcttacggtaaccaaaaaattagaggaagtattccagtttataaataaagaagaaatcgtagaattagaagctaaccattttgtaacccctaatgaaataatggggctatcaaatttactgcatgcagccaaatcagtgcttagagaaaaatttatagccttaaatgcgtatgttggagtaaaaaaaaaaaaaaagcttaagctcatttaggcaaaaacctatctataggactggcagcattcccacacagagcccagaatggggtggtaattagggctatttgtaggcatcctggttctcctctccttctgggaacaggttggatggcacgtggtagggtggcccttccatgagccctctctaagtcaggtgtggccatgtgatttgcttgcgtccgtggaaaaaagtttgaagcacctgctgcagtcttctgcattctccgtttcttctcctaccatgaccaccaacattccaagcagtggctgctgcttccgactgagtcccagagtgacgaagcacagagcagagtcaccagctgacgtgcagtggcctgggatatgaacaggaagtaagcctgtgtcgtgtgaagtcactgaaacgtgggggtggcgcgtgtgagcagcgtaattggtctatcctggttgacccagaaacctaccagaacaaaaacatagcattgtgggcctggtttattggtcagagggtgggtggaaaggaaagttattagaggtgagaaaggtagttattatgtgtttggtaagacygtcccagatcgtgtatccctgagggaagagttcagaaaacacaatgccactcccacgtgggtcgttgtggctgcatttatcaaagcattacaagaacagggtgagctcgaaagaaccggctgatttgccagccaggaggaaagttctagaaagcctggagaaacctggggagctacagagttctcagttctgcctggtaaatggtaagacttagaaggcttttgagcagcaaagaacaattgaagctcaaatgaaaggaatttttttttttcttttttttatttgagacggagtctcactctgttgcccaggctggagtgtagtggcacgatctcggctcactgcaagctctgcctcccaggttcacaccattctcctacctcagcctcccaagtagctgggactacaggcgcccaccaccacgactggctaatttttttttttctgtatttttagtagagatgaggtttcaccgtgttagccaggatggtctcgatcttctgacctcatgatccgcctgcctcagcctcccaaagtcctgggattacaggcatgagccaccgtgctcggctaaaaggaaccctttttaagggtacactttgatgaggttccatgagaacagaccacactgaggtagggagttggtagctgcctccagcctggccagtggggcaggaggggctgctgtggggtcagtgggtccggaagaagacgccggaaacttctccccccatggctcacttggcgttctctttgcttggcctgtggctcctgtgggtaaattcatgtcctgctgtgtgatgaagaggtttctgcagggaagagggggaggtgtttggcccaggcaggacccagtgacctgcagatcaaagatggcctcactaccacggtaatgggcaccagagaagagcctgccgccagccattcgttggaaacaggcccaacagaaccaatgctgtctgtgcttgtggtgtgggggtagaagagaaagagaaagaaacccaaaaccttccttaataatgaacagatgtcacatgattgttagcaagatttaagacatagttgtaactctccatgaaatcaacaaagagaaaatcacgtgttggacattttatgcataattttttgataaaatcataggattgcctgctgcaacatccttcatttcacagttggccgtgacagaatgacgctgaagggagtcgcgtagcaaaaacaactgagctccttctcatccttcacggacgcctctctttgaggtcaactcaccccattgggaagcctctatcttgcctccttgaccagcttctctttcagggtgaaccgcctgatcttcaccgtggtggccttgcctggctcccagcagatgttctccaatgtcactttcagtgacatcacagaatcctacgtttcttttcttgcaagcattgcaattttacttaaaatctgcatcgtaaatatgactgtggaaaatgtatttaagagagctggttctgcaaagacatgaaagacatttgggagggggtgtgtgggaataagtgatattgttaagtaaacgagctgcttgagtggagaacacttttggaagtggtcagcttggccccatctgtgctaaaaatacaaaaaaagaaaaaattagccagatgtggtggtgggcgcctgtagtcccagctactcgggaggctgaggcaggagaatggtgttaacccaggaggcggagcttgcagtgagccgagatggtgccactgcactccagcatgggtgacagagcaagactctgtctcaaaaaaaaaagaagtagtcagcttgggcttggctcactcctgtaatcccagtactttgggaggttaaggaagaaggaacactttagctcaggagttcaagaccaacctgggtgacatagcaagaccccgtctctgcagaaaaatgaaagaattagctgggcatgggggggcacacctgcagtcccagctaatggggaggctaaggtggaagaatctcttgagcctgggagggtgaggctacagtgagttatgattgcactgctacactccagcctgggtgacagagtgagaccctgtctcaaataaataaaaaataaataaataaatgacattgtcagcttgtttacttgtttgtgattattttcttttttaccttcctcttcttgtttttaatagagatagagtctcactgtgttgcccaggctggtctcgaactcctgggctcaa

SEQ ID NO: 552803 - DNA, 3734 bp, Homo sapiens
tttttttttttttttttgagatggagtctcgcactgtcacccaggctggagtgcagtggcaccatctcggctcactgcaagctccgcctcccgggttcactccattctcctgcctcagcctccccagtagctgggactacaggtgcccgccaccacgcccggctaattttttttttattattattagtagagacagggtttcaccatgttaaccaggatcacactgctttatcttaaacagaaagttgcaaactaataaaaataccatgccgacaaactgaaacacatatcttgctgatttctctgttgttcggtgtcattactatggctatggctattgttttcttattcttgttatatttcggactccgtgagtctgatggtgatgttgctggaaggtgctaggatggggctggctgtctccgctgcctctcgtccgtctcaaaaaaagaaaaaaaaaaaaggtaagagtcaaacctggagaaactctgtatagacagacttgaaacaatctgaacaccaatttcttaactggactgatacacatcaaatatgtttaaactaggagtgagtaatcatacacacacacatacatacacaaataataatagagatactatgcaaactgtaaaatttagttgcctttagaggattctaggaatcaagtcattatttcgaagatgactatataaaggaaaataatcaggcacttattctatctctgatagagaaactctatcttacggtaaccaaaaaattagaggaagtattccagtttataaataaagaagaaatcgtagaattagaagctaaccattttgtaacccctaatgaaataatggggctatcaaatttactgcatgcagccaaatcagtgcttagagaaaaatttatagccttaaatgcgtatgttggagtaaaaaaaaaaaaaaagcttaagctcatttaggcaaaaacctatctataggactggcagcattcccacacagagcccagaatggggtggtaattagggctatttgtaggcatcctggttctcctctccttctgggaacaggttggatggcacgtggtagggtggcccttccatgagccctctctaagtcaggtgtggccatgtgatttgcttgcgtccgtggaaaaaagtttgaagcacctgctgcagtcttctgcattctccgtttcttctcctaccatgaccaccaacattccaagcagtggctgctgcttccgactgagtcccagagtgacgaagcacagagcagagtcaccagctgacgtgcagtggcctgggatatgaacaggaagtaagcctgtgtcgtgtgaagtcactgaaacgtgggggtggcgcgtgtgagcagcgtaattggtctatcctggttgacccagaaacctaccagaacaaaaacatagcattgtgggcctggtttattggtcagagggtgggtggaaaggaaagttattagaggtgagaaaggtagttattatgtgtttggtaagaccgtcccagatcgtgtatccctgagggaagagttcagaaaacacaatgccactcccacgtgggtcgttgtggctgcatttatcaaagcattacaagaacagggtgagctcgaaagaaccggctgatttgccagccaggaggaaagttctagaaagcctggagaaacctggggagctacagagttctcagttctgcctggtaaatggtaagacttagaaggcttttgagcagcaaagaacaattgaagctcaaatgaaaggaattyttttttttcttttttttatttgagacggagtctcactctgttgcccaggctggagtgtagtggcacgatctcggctcactgcaagctctgcctcccaggttcacaccattctcctacctcagcctcccaagtagctgggactacaggcgcccaccaccacgactggctaatttttttttttctgtatttttagtagagatgaggtttcaccgtgttagccaggatggtctcgatcttctgacctcatgatccgcctgcctcagcctcccaaagtcctgggattacaggcatgagccaccgtgctcggctaaaaggaaccctttttaagggtacactttgatgaggttccatgagaacagaccacactgaggtagggagttggtagctgcctccagcctggccagtggggcaggaggggctgctgtggggtcagtgggtccggaagaagacgccggaaacttctccccccatggctcacttggcgttctctttgcttggcctgtggctcctgtgggtaaattcatgtcctgctgtgtgatgaagaggtttctgcagggaagagggggaggtgtttggcccaggcaggacccagtgacctgcagatcaaagatggcctcactaccacggtaatgggcaccagagaagagcctgccgccagccattcgttggaaacaggcccaacagaaccaatgctgtctgtgcttgtggtgtgggggtagaagagaaagagaaagaaacccaaaaccttccttaataatgaacagatgtcacatgattgttagcaagatttaagacatagttgtaactctccatgaaatcaacaaagagaaaatcacgtgttggacattttatgcataattttttgataaaatcataggattgcctgctgcaacatccttcatttcacagttggccgtgacagaatgacgctgaagggagtcgcgtagcaaaaacaactgagctccttctcatccttcacggacgcctctctttgaggtcaactcaccccattgggaagcctctatcttgcctccttgaccagcttctctttcagggtgaaccgcctgatcttcaccgtggtggccttgcctggctcccagcagatgttctccaatgtcactttcagtgacatcacagaatcctacgtttcttttcttgcaagcattgcaattttacttaaaatctgcatcgtaaatatgactgtggaaaatgtatttaagagagctggttctgcaaagacatgaaagacatttgggagggggtgtgtgggaataagtgatattgttaagtaaacgagctgcttgagtggagaacacttttggaagtggtcagcttggccccatctgtgctaaaaatacaaaaaaagaaaaaattagccagatgtggtggtgggcgcctgtagtcccagctactcgggaggctgaggcaggagaatggtgttaacccaggaggcggagcttgcagtgagccgagatggtgccactgcactccagcatgggtgacagagcaagactctgtctcaaaaaaaaaagaagtagtcagcttgggcttggctcactcctgtaatcccagtactttgggaggttaaggaagaaggaacactttagctcaggagttcaagaccaacctgggtgacatagcaagaccccgtctctgcagaaaaatgaaagaattagctgggcatgggggggcacacctgcagtcccagctaatggggaggctaaggtggaagaatctcttgagcctgggagggtgaggctacagtgagttatgattgcactgctacactccagcctgggtgacagagtgagaccctgtctcaaataaataaaaaataaataaataaatgacattgtcagcttgtttacttgtttgtgattattttcttttttaccttcctcttcttgtttttaatagagatagagtctcactgtgttgcccaggctggtctcgaactcctgggctcaa

SEQ ID NO: 552804 - DNA, 538 bp, Homo sapiens
ctggccaaagcttgagtcttaaatggctttrtgaattctatcaaacatttaagaaagaaagctaattctgtcaaacatttaagaaagaaagctggatttcctaggccaactaagaatccctaagcctagctgggaaggtgaccacatccacctttaaacatggggcttgcaacttagctcacacccgaccagtcaggtagtaaagagagctcactaaaatgctaattaggcaaaaacaggaggtaaagaaatagccaaacatctattgcctgagagcacagcgggagggacaatgatcgggatataaaaccaagcattcgagctggcaacggccaccctctttgggtcccctctctttgtattggagctctggtttcactctattaaatcttgcaacttcaaaaaaaaaaaaaagtaagaaagaatgcaaatcttacatatagtttcacgtaaaataaaaaaggaggtaataatttccaatgtttttctatgaggtctgtgtcaggcttaggatttgattttaccctagttataaact

SEQ ID NO: 552805 - DNA, 538 bp, Homo sapiens
ctggccaaagcttgagtcttaaatggctttatgaattctatcaaacatttaagaaagaaagctaattctgtcaaacatttaagaaagaaagctggatttcctaggccaactaagaatccctaagcctagctgggaaggtgaccacatccacctttaaacatggggcttgcaacttagctcacacccgaccagtcaggtagtaaagagagctcactaaaatgctaattaggcaaaaacaggaggtaaagaaatagccaaacatctatygcctgagagcacagcgggagggacaatgatcgggatataaaaccaagcattcgagctggcaacggccaccctctttgggtcccctctctttgtattggagctctggtttcactctattaaatcttgcaacttcaaaaaaaaaaaaaagtaagaaagaatgcaaatcttacatatagtttcacgtaaaataaaaaaggaggtaataatttccaatgtttttctatgaggtctgtgtcaggcttaggatttgattttaccctagttataaact

SEQ ID NO: 552806 - DNA, 551 bp, Homo sapiens
tttaaaaagctgacattttcttcctagctacttttgctactattagaacagtgtcaccaggttacagaggaacattggtcatagacatcaaactaacaatctgtgtttttttcttctaaaattcagattttctaaccatgaattcttctgaatattgacaataaaaagtgatatttagctaactagaatcaaatacatattttttacttaaaccttaatgtctaaagtttagggaaacaaatgtctcttgtcaaattcaggatttttattactagttactttaatccagttcagacattatttattgaatatactgtagagttaagtctactggactccagcttgaaaccaaaagatatcttcccatcgattattttaaaattttgtcctcatgcacttttcaaattgtgttccacggaatatttgaaaataatacaaaaaaagtatttttatgaagcattgggttaaagttttaaaaaataaagtrgtttcctctatgtggacttctaaggaccttcatccactagtgctcattgtggacttccaagggg

SEQ ID NO: 552807 - DNA, 645 bp, Homo sapiens
gaccctgatatttatttatttatttattagctacaattatctacttcacatgcaatataatgcagaggctaagagtaaaactacctttgcaaaaattataacagtgagaaaaatctaayctaactgactccatcttgcttctaacctcagaagctaattgctctcactcatttctgggtgtaggccaaggtaactatggaagaaatgtagtttacagtttaactttgaagcaaggatgataatagtccctcccaaaactgaccccctctggggacagaaactgcctttggaagaacactgaaaggctacagggttagggttatggggagggacctgaattctgcaaagatgtgggcatatttaaataaaaagcagttattgctccctagcttgcttttatataattccttactgttcaggagtcatgtagctagatgtcactaggtttgtaacttctccaattgttcctatagataacattactatagattggtttttgagatatttttcagacttttacattcagtcagaccaagtgatgccacctggacccatgattcataccaagaaactgactcagcacaagaagacaatttggatgctctgatgatttcatccccaaccaatcagcagcacccattccct

SEQ ID NO: 552808 - DNA, 645 bp, Homo sapiens
gaccctgatatttatttatttatttattagctacaattatctacttcacatgcaatataatgcagaggctaagagtaaaactacctttgcaaaaattataacagtgagaaaaatctaatctaactgactccatcttgcttctaacctcagaagctaattgctctcactcatttctgggtgtaggccaaggtaactatggaagaaatgtagtttacagtttaactttgaagcaaggatgataatagtccctcccaaaactgaccccctctggggacagaaactgcctttggaagaacactgaaaggctacagggttagggttatggggagggacctgaattctgcaaagatgtggrcatatttaaataaaaagcagttattgctccctagcttgcttttatataattccttactgttcaggagtcatgtagctagatgtcactaggtttgtaacttctccaattgttcctatagataacattactatagattggtttttgagatatttttcagacttttacattcagtcagaccaagtgatgccacctggacccatgattcataccaagaaactgactcagcacaagaagacaatttggatgctctgatgatttcatccccaaccaatcagcagcacccattccct

SEQ ID NO: 552809 - DNA, 645 bp, Homo sapiens
gaccctgatatttatttatttatttattagctacaattatctacttcacatgcaatataatgcagaggctaagagtaaaactacctttgcaaaaattataacagtgagaaaaatctaatctaactgactccatcttgcttctaacctcagaagctaattgctctcactcatttctgggtgtaggccaaggtaactatggaagaaatgtagtttacagtttaactttgaagcaaggatgataatagtccctcccaaaactgaccccctctggggacagaaactgcctttggaagaacactgaaaggctacagggttagggttatggggagggacctgaattctgcaaagatgtgggcatatttaaataaaaagcagttattgctccctagcttgcttttmtataattccttactgttcaggagtcatgtagctagatgtcactaggtttgtaacttctccaattgttcctatagataacattactatagattggtttttgagatatttttcagacttttacattcagtcagaccaagtgatgccacctggacccatgattcataccaagaaactgactcagcacaagaagacaatttggatgctctgatgatttcatccccaaccaatcagcagcacccattccct

SEQ ID NO: 552810 - DNA, 645 bp, Homo sapiens
gaccctgatatttatttatttatttattagctacaattatctacttcacatgcaatataatgcagaggctaagagtaaaactacctttgcaaaaattataacagtgagaaaaatctaatctaactgactccatcttgcttctaacctcagaagctaattgctctcactcatttctgggtgtaggccaaggtaactatggaagaaatgtagtttacagtttaactttgaagcaaggatgataatagtccctcccaaaactgaccccctctggggacagaaactgcctttggaagaacactgaaaggctacagggttagggttatggggagggacctgaattctgcaaagatgtgggcatatttaaataaaaagcagttattgctccctagcttgcttttatataattccttactgttcaggagtcatgtagctagatgtcactaggtttgtaacttctccaattgttcctatagataacattactatagattggtttttgagatatttttcagacttttacattcagtcagaccaagtgatgccacctggacccatgattcataccragaaactgactcagcacaagaagacaatttggatgctctgatgatttcatccccaaccaatcagcagcacccattccct

SEQ ID NO: 552811 - DNA, 847 bp, Homo sapiens
aaattcaccaaatttgacagataaaatattaatatctgctacacagacttttttcaaatattgccaatttccccaataatgtgttttagagtattaggtttttgatcctgaatccaaaccaaagtcttgcattgaatttcatgagaccctttaaagccactattgagttgggggtctgtgttctgagatctgagggtgccagacaactcatctctgaataattagtgcctctctgagttgacagccgtagaggacttgtaacttctcaaaaactttttccctgctttcatctcacttgatccttacaacagtcttgtgagagaaacagggcacaggttagcatctccattttatggatgaggaaacagagctgcagagggtcacactgtaggtttgagccaagagatctgtgttatagccccggctttgcagtaaatccmcagacctttcctcctctccccagcagatgaacaggcagatgagagcttagctaggcctcccacctgcggggggctggccttgctgtgatgacaccacctgtctcccagttggcggttgtccctctggtgccaggaactaggcaagcagatgtctagaagaaagccaaggtcggcaagacagaggcaattggggaaagagcccttccctctgccctagtgcctgtagcggtgttactcaataacctttgagtgctatggtgaggtaatgacttgctcagggaccagtttctccatctcttgtagaagaggctggctgataacttttgtggtccctttttgcaatatgaatccaggatgctgtggctgccccacccatagggctttagcccttataactgtagtgtgcc

SEQ ID NO: 552812 - DNA, 576 bp, Homo sapiens
tttttacattattgtatttgactttttatatttccctggggtaagaaacatatcaaaataattgttaatgcttgaatcttcattttacaaactatgtttaatgagtattttatattgtggatattatagaatatattttttcaactatattgttatagattgccaaataataaaagggttatatttatttcaatgtttaactaaaaaaattatagtacatatatttcacaaagtttatatcaacatttatttagaaaaaattataaagattgaattcatgaatgtttctcaaatttgctttatccatctccaactctatatctgtatctatatttatatatttatataatctcatcattttcattataggcacaagcgtatctgtgtgtcttcattgagccagttgcaagctactatcactttaactgtactgttaaatatttccacatacaccttctaagagtcaaagctattcatttacataatttcagtagtagtatcacaactaagtagaataatgactgcacctttatgccatctaatgttcaaccaatayataaatttcttttcatagcc

SEQ ID NO: 552813 - DNA, 654 bp, Homo sapiens
tgcatattgtataataggggtgatacattgcaagtagctaaattatactgtcttcctttagaacttgatgagattttatgactcagatagtaaaatactgacagctttttcaagcattgcagactcatctatttagaatataattttgatagaaagatgatggtatggagtatactatacctacaaagtactgattctgagctactctcttttaaaaawtatttttttcatcaaatcatatactttcccagctattgttttttcattcaaaatctgcaggtaatgttcatcagactggtatcagagtaagagagaatattgctttattgttattggtcctattgtttgtttagtttttactttttaattattgctacaattttaattctatgaataatgagaaattgatgtaaatcatttttagacatgtgtttatgaaattataacgaagaatttacactctaatcatatggtttatatatttaacaaatctgaaaaataaaaaagaatcctttactaaactattttatgtttttaccttgataatgtgtttagaaagttactttttcagaagtataagatttattttatgctttattttattagaaataaataagaaataaaagcacttattgaaaatgtgaaattgctttt

SEQ ID NO: 552814 - DNA, 327 bp, Homo sapiens
cgtatttattttttcttcgttttattaaaaaataaaggctgactttttttttttgttkttttagacagagtgtcactctgtcaccaggctggagtgcagtggcgttatctcggctcactgcaaccttgacctccggggttcaagctattctcctgcctcagccttccgagtagctaggagtacaggcacgtgccaccacacccagcaaatttttgtatttttagtagacacggggtttcaccattttggccaggatggtctcaatctcttgacctcgtgatccacccacctcggcctcccaaagtgctaggattacaggtgtgatcc

SEQ ID NO: 552815 - DNA, 858 bp, Homo sapiens
actatggtgataataatacctacctcaaaagatcattgtggagaaaaatacgacagtgtatataaaaacctaaacatagtacaaggcaagtagtagtttcttttctttttttttttttttttgagatggagtcttgctctgtcacccaggctggagtgcagtggtgcgatcgtggcttactgcaaacctccacctcccgggttcaagcgagtctcgtgcctcagcctcctaagtagctgggactacaggcacgtgccaccaccctcggctaattttttgtatttttttagtagagacgaggtttcaccatgttggccaggatggtctcgatttcctgacccagtgatctgcccacctcagcctcccaaagtgctgggattaccggtgtgagccaccatgcctggcctgcaaatagtagtttctaaatctttgttatttcctgtctccttttaattttgctttgatcacagaaaaatagagctaactacaatttgggtcatgagaattatagaatttttgagcaggaagagaatctgttgayggtcttatcagtgggtctctgtgtgcttctgtgtgcatgacaatggcctgagcacttgctaaaaatgcagattctagggcctcatctccagagattgttattcacctgatctaggacacaatccagaaacttttattttatttttaaatgattaattagtttagtttatagagacagtatctcactcttttgctcagggctggtcttgaactcgtgggctcaagcgatcctcccaccttggcctcccgaagtgttggaattgcaagtgtgagccacccaggtcattctgatgcaggtgatccaagaaccacagatta

SEQ ID NO: 552816 - DNA, 526 bp, Homo sapiens
cctgcttctctcttataagcatagttctgattgcatttagaacccacccagataatccaggttagtctcctcrtttcaagatctttaactgaatcacatctgcaaatacagttttctctaaaaaggtaacatttacataattcaggggttagagcctggatatttttgggggccgttattctgcctactacaggtagcaatgcacattttgtgtaaaattgcatgtacttccctcctatccccttccccaaatgttcaatataggaggaagaggtaatggctcaattcctaggaaatgtcctggtattatggcatcctgggccccaggtgggaagcttgtgattgtggcatttctccctgagaagtggaacaatttaattccaatcagtcaaacaacaagcatcttgtgtgtcttccacgtctatgactgatatggtttagatgtttcatcccttccaaatcctatgttgaagtgtgacctctaatgttggagatggggctagtgggaggtgtttgggtcatgggg

SEQ ID NO: 552817 - DNA, 555 bp, Homo sapiens
tatacagtaacatggccgaatgtcayagatacatcaatacaaaagaaaacattcagggtgattctatttagttgaagtttagaaacaggtgaactgaatctatgataatagaggtcattttggagggtgttgattttgagggggatagagtaggagagagccatctggagtgcagggaatgttgataccttcactggggtagtgattacatgagtaaaacttgagtatttagccgaatgtaaattatacatagtagaaaactaaacattttacaaagaatttctttccactggtaacgttgtcttgaggggctgcagaatgggacatcccaatgactgtgcttgatagcagcaatctggggtcggttgtgtcctcaaccccattctacaatggtcaattgcatatgctcttgcccacctgtgctgggcaacaatcaccaatcagccaaggctctgtcaatgcctgtgcattaagccagtgccctcaggactgcttccacctggaggacaaaggctgaggccacacaagctctaggacagcggacagcttttctca

SEQ ID NO: 552818 - DNA, 591 bp, Homo sapiens
atgcaaggctggttcaacatacgcaaatcaataaacatagtccagcatgtaaacagaaccaataataaaaaccacaggattatttcaatagaggcagaaaaggcctttgacaaaattcaacagcccttcatgctaaaactctcaataaattaggtattgatgggacgtatctcaaaataataagagctatttatgacaaacccacaaccaatatcatactgaatgggcaaaaactcgaagcattccctttgaaaacttgcacaagacagggatattctgttgtatattctgytgatattctctctcaccactcctattcaacatagtgttgaataaatacctagagaatattttacctttgaatattttattcaaagagaataaaatacctaggaatccaacttacaagggatgtgaaggacctcttcaaggagaactacaaaccactgctcaatgaaataaaagaggatacaaacaaatggaagaacattccacgctcatgggtaggaagaatcaatatcgtgaaaacggccatactgcccaaggtaatttatagattcaatgccatccccatcaagctaccaatgactt

SEQ ID NO: 552819 - DNA, 591 bp, Homo sapiens
atgcaaggctggttcaacatacgcaaatcaataaacatagtccagcatgtaaacagaaccaataataaaaaccacaggattatttcaatagaggcagaaaaggcctttgacaaaattcaacagcccttcatgctaaaactctcaataaattaggtattgatgggacgtatctcaaaataataagagctatttatgacaaacccacaaccaatatcatactgaatgggcaaaaactcgaagcattccctttgaaaacttgcacaagacagggatattctgttgtatattctgttgatattctctctcaccactcctattcaacatagtgttgaataaatacctagagaatattttacctttgaatattttattcaaagagaataaaatacctaggaatccaacttacaagggatgtgaaggacctcttcaaggagaactacaaaccactgctcaatgaaataaaagaggatacaaacaaatggaagaacattccacrctcatgggtaggaagaatcaatatcgtgaaaacggccatactgcccaaggtaatttatagattcaatgccatccccatcaagctaccaatgactt

SEQ ID NO: 552820 - DNA, 1064 bp, Homo sapiens
gtaaaaatcaaactgtcattgttttcacatggtataatcatgtagctataaatctacatgaatatatagataagtaattagtattagagagtttagcaaaggtttggacacaaatttagcatataagtttagttacatttctatcaaccaaaaaaacagagaaaataattttttaaaatgcagtatgctagcaacctttttttcctcagtattgaggatttaatctaacaaaatatatacaatatctttctggataaaaataatattacaggaaagcattaaagaagccctagattgtgtgtgtgtgtgtgtgtgtgtctgtgtgtttatcttataaataacaaagaaagatagcattaaaacgtgggcaaactaatagctcgtagttcaaactacttgcttgctcaagtagtttgtcaagaaaagttttcaattttattacaagttaagaaactgtaaattaatagcacggtaatgatataccatttattcactctactgggcacgaagtctcacaaggatgtagcacaaagaaatgatcattctttctttgtagtattgtaaattggcagaaatattgtggaaaattggttggcattccctagtaaagccgaaaaagtttcatactttacaacccaataggtagctatatacccaaaggaattattgcaagttrtcagaagatacagacattcattatcaatgcagcaccctgtataatgtcaaaacgggaagcaattcacttatctatgcaggatttcactttactaatggataaactatgatgtgtttattaattgaatatcatacagcagagaatgtaaattatctgttgtcaaatctatcatcatggttaaactgtagggatgtaacaggcaggaaaataaacccaaagctagttacatgcatcaatatgaatgaatagattattataggaaaaatgttcttttgacaaccaaattgggatatcatgggaaagaaaattaatgctttctaaattttacatatgtacgtattctctttcgccttaaaaattagttggaaattttaaaagataatttaat

SEQ ID NO: 552821 - DNA, 962 bp, Homo sapiens
aaagtgatatattttttacgtaatagtcatggggtccataacttttccactcttctctgataaaatcctgattctgctgatgggagctcccccttagtttcaatgytatcctgggcaactcacttaaaggcaattaatccattagaaggcttgcagcttataaattaacttaaaaattatttgtccaaattgggatagaatagaataatattattcttatttgttggaatttgggtggacaaatatggagtgaattaggtagcttgaaacagagagaaggttgtcacaaaaattcagaacagctaattaaatttcaattttaaataaacaacatgcaagttcatagttatgtcccaaatatttcatgagacatacttacagttaaaaatatgtgttgttttatctgaagttcaaatttaattggctgtcttgtaattttatcttctaaatacaaaaaccctatagagatgacaataggactaagtggccatgaaccagctgaagttataaggaaatttaaaatcgtgaggaagcagaagctgtgacagatagtacagtttgagggtaagcagaggtccttagcttgcttttattaaacaaacaggaagataatttgcaacgaaacataaaaactatagcttttataaatctttcagaaaaagtcaaacactgtgctagcattgggcaaatgaaaatagtcaattcatgtaaaagatataaagatagctaacaaacttgtgaaaatgtgttcaactgcttcctaattgaggaaatgacaagagagtaagtttttttaaaccaagttttataagtcaagataaaaaagattgacattgctcagaggtatcaagaacatgggacaattgggtctccattttttggtaaaaatctaaattgttataataatttttagaggagtatgtggtgatatatagctaaacatatgaatgagtagttgaaat

SEQ ID NO: 552822 - DNA, 560 bp, Homo sapiens
agcagagactttctgttttgggtcactgatacatccacatcacctagtacagtgcctaccacgtactagttgatcaatgaatatattattgaatgaattagttaacaatagttcagttctctggtattcatcattttttttcatttgctgttaaacattccctatatcctactatttttgaagtataaacttgtaaagtacagttaagaaaaaggttaaaaatgatttttagtagacctcttgtctttatattattatgcacacagcagaaagtcttgacttgggcaaatggatattttaatagctttgagtttgtacatattataagaggttttctcttatttcacttataaatgcacacaaagctaacttataatatgtatagataataccttttattataatactstaaaataaaatgttatatttaataatatatataaaggattcactctccacctatatcctattatgaaagccttgtaagaacatcaatagttcactgcatttgtaagtaatcaatttattattccctgacatttaaattatacttaagggga

SEQ ID NO: 552823 - DNA, 1688 bp, Homo sapiens
catagttcaaacatatggacaaaatatattggataattgtaggtactaatcatagattcataccctaaatcaaattctcattatggtacctctacctctttatttttcaacttacttctcttcctcttaattcataaccctttattttccatagtcttatggtatctgaaggtacattcttaccccactgggcctcgtcacttaacccttcccaattcacccaaaacatgtattcccagtggtaaaaatatcatccccaaagggcaagctgttcaatactcagatgcgtaaaaacatcttagatagtagaataagtgcccaagtaggtatatagtgtatgtttggtgttaaagtttcatggcgggagtgattagagaaaaaaatgtctaaaaaggcattttacgggtgatgataaaaaagactaccaaacaccgacctagaagaataagcatatggatgttcaattatatcaatactgacttcactcttaccctagattcccctgtccctctgctcttctgtattgtttagtctgatggctacaggaatggaaatgtagacttaatctaaatgtagactcaaaggaatggaaatgtagactcaatctaaaattttctaccaactgcattaataaagtataaaaagaaagagttgaaattaatctgaataatatatttgacttaattcaatgtccaagatattcaacatgtaatcaacataattattgagatatattatttttcatatgtgctaatcttcaaaatcaagtgagtgttgtatattttgaatatatttcagtgtgaattataattttcattgaattttcttgatctgttaaattttacaaaatttagttaagcagtagaatcacatacccaagttattctaaacatatttaaatatttccagtaaccatgtcgagttctcattctttcccactgagcctaaatgcagcatcagaatacatttatagttgtttcaagtcatataattcctcataagatagtgttcagttggctataataaattaatcggagttaccatgaaagttgagagcaatctgctatccttgtctttgttcgtaccaccatgttctttctcagaacttattttgagtgcacatagtgagttttaggcttggaaataaaagtgatttgtgggtaacaagagacaacacccatagcaaggagtaaaaagcaaatcttctgtggaagaacagattgtgtttgaatctgcttttgctgcttaccatctatatgatcttgggtaggtcacctaacttccctgagtcttatttcctcattttaamaattggaataacacatgctctgcaggttattatagtttaaaaatataggacataccatgcatttggcacagaaacttgtacaaagaaagcattaaattaaatcagtatctatcattttgagataattaaatatattattagctttctgttcagtatatatattatttggctgcccaagtagctcgttaactttttggaagaaagaattacatgccatattacattttttaatcctttctagaggttactaaaattctaccataggactgacctttaatgactactactgaatgaataaatgcatctgtagccttataattgctctcataatactatttaaaagatgaatttgcctatctaggttaaaatagctattaaa

SEQ ID NO: 552824 - DNA, 598 bp, Homo sapiens
tgcccacttgcttttcctccttttattttcttttctcaacaaggtggtttctcttgtcagattaagaaggrgtagcagtacaggttggtaagtccttatgcaacctgtgatgtgagaattgctataataatgactgaagtcaacaataaaaattcgattcacttcagcaagcatttgttgtatagctttttatgtgcaggcgctatgctagggcctgtaggggatacaaggatgactaaatcttggttttggtccacaaaacaattagaaggggcacaattgcgggaggaattttataagtaaagacatgggggaggaagtgaggatttgggagatgctcagagactagtggctagaggaaatgacttgctgtggaaagaaagaagttggaaaggaagatagcaacctgacagtgagggcttgactgtaattatttcgcacacgattttctatctcataattggtctaatataccaagtgtcagttttcgttgaacaaaacactgaaataatggcacttaaatgagatgaagtcagtgttaatagcttttgaaaagcgtatctgttagttttctcagtattaaatttgcttgtctgac

SEQ ID NO: 552825 - DNA, 849 bp, Homo sapiens
agcgccatattgtggggtagtgtgttcggaaccctgtcactaaccttattccttgtgggttttttcttcttaacacccattattatgtaatgttctatatgtttcacatatttgtttcactttgttttttaaggccttatccaccagaatgtgagctccataggaacagggctttttatcagttttactcactgtttgtgtcattaggactcagggcagtgcttagcacatggaaagtgctcaatttggatggagggatggatgaatggatgaatggatggatagatggatacatggatggatggatggatacatgcatgcatgcgtggatgaaagcatggttgcatgaatggatggacagacggatgsatggacggataaaaaaaatcccaaagctctacaaaacaaaatgtcaaattctaaataaatcgagtatgccaatgagaacactttttttagcaagtgaacacagaattttgcccattttaaagtctttcaaatttttccttataatataaaacatatactagtagcagaacatttaaaaataaaccattccaatgcgtatcaatctctccatgctaatcattaagaccacaaaggcaaaaaccgggccttggtaatcagtgcttggtaagtactaagtccttaatatgtagctaaagaataaatgaagtaaaacaggattctaattcccaccagggaagttagcagtggcaaatttgcatgggcctgcaataatttgattcttgcctccacagaggaaagaattcagccaaggggtataaggcagtataagagaccaaggcaagttttagagcaggagtgagagtttattaaaaagtttta

SEQ ID NO: 552826 - DNA, 674 bp, Homo sapiens
ctacaatatgatcagcactgaaacattttgaaaaagagatgagatttaaggatacatttaactaacaaaaagagtccacttaataggttcaagtaaaggaagttcaggaagacattccaaggacagtgctattttggaaaaggcaccgaattttataataaaaatttatgctaaggtttacaaccatgccacttgtctcattctgtagtgcctccaaaagtgttattgagattaataccagattctataaatgaacaataaataagtcatccaatatttccatctcacttcttttatttcagggttttaaatattttaagactatttaaaggaagctgacaagcaaagtcatccaaacatatccataactaatcttgttttccaacatatgatgtaaaaccaatgaatcacagtaactaactcaaataagtgaccctgcgtcattcctattatgagaacaggccatctgctcattgtcctcgaaagctaaacactgctccagcttaactttgtcagagcagtaattattcactttggcaagcattgcgcgaattgtttgtttcatcaccataaagattctatttgggcatccaaatgctgtatattttcttctctggcattacatgarcattcattcctcttcataatatgggaaatttattcagtgccaatta

SEQ ID NO: 552827 - DNA, 563 bp, Homo sapiens
ggaaagtcagaacttgtagcttttaggaaacatttcctcatccatccgagtgatagcagaagtgatctttggcagggtccggcctatccacagagccayacttttgtcttggatgcagagacctcatgggtgagcaagacctggaggctagggagttgtgggtggggggctccaactgaggttggcctgggtgccaatgatcctgagagggatggcagccctggctcctgctcagcccagctctctagacacgagacccctgttaaagacgggggcgtcaaaaagaacccagccagcttgcttcgcaacattacatgtgaattccgagttgatcattcaggtgtagcctacctatgccaatgatcacacacatcagaaaccgtgaggctctctcctgactcaactagagttattatattaattgctaaatctatccttatttctcattcttcattcaaaagcccgaattttgcatttacctcttgctccccatacccggaagctgtgagccctgaaccgttccagagtggctgtgggtggctaggaaagttccagggcttgga

SEQ ID NO: 552828 - DNA, 563 bp, Homo sapiens
ggaaagtcagaacttgtagcttttaggaaacatttcctcatccatccgagtgatagcagaagtgatctttggcagggtccggcctatccacagagccacacttttgtcttggatgcagagacctcatgggtgagcaagacctggaggctagggagttgtgggtggggggctccaactgaggttggcctgggtgccaatgatcctgagagggayggcagccctggctcctgctcagcccagctctctagacacgagacccctgttaaagacgggggcgtcaaaaagaacccagccagcttgcttcgcaacattacatgtgaattccgagttgatcattcaggtgtagcctacctatgccaatgatcacacacatcagaaaccgtgaggctctctcctgactcaactagagttattatattaattgctaaatctatccttatttctcattcttcattcaaaagcccgaattttgcatttacctcttgctccccatacccggaagctgtgagccctgaaccgttccagagtggctgtgggtggctaggaaagttccagggcttgga

SEQ ID NO: 552829 - DNA, 840 bp, Homo sapiens
agacccggtggggagccgatgttccagtttgagggccatgcatctggagacccggtggggagctgatgttgcaggttgagggccgttcatctggagacccagtggggagctgatgttgcaggttgagggctgtgcacctggagccccggggtggagctgatattccagtttgagggccgtgcagctggcaatctggtggggagctgatgttccagtttgagggccatgcagctggagacccggcagggagctcatgttccagtttgcaggcagtgcagctggagacccggcggggagctgatgttccagtttgaggtccgtgcagctggagatctggtggggagctgatgttccagtttgaggggccctgcagctggagacccatggggatctgatgttccagtttgagggtggtgctgctggcgacccaggcgggagctgatgttctagttttagggccctgcagctggagacccggggaggagctgacgttcccwttcgagggctgtgcaggtggagacctggggaggagctgatgttgttctaatttgagtgtggtgcagctggagatccagggatgagatggccctgcagttcaaatatgagggtcccggagctggactctacgtgaggaaccaatgctgcctctgatgtcttaggttgtggagctggaaactcgtggaggagctggtattggtgtttctagttgagggttgtggtatttccagggtttcacaaaggccagattttatttcagttactgagaagagaaagaaaatgtcttctgaaagaggtgaactcagtcattaccaatagaaaaagtatccactgtatttatct

SEQ ID NO: 552830 - DNA, 1657 bp, Homo sapiens
gcattatggcctcttctttcttcatttgaagcgttccatcattaaatcaaggttttcaaagaggaacccaaaacaggaaaacaattataatcatacttaacttcagaattgattgttttttaccaatgtcaaaatgagtttttggtagaatgctttaaattatgtagtaaaaatatttaaaattatgtgttatttagatctgagaaacaagccttacttgggttttctgtgtgttagatctgtttatttgttacagagtgggaagaagtgtttaaagattacaaggaaagataaagagtgggtgaatatgattaagaggtttctgagaaaaagatgacttttggacacgttttgaagtaaatgtggattgatgggggaaaggatattttctgaaatagattgtgtggttttttaagattagattgctttattaattttttatttctcatatgttaattcatagtgcactaaagatggttggttacctgcagtttaaggatagagaagcagaaatttggggaataaaagatgtttcctgtctttaaattcttcactgttagagcatggtacctagtcctatatgctatgtatgattaccaagcatctctcttttggtatcagcagtcagaagatgtgtgaagcagataaaactgaaagtttaagagcataaaatgaaatctagttgagtatgtatatattctacatcttacaaaaatgtttggcttggtacaaacatgaggtacttagctgccaggctgataatctatgtccaactactgcattttcagaaatacaggtttgtggcaccacctgaactcaaaggataagatttggtgaacaaatgcctagcaagtgtactctgataaggcacaggaagtgcatgacaatcagggacatttctttaacatttaaggaagggattgggaagttatgaaaagaagaaagacagcctgtatatttttgccaaaggacttaaagatgttatttcatatagtacctctaagttcatttttacttatttagcaaacatttatttgcagttttattgtatatcatgcattattatgagtggtttatgaatatgaacttaagtcctcttaacaaacctaaatattttcatgttttcacgagaggatagttcaaatgcttttgctaaatgctaatttttttcccagttatttatttaacaaaggttagtcatttagtttaacatgaagcttcaagcctcagattttgtagtgaaaattctgcactgctctgtggtttcactaaagtaattatgttacaaagatttaatcattttttaacagtggacattctatagacagatattctatattatgtttataatacaggcagaaataggcaaataaaagtaatcttccttcatgtcacaaattaccgtgaaacttttgacagcatgtagatttgaaaatgcattgggggcctgtcgcagtggctcatgcctgtaattscagcactttgggaggctgaggcgggcggatcatgaagtcaagaaattgaaactatcctggccaatatggtgaaaccccgtctctactaaaaatacaaaaattagctgggcatggtggcgcgggcctgtagtcccagctactcgagaggctgaggcaggagaatcgcttgaacccaggaggcg

SEQ ID NO: 552831 - DNA, 683 bp, Homo sapiens
aattaagcaatggataacatttatgaaactagtcttttccccttccaygtattatcccttcttttgctcttatgttaagcttattaatgccataagaagtggaacaatgggagatattatagaaatctttcaaaccagaaagctacttaaacactattatttattgaaatgatactgtgtcaagtggtgtcagcacttttgaggtcagaagcagaggtaatagacaaataacctcatcttaatcataaggtattttggatacatatcttagcatctagcatttccttatcctttctaattctttagcttaattttctagtgttccaataaatcctgtgaggtacccagtccccttctaataaatgttttctataattaagtagagtttctatttagaaacaagaaacctgattagtcaggatattttattataaatgaggttcagagaaataggtaaaattagaaaatgaatccttgatccaattggggctgaaggcaaatgcaaaccagctaagaatcaaaatctggaatattgcacacttggtatgcaatagcatgatgactaactatattatttcttagagtcacctgtgtaaattctccactgaaggcaaagctttgagaatccatcaagaattacttatctgtggatgaggtggttgaataaccataaataaaagaaa

SEQ ID NO: 552832 - DNA, 639 bp, Homo sapiens
aaacttagagtataataaaaaaaataaataaaaataaataaataaataaaaaatcatataaattgatgcctcaataaagctattgttttaaaaagcaaaacaaaagaatagaatctaagactaaagrgaggctgtaaaaaaaaaaaaaaaaaaaaaaaaaaagaaactaccatcagagtgaacaggcaagctacagaatgggagaaaatttttgcaatctactcatctgacaaagggctaatatccagaatctacaatgaactcaaacaaatttacaagaaaaaaacaaccccatcaaaaagtgggcgaaggatatgaatagacacttctcaaaagaagacatttatgcagccaaaagacacatgaaaaaatgctcatcatcactggccctcagagaaatgcaaatcaaaaccacaatgagataccatctcacatcagttagaatggtgatcattaaaaagtcaggaaacaacaggtgctggagaggacatggagaaataggaacacttttacactgttggtgggactgtaaactagttcaaccattgtggaagtcagtgtggcaattcctcagggatctagaactagaaataccatttgacccagccatgccattactgggtatatacccaaaggatt

SEQ ID NO: 552833 - DNA, 656 bp, Homo sapiens
cctagagggtgctcagtagatattactgaataaggattaaaacaaggagaagccctgggttttggaggcagtcaacctggcatgggaatcctagcctgatacatgttatccatgtgaccttaaatattctgtttcttgttaggctattttcccaggacaatgatgccttcttgctctatatttacataaataagtgacctagtgacctttcactggacaaggaacatttgtcttatggtgattttctttctttgccatcacctagaatcaggcagcaatctggctggctaaaaagggaaagcacacatagagagacacacgtataaaaattttatctctggcaggctccactgtgtttggcacccagtcatgcttccattcttgtttggccatataggctatgtaggtstttctatttgtgggtgtatgttacactgaaaacccctaaccattccgatcatgctgctctcctcatctctgtacccaagcagcagaatcctagaagtgaggaactgcttttccacatccaagccccagggttctctgagtaactgtcaaatctgcttctcccagcactcaaccaccctctgctctcgcccctgcccctctgtcacttatcttctgtgttagttaagtccacagctctcacccccaca

SEQ ID NO: 552834 - DNA, 539 bp, Homo sapiens
ctatagatagacacgcacaaaacatacatgcatatatggaaaatatatctcaataaagtgtctgaaattgtgggtctattatattgttatcctaaatgtttccttaggaaaagaccttaaccttagagtatgttgcttcyaagacatggttacatatcaagcacaggagaatatgacttatacaaagtcaaaatattccacttaaaatgaaaacagaacaataaataaatagttctcatatttttaggatttggaaatttggaaattatattctgtttatgcagtcttataataaatatgctcatgttcctttcattcctgagtgagaatgtcaattatatttataataaaaccaagtatcattaaataatatttagctcaacattcattccaatgttaaaagcatgtggccatcaccttagaaagaatacctttagttcttctctaatttaattattaacttaatttattaaatttatgttttggaagaatccttaccaaactttctcttacttaagccaatatatatgcttataagc

SEQ ID NO: 552835 - DNA, 539 bp, Homo sapiens
ctatagatagacacgcacaaaacatacatgcatatatggaaaatatatctcaataaagtgtctgaaattgtgggtctattatattgttatcctaaatgtttccttaggaaaagaccttaaccttagagtatgttgcttctaagacatggttacatatcaagcacaggagaatatgacttatacaaagtcaaaatattccacttaaaatgaaaacagaacaataaataaatagttctcatatttttaggatttggaaatttggaaattatattctgtttatgcagtcttataataaatatrctcatgttcctttcattcctgagtgagaatgtcaattatatttataataaaaccaagtatcattaaataatatttagctcaacattcattccaatgttaaaagcatgtggccatcaccttagaaagaatacctttagttcttctctaatttaattattaacttaatttattaaatttatgttttggaagaatccttaccaaactttctcttacttaagccaatatatatgcttataagc

SEQ ID NO: 552836 - DNA, 549 bp, Homo sapiens
tattgatattttagaattcaactaaaactgagtttgaataaggataatttcatggtttatagccaaaatacactagaattgaaaacaaataattgattctgtggatagacttatgatgttagatcatcttttaagagaaaaaattgtggcttaataagtcaagaatgtgttttgttctctatttcagtttttccactcggtgtaacatactgtgtcgcctgctgttgtttgcaacctttttacagttggcataagtacatacattaaatgtattctgattattatggacgccccactgtgcagctcccattacaatggtatccgttaagcagtgtttttacttcctaagttaccatgttttcgtaatgtgtgttattaagtgctacctctttccagtactttgaggctctataattacccaagaaggcaactgtatggtgtttgtaaatttrcacagaagcgtgaacaagaacacaggctgctagatggcaataacagaatttgtgcctggggattctgctgaaaatggtaatttcagtttaacatttt

SEQ ID NO: 552837 - DNA, 558 bp, Homo sapiens
ggtggcgggcgcctgtagtcccagctacttgggaggctgaggcaggagaatgacgtgaacttgggaggcagagcttgcagtgagccgagatcatgccactgcactccagcctgggtggcagagcaagactccatttcaaaaaaaaaaaaaaaaaatgtaaagccaacacgataaatcttgtctcagaggtcctcagttacatttcaaattcaaataccttcttaacaattttaagaatatgcagctcttgtgggacatttccacacataatgtaagtaaataatygaatgaagaaatggaaaacaaaacgagaaactccaccaaaactactcaatatgtcaaagtgcaagaaatcatttttacaagtgatgagacataaattaacatctaaaatataattataaaataatattatgattttctttattttgattcattagatttcgatcagacgttactgtttggtaaataatagtagaaataatgaagtgaatgaaaactttgttttacagtgactacttttttgtaattgtataaaaaataaactttgggatattt

SEQ ID NO: 552838 - DNA, 558 bp, Homo sapiens
ggtggcgggcgcctgtagtcccagctacttgggaggctgaggcaggagaatgacgtgaacttgggaggcagagcttgcagtgagccgagatcatgccactgcactccagcctgggtggcagagcaagactccatttcaaaaaaaaaaaaaaaaaatgtaaagccaacacgataaatcttgtctcagaggtcctcagttacatttcaaattcaaataccttcttaacaattttaagaatatgcagctcttgtgggacatttccacacataatgtaagtaaataatcgaatgaagaaatggaaaacaaaacgagaaactccaccaaaactactcaatatgtcaaagtgcaagaaatcatttttacaagtgatgagacataaattaacatctaaaatataattataaaataatattrtgattttctttattttgattcattagatttcgatcagacgttactgtttggtaaataatagtagaaataatgaagtgaatgaaaactttgttttacagtgactacttttttgtaattgtataaaaaataaactttgggatattt

SEQ ID NO: 552839 - DNA, 1009 bp, Homo sapiens
taatgacactttcaaaaatagatgcattcccttccaacagtacaacataaaatacaaaattaaactgtcacaaaagtcttcccaaaagattgaaaattatatgatttaatacttttaagtatctttctaaagcggcgcattttcaaatatttctaacattgggagaaaagcccatctgctgaatcttctagttgaagcaaggagttttcagttctgttgagcctttcccagggaacgataggaaaggtgggtggacccgaagagaagatggctgtgtccccagtggggaaggagtaaacaaggcctgtcactaatttctgtggaaattcagagtcaataaagctgaacmctggtgagcaaaatgagacagaagtggagtttcagaatgggaaagaggaaagaaagaaagaagaaacaatcagggcctaacaaggggcagcatatcggagacacatttttccaaaggctgggaaagaaggatgtctggtgacaggtgtttttccacattctgtagaagggcagagaaagagagagaatacatacaagaggagaataatgagattggcacctggaaatcctcaagaacaggcatctgtagtaatagtgtgaacacattttcacatttaactctccaaaaaccctaaatgccaaattctaatattatccccattttatggggaaagaaactgagacttagagaggccaatgaacttcccccggaccacacagcaaagttagcagcaagtcaggaatttgaatctgggtctatttaatcagagcctgcattcttctccaccttgctgtactactagctcttggtaatgcgaggaaagcaggagattcaaaggaatttaggaaagcagtgggggaatgtgaagaaaaggtactggcaaaacttcatacctctagttcttaagtaaaaatttatttaaatttttctttgtgtgtgttttttttttaagccttggcaaaaatgttatcttataccacagtaataaagcatgagatt

SEQ ID NO: 552840 - DNA, 539 bp, Homo sapiens
acgtttatttcctctataaggygtaaacagaaacttttacatcgcaagggctccaaaaatagtgtaagtttagggtaagtttggctatcatctattatacactccatatcagtatatgtggtacttctagtccattcaacaaatataatacaaatataaaacaaaaataatacttcacagtgaagtattatttctttttgtaaaagaggtatctgaggcacagacaagattaataactttaaagtcatccagttagtgactgaaatgggactcacacccaagtctgattccaaggtccatgtgattttctgccacaccattctgattcaattaaatgttaattaagttgggatgacctcaccaggcagaaaacttgtagaagaaatagaattgggttagatatgaaacaacattcctccctcaccaagtccactttataagttctctcattgattaaaagtgggaaataaaccccaaggtttctactgaattgcttggtatactacttctgacacccttcctagatatctcttttcttc

SEQ ID NO: 552841 - DNA, 1947 bp, Homo sapiens
tacagttcctcagggtcccacagtcagggtgggttctgatcaatgtttgcagggcatctagtgatacagagacacaagggctaagattccctgggcaggatagtggccaacgacaggtgcacaaccagtatctcacccatcaccctagttcagatttgaggggagaatgaaagaacttccatgagctggccatcttgtgctctcccctccagaagtccccaaattgctgtggacagcagtccacctgagtgcagagaagtcctctgacaattcagcagtcagtaatatgttgcagaggtgaaggagcaaagaaacaccccacctaccttttccacgggactccaagttcctccgggtcaatctctgccagactcttgctgccttctttttctgtgtccaagccttttcccatgggttctctcacaggtacaaaccatcttctatcagctttccacttggaccatgatcattcgcctgtaactttggatcttctttctgaggagaactgatatctggcatctctagtcagccatttacaatgaccagtttgtggtaaaggatttacaaaggataccaatgaagagatacataggttgaagtgtggaggaagggacacggggcttccatgccctccctgggtgcaccacctccaggaacctccatgtgattctagcatagaaaattaagtaatataattctttacaagaatttaagtaataatattcttaatattcttcacaagaatattaagtaacataattcttcacaagtagtataattctggtcacaagcagggtgcttgtgagagtgtgctatctggtttctaacaggctattctgaaagtcctagataaggtagatttgccactaacttcacacacgtcttctgtagggatccgccctgcccacagccatacttggtgtgttgtggtctctgtgaccctgccccttgcaaaagctggttgaacaaagggtgggaacttgacctgtctatatagtttctgacactttatggcttacgtgatctggtgtgtattggaatggacccaatggcttcctctcttgaaaacttggtcatcaagaaacataggaaattcttggttgaaaagagttactagaattaccctgatttgattagacaaatgtatcaaattatcacgtggaccctgaagatatgtacatctgatatgtatcgtttttcttaaagagttatagagctggaaggttatggatgaaggttatctggggccctagaataagcatcaatagaagaatcttggggcagagagcaggagagaaagagggacagcccctaataaatagagaaacatcgattactaaattttcagtttctgattccatttcttgtgaagtccaagtgctttgagaggatgcatatctgtgttgtatcattaaatcccatttgtttaactgtagcttgagtgggactctgtttcttgtgtcaaaatgggcttgatgagtgaataaagtcatgaggttttcacttttacatccaattgaataaaacgctctccatccccctctcaaggtttgggagttggaatttcaaggtccaaattggggctcttcaagtttattcttcagaaggtacatttgcccaagactaatataaatatatcatgaatgaggcttatggcttttctaagtatgtttgttgtttctccctcttttgaagttatttaaatccagaggggaaaaatatatggattagtaggaagaagtgaaaaggtcagtaattggttatttggtgctggctcatgcttctccagtgctcttaatgatgatrtagttatgacacaaaaacagaacagaggcctggcttcatgttccctgctgttggccacaatgcccagaacggggattcccatccccccatgggcagcttccctttcgcttctccaaacccacttccttgatagatattttt

SEQ ID NO: 552842 - DNA, 508 bp, Homo sapiens
gagccaaaaactcacactctctacagctttactttgactgatgggaagagattttcccctcatttgttttcataaaatggtagcctttccagggcttcagttatgttctgtgcaacactcccrcagagtcaccacacttccaactttagcacttgtttggttttaaattttctctgtgtttccaatttgtgaaaatttatccttgtttttcattttaagcttacatgctttgctttttggtcatgttttaatcagcatttataaatatttgtagtaggtggcatctctgttagctcaatccactatttagaattaaaagacacctgctaaaattttttattaattaaaaatgtgtagaaataaattctaaaataattgtaaaactcaaccttattatattatattcaatatcaattaacatataggcctggaagtaaaccacctggtatcaagtcctagttcttctactgtctacttgagtaaattacttaactgtctgtgcctccat

SEQ ID NO: 552843 - DNA, 508 bp, Homo sapiens
gagccaaaaactcacactctctacagctttactttgactgatgggaagagattttcccctcatttgttttcataaaatggtagcctttccagggcttcagttatgttctgtgcaacactcccacagagtcaccacacttccaactttagcacttgtttggttttaaattttctctgtgtttccaatttgtgaaaatttatccttgtttttcattttaagcttacatgctttgctttttggtcatgttttaatcagcatttataaatatttgtagtaggtggcatctctgttagctcaatccactatttagaattaaaagacacctgctaaaattttttattaattaaaaatgtgtagaaataaattctaaaataattgtaaaactcaaccttattatattatattcartatcaattaacatataggcctggaagtaaaccacctggtatcaagtcctagttcttctactgtctacttgagtaaattacttaactgtctgtgcctccat

SEQ ID NO: 552844 - DNA, 337 bp, Homo sapiens
aagcttcccatagaagcaaatttgtgtatgtgggtgggaactaggatattttatttgtttggggatgcttttattacaggtaaaagcaataactgcatattttggtctgagatgtattttttctactaataaaattaataggctaataagggcaatgatcaccttcaaaaaacacacaattttcgctagttaatgccaggtctgatcagcacattttagatggatggatggttgaatgggtcaatgggtagatggatggttggatggatggatggatgaggaggaggtggtagatggataggtgaatgggtaggtggatgggtggrtggatgggtgg

SEQ ID NO: 552845 - DNA, 337 bp, Homo sapiens
aagcttcccatagaagcaaatttgtgtatgtgggtgggaactaggatattttatttgtttggggatgcttttattacaggtaaaagcaataactgcatattttggtctgagatgtattttttctactaataaaattaataggctaataagggcaatgatcaccttcaaaaaacacacaattttcgctagttaatgccaggtctgatcagcacattttagatggatggatggttgaatgggtcaatgggtagatggatggttggatggatggatggatgaggaggaggtggtagatggataggtgaatgggtaggtggatgggtgggtggatggrtgg

SEQ ID NO: 552846 - DNA, 521 bp, Homo sapiens
ctgtgctagtgtttgttcaagtctttatagaccgagcttaaggcctagttaaaaaaggattcagagaaatctgactcaagtttggtcaaagagagagtccttgccaattgttattctttaggcatttagatatctctgaatacccaaacagagaatacagacaaaaasgaataagcaaactatgttgtcaaggaacagttttattgtcaaaatgtatctcagtgatgattaatgaattggaaagttataagatgcctctattaatcacttttctaaatgagttgagttttgcagcacagctgaaaattttgatttcattgtttaaagcaaattttggaaagaactattgagtgcaagttaaagccggaaactcacagaggcaaagaaacatagaggatggtctgttcccctactgccatagactctataaagagcttgtttcacggcctttgttttcaatgttcctcctatggaaaaaataattgccagttttcccaccaatgtggacacatatatgaaaa

SEQ ID NO: 552847 - DNA, 352 bp, Homo sapiens
agccccaccccggggagccagtccgagcgcggccgctagctggtggtgtaactagacttgtcttctctccaccactgccgcacagtccctgagggcatcggggcgagtgtagctgcaactggggagcctgtgattcgccagtgcccttctccctaggcaagggaagcgrgcaggcaataagaggggcgagtctggggcccaggcttccgctaccgagaccccagtcagcaaacctttaattcagaggtggggaaccaataaggagccctcctgtgcgtactccctcgccttagcgtttgcctgcctccaggccccgtgccccgcggagccagcgcgggacctgcacacggta

SEQ ID NO: 552848 - DNA, 621 bp, Homo sapiens
atgactatcacattgaaaagattttcaatgatatgtcatataatgttgaggctgtgctaatcagtctttaatacaagtctgccttctttttgtattatgggtatggggccaggtttgaataattcaatgctagctcttacaatgaatatcctaattagtgctatatgtttatggttgctaaaatcatcttggctttaaattttaaaaaggggaggaagaggtaaatgcttatcctgggcactttattttgcattgttgaaatagtgccataagatgaaagtggggtccaaagatactataataattgggattaaaacctctggtcaatttttctaccaatccctctgaatctcagttcaatgaagcattttactggggacagggtttccctgattmttttcctcagatgctcagaggaaaaagtaccctatttccagactcaaggatgattacaactttgaggatccagatagaatggatgttgttgtgtaggtgttgctatctttacttgctctttgataagcagtgtttggagggttttagtacaggaaatgttataaattactgttttccctcctgagtccatgatataaaatgagaggggcgcatgtctataatgac

SEQ ID NO: 552849 - DNA, 422 bp, Homo sapiens
ttttttttttttgagacggagtttcactcttgttgcccaggctggagtgcaatggcgtcatcttggctcactgcaacttccgcctcccgggttcaagcgattctcctgcctcagcctcccgagtagatgggattacaggcacacaccaccactcccggctaattttttgtatttttagtagagacggggtttcaccatggccaggctggtcttgaatttctgacctcaggtgatccgcccgcctcggcctcccagagtgctgggattacaggcgtgagccaccgcgcccggctactaggcattatttctaactggaagcatctgtgggcccactgcaaagccttttaactgatttctcttctcctttctttcatcttaaatcaccaaccaacacatcataatctgtgtaaaacacwactttc

SEQ ID NO: 552850 - DNA, 1339 bp, Homo sapiens
tgagatcacagcactgcactccagcttgggcaacagttgagcaagactccatctcaaaaaaaaaaaaaaaaaattggttaaatgctgggaaatgaactttttcatggcctgctaggcaactatcaccagctagagattgctggtggttgtgttttctctgygttttttgagtttctcctatggccctagaccaggacaataggcatctattataggctccgattacaaagagcagaaagaattctttatttctctgctaattactctaaaaatgcaagttgaaagaaagagtaccacctcctgtatccatcagcaaatagcaccatgcctaccaccatcctttaccattcaggccctgctgcctcaaaattctccattgttgtcatgagtcattgaccagcatgggcaatggcaccttccagagtcagcctctgtgcaaagaaagcagaactaggtagagagacacctggcaaaatggaaagcattggcagggatgtgtgactcactgggtaccttccaaatagcatgtggttggttatcatatttcaagtgctttcacattttaacatatatgaagttgggatactgcttgtagtatatacgtatgtatattttttgcacatatacatatacacatagaaacatacacactgcataaggtagtgttcccctttttcccctcaaaaagtatgatgaaatatatggtgtctattccatgtcttccagcatgatatctgtgaatgcaggaaatgcgctcattacgatagccgttgtaatatgttaataatactaaccaaatgagtctgtagtctgtatttttaggtgttggtggcttgcctttttgcattaggaaatcttgcagcttgcttctcttttattaggcaattgtgacacctgctgtcagaaacaaagaacttaccctcttctcaaaagcaggccttttctatggaaaagaaagaaacatggctaggacatgaaaacttctgggtgaagatgagaaaataagttattttttttctgactgtttaaagtgcagtattaagcaggtagcatttttcattgaaacattctaaacagccccaaacctgtgtctctacctccccatccctggctttttccctgaggatgtggtggtgagccatttagagaccaatagttggactaatatttgcaggcatctacccaacctttgggcaggtaggtagcacttttttctagtttctagctacctacatacgtttgcctcatatctcctttctggagatatgactttattaaggtataatttatatacatgtaaaataaaatgcacttacttttaacaaatgtaacagtttct

SEQ ID NO: 552851 - DNA, 1339 bp, Homo sapiens
tgagatcacagcactgcactccagcttgggcaacagttgagcaagactccatctcaaaaaaaaaaaaaaaaaattggttaaatgctgggaaatgaactttttcatggcctgctaggcaactatcaccagctagagattgctggtggttgtgttttctctgtgttttttgagtttctcctatggccctagaccaggacaataggcatctattataggctccgattacaaagagcagaaagaattctttatttctctgctaattactctaaaaatgcaagttgaaagaaagagtaccacctcctgtatccatcagcaaatagcaccatgcctaccaccatcctttaccattcaggccctgctgcctcaaaattctccattgttgtcatgagtcattgaccagcatgggcaatggcaccttccagagtcagcctctgtgcaaagaaagcagaactaggtagagagacacctggcaaaatggaaagcattggcagggatgtgtgactcactgggtaccttccaaatagcatgtggttggttatcatatttcaagtgctttcacattttaacatatatgaagttgggatactgcttgtagtatatacgtatgtatattttttgcacatatacatatacacatagaaacatacacactgcataaggtagtgttcccctttttcccctcaaaaagtatgatgaaatatatggtgtctattccatgtcttccagcatgatatctgtgaatgcaggaaatgcgctcattacgatagccgttgtaatatgttaataatactaaccaaatgagtctgtagtctgtatttttaggtgttggtggcttgcctttttgcattaggaaatcttgcagcttgcttctcttttattaggcaattgtgacacctgctgtcagaaacaaagaacttaccctcttctcaaaagcaggccttttctatggaaaagaaagaaacatggctaggacatgaaaacttctgggtgaagatgagaaaataagttattttttttctgactgtttaaagtgcagtattaagcaggtagcatttttcattgaaacattctaaacagccccaaacctgtgtctctacctccccatccctggctttttccctgaggatgtggtggtgagccatttagagaccaatagttggactaatatttgcaggcatctacccaacctttgggcaggtaggtagcacttttttctagtttctagctacctacatacgtttgcctcatatctcctttctggagatatgactttattaaggtataatttatatacatrtaaaataaaatgcacttacttttaacaaatgtaacagtttct

SEQ ID NO: 552852 - DNA, 638 bp, Homo sapiens
tggaaatgtattagttagaattatatatgagaattctgtacttacatcttttcttttctttttttttttttttgagacgtagtctcgccctgtctcccaggctggagtgcagtggggcgacctctgctctctgcaagctccgcctcccgggttcacgccattctcctgcctcagccagctccgcctcccgggttcacgcgccattctcctgcctcagcctcccgagtagctgggactacaggtgcctgccaccatgcccagctaattttttgtgtttttagtagagacggggtttcaccgtgttagccaggatggtctcgatctcctgacctcgtgatccgcccgcctcggctacccaaagtgctgggattacaggcgtgagccactgcrcccggccacatcttttcagactaagaattattgacacttatactttctgaaccagaatttatcatcattacaataaatatgtacagagtaatgtagtttctggccaaaacataaatgtgaagtttcattctaaaaatttattttaattaaactgtagaattccagatttagtaggtgccttaaagatgctttgttgaagaagttttcctaccacatccttgaggtatggccatccaaacttctactta

SEQ ID NO: 552853 - DNA, 829 bp, Homo sapiens
agtgctagatgatatcagactcctggcatatgatgacacatatcagtgtgtatgcattctgatggaaagcaatgtgtgaaatgctatgacattatttgaataaacaaccttttttattaaacatgctttatccaacttaagaaaatttaagcttagttttagatacccacttctctgtccaagtaagtcatgatagctgtaggtgggacatgwgcatggaatgtgaataatcacccttctggatgattgattgcttcagttcactgaaagtgtttgtttacaagtttaagcagtctgtggaatttggcatgacaggccccctttctcttgccttcaaggaggctagagcttcactgggacaagaaatatcacaaatactgagagaattgctaaaggctatgtaaagcttccagcatagcccatctttcatagaaatattgatatagtagacataataaatattgcataaccttcataattttggcagtggaagttgaagctgataactttcactttttattatttaatttttttccctctggaatctccaagtctatacagtttgaggatttgtttaaatcatgagaatgaataaggaaggttctgtaggttttataggaacgcatatgaagtataatatatactatggagcactcgtattttttttccttaagattctgtttagaaatgatggttagcgctgcaagctttcacgttttctctcagtgctcagaatttttttttttttcttccaggcaagtttctgcagcagcgactccctccagaggctccgtgaaccgagggaagggagtaggaacaccaaatacgg

SEQ ID NO: 552854 - DNA, 628 bp, Homo sapiens
tggaattctgttctatagtttacaaatattttaaggttttttttcaagagaacattccattttttatttccaatttagttccattgtgataagaagagtaacaaagcattggaggactgatatgcatttgaattcattgaattttttttgtattttgttttgttttgtttttaaagacagattcttgctctgtcattcaggcttgaatgctgtggcatgaaaacagctcactrcaatctttaactcctgggctcaaaccacccctgattgagcttcccatgtagctaggactataggcacacaccaccacacctggaaaatttttttcttttaatttttttgtagagacaaggtcttgcaatgttgctcaagctgttctcaaacctctggcctcaagaaaacctcctgctttggactctcaaaaaatggatgagttttatttttgtttgtcccagaagatgtttcatcttgctgatttctttgtgtgtgtaccttaaaagaatttctactctcctcagtggagtgttcgattaatgttatttagatcgagttggtggactatattgttcatgtcttctgcataattactaatttgtgtctacttgttctatcagctattaagagtggt

SEQ ID NO: 552855 - DNA, 628 bp, Homo sapiens
tggaattctgttctatagtttacaaatattttaaggttttttttcaagagaacattccattttttatttccaatttagttccattgtgataagaagagtaacaaagcattggaggactgatatgcatttgaattcattgaattttttttgtattttgttttgttttgtttttaaagacagattcttgctctgtcattcaggcttgaatgctgtggcatgaaaacagctcactgcaatctttaactcctggrctcaaaccacccctgattgagcttcccatgtagctaggactataggcacacaccaccacacctggaaaatttttttcttttaatttttttgtagagacaaggtcttgcaatgttgctcaagctgttctcaaacctctggcctcaagaaaacctcctgctttggactctcaaaaaatggatgagttttatttttgtttgtcccagaagatgtttcatcttgctgatttctttgtgtgtgtaccttaaaagaatttctactctcctcagtggagtgttcgattaatgttatttagatcgagttggtggactatattgttcatgtcttctgcataattactaatttgtgtctacttgttctatcagctattaagagtggt

SEQ ID NO: 552856 - DNA, 1202 bp, Homo sapiens
  misc_feature 2, 3, 4, 5, 6, 7, 8, 9, 10, 11, 12, 13, 14, 15, 16, 17, 18,19, 20, 21, 22, 23, 24, 25, 26, 27, 28, 29, 30, 31, 32,33, 34, 35, 36, 37, 38, 39, 40, 41, 42, 43, 44, 45, 46,47, 48, 49, 50, 51, 52, 53, 54, 55, 56, 57, 58, 59, 60,61: n = A,T,C or G
  misc_feature 62, 63, 64, 65, 66, 67, 68, 69, 70, 71, 72, 73, 74, 75, 76,77, 78, 79, 80, 81, 82, 83, 84, 85, 86, 87, 88, 89, 90,91, 92, 93, 94, 95, 96, 97, 98, 99, 100, 101: n = A,T,C or G
tnnnnnnnnnnnnnnnnnnnnnnnnnnnnnnnnnnnnnnnnnnnnnnnnnnnnnnnnnnnnnnnnnnnnnnnnnnnnnnnnnnnnnnnnnnnnnnnnnnnngaattcaattcctgatgacaccttgttcgtctctgttgtcagaaccctgtacctgactggagtaaacaaactattgttgaataagaaatgagagatctgagtgtgaatcctgactttatcatttatggagtgacttgagcgaagtttcttatcccctctaaatattggtttcttcatttgagaacatggggtcaaaaaccatctactttgcaggattattgtgagggtgaaatgaaaacccaaaccaaaagcacccagcatcctgccatctggagatgttttccttccctccggagtcagttggaactctgaagtgtgcttaacatggggcttgggagacctctccagtttggcccgcattctacagttccttcattttgaggttttaatttaccaattatatatatatttttttataaaggaaaaaccctatttattatagatggtatttgagtgaaaatgcatatcatatgaaaattttactgctgaattccccatttatttgatgcattattcattgaaatcaaatgcgtattcataaaatactgtggtttaggcaccactttggtgatttgttgccaataaaattgacttgtataccaattgaacatagatacattattaagagtgaaacaattattcatcaataaatattttttaatgcacgggctatgtgcaatgtatgtgacaagagaagcataaaacaggctttgccttgaactgtaactgcccaatgggctcaccttgcccattgccctgatagagctgatttatgaagacaagggaattgcaatagggagagtttaatacacatagagccaygaaacaggataccggagttttattattacttaaatcagtctcctcaacaatttggaggctagggttttttaaaagaaatttctagggcagggggcaagggaatagggaatgcggattggttacgtcgggatgaaatcatggggagtcaaagctgtcctcctgcactgaatcagctcctgggtggaggtcacaggacaggatgaggcagtgtaccaatctgggtggtgccagctgatccagcagaatgcaagggctgaaacataccccaaacaccaatct

SEQ ID NO: 552857 - DNA, 1237 bp, Homo sapiens
caccactcaccctatcccttcttagtacctggcactatgtcacacacctttgacaaacatcatttcattcagtccttatggcagccctctgagacagacaaggaagtcccatattgcaaaggcaaaaaagctcagccctgcagaggccaagtgatccatccaaagttaatcagccatgaaatggcagagccaggcctcagactccaaaagctgacctgtcctgctgcctgcctgccacccaccgagccagtgaccgacaagcaggttggccaggagggtcccctggaggcctgcagatgccaccaggatccctgcagggaaatctgagcagggactaaggaaaagctaggcacaagaggacgtcttttctttgcagcaggagagtgtaagcacaacgttcgtgttataggcccttccacaggccatgcggtgatttgcagcatcaaatggggggtttggggggaactgccttagagcagttagggtgggttgttccatcacacttatcccagggtgcttttaaaaatcagagtcctggcctccaccccagacctattaaatcagaatctgtgggagggccactggtacctctagtttttgttttgttttgtttttctgagacagggttctgctctgttgcccaggctagagtgtagtggcatcatctcagctcactgcagcctcagcctccacctcccggcttcaagtgattctcatgcctcagtctcccgagtagctgggactacaggcgtgtgccaccacacccggctaatttttgtactttcagtagagacagggtttcgccatgttgcccaggctggtctcgaactcctgacctcaagtgatctgcctgcttcagcctcccaaagtgttgggattacacacgtragccaacacaccgggccttgtttggtttttgagacacagtctctctctgttgcccacgctggagttcagtggtgccatctcggctcactgcagcctcaacctcctgggctcaagcaatcctcccatccctcagccgctcgagtagctgggtccatggctgtgcaccacaacacctggctgatttttgtattttttgtagagatgggtctcgctatgttgcccaggctgaactcaaactcttgggctcaagtgatttccccaccttggtctccaaagtgctgggattagaggcgtgagccactgcactcggccttgtatctctatttttggcaagcccccatgtaagcca

SEQ ID NO: 552858 - DNA, 1237 bp, Homo sapiens
caccactcaccctatcccttcttagtacctggcactatgtcacacacctttgacaaacatcatttcattcagtccttatggcagccctctgagacagacaaggaagtcccatattgcaaaggcaaaaaagctcagccctgcagaggccaagtgatccatccaaagttaatcagccatgaaatggcagagccaggcctcagactccaaaagctgacctgtcctgctgcctgcctgccacccaccgagccagtgaccgacaagcaggttggccaggagggtcccctggaggcctgcagatgccaccaggatccctgcagggaaatctgagcagggactaaggaaaagctaggcacaagaggacgtcttttctttgcagcaggagagtgtaagcacaacgttcgtgttataggcccttccacaggccatgcggtgatttgcagcatcaaatggggggtttggggggaactgccttagagcagttagggtgggttgttccatcacacttatcccagggtgcttttaaaaatcagagtcctggcctccaccccagacctattaaatcagaatctgtgggagggccactggtacctctagtttttgttttgttttgtttttctgagacagggttctgctctgttgcccaggctagagtgtagtggcatcatctcagctcactgcagcctcagcctccacctcccggcttcaagtgattctcatgcctcagtctcccgagtagctgggactacaggcgtgtgccaccacacccggctaatttttgtactttcagtagagacagggtttcgccatgttgcccaggctggtctcgaactcctgacctcaagtgatctgcctgcttcagcctcccaaagtgttgggattacacacgtaagccaacacaccgggccttgtttggtttttgagacacagtctctctctgttgcccacgctggagttcagtggtgccatctcggctcactgcagcctcaacctcctgggctcaagcaatcctcccatccctcagccgctcgagtagctgggtccatggctgtgcaccacaacacctggctgatttttgtattttttgtagagatgggtctcgctatgttgcccaggctgaactcaaactcttgggctcaagtgatttccccaccttggtctccaaagtgctgggattagaggcgtgagccactgcrctcggccttgtatctctatttttggcaagcccccatgtaagcca

SEQ ID NO: 552859 - DNA, 1325 bp, Homo sapiens
gaaagttatacagttaaaaattcagtgggctctaaacaatggatgtggatgtataagatgaaggtagtgtggctttagaagattctacattcaggcaaatcctattagatcatttttttttaaaccgggctataaattcctttggtataactttctgtttaactaacaatcttatttctttctycataattgttaacgtgtgtagacaatgtcgtgaatccttgtcccctgtctttcccagtcatggaaagcatgctgagtgtcaggtatttcgtaaagaataggcaagtgcctccaggtgatacaattattaacatggtaaaggagaccgggtgccgtggctcatgcctgtaatcccagtactttgggaggccaaggcgagcggatcacttgagcccaggagtttgagacagcccaggtgacatggcaaaacgctgtctctaacaaaaaaattacaaaaattagccaggcatggcagcgctgcacctgtggtcccaggtatgtggtagactgaggtgggaggatggcttgagctcaggaggtggaggccgcagtgagccgagatagtgccactgaactttagcctgggtaagagaatgagactgtcttaaaaacaaaacaaaaaacatggtaaaggggcatgtcatgtattattacattcacttagtattcaaggaagtattttaggtaaaaggtgtccaaattaggaaaccaaagcactgttggctttcccaagaatctgaagaactctctgagcctggtttcttgctagcaccattataaatgagttagaggtggtgaggcagctggttctgctgtcccacgccgcctcaggccaactgcttcagttacaaggtgttctgtaatctccctggctgctcacataatgaattgcaaggcttctttgaattcccatgtacttaggtttaattttcccttccctgcatctttcccctgcatactgcaggccttttaaacaaatacccactggtgggcggtgacattggcatgaggggaggcatcctcctggatcagttgcaagcctcctagcagctgatgccatggaagaatggagtagcaccgaagcagctccagttcttttaagtggtccctgaattaggcctcgatgtcatgtaggtaaattcagcccagaacatgcagaatctttattggaatttgtacattcatctctcacagctgtggagagtttagactaatcacaactctcactgggatactattatcttggtaatttgaaaaaggatcaggagcctgcaggcttggaacatcttgagaaaactctggctctgaaatacatcatcaca

SEQ ID NO: 552860 - DNA, 579 bp, Homo sapiens
ctgtcttacagcctcctgattagctgggattgtaatcccatgattattacatgagccaccatacccatctgtaatacttttaaaataataatgtaatgataatatgagtgataaataacagctgttgattactaagtgctagctctgtgtgacatttgccatgcatttccttatttgatctttctagcagacctggtaggtaattgaggcttagagagattaagttgcctgaggttgtacaactaatgttagaatgagattgggacccacctggtgtgactccagaattagagctcttaatcaataacatcctgtaagagacttaaggcaggtgaaatgaccttttaagtttctgtttatccctgtcttcagtggttgctgttatcacactatggccagaaaagaagcaagtgtgtgctgtgtaataaattctttctgttcttccatagaagacatcaggggtgaggtccacaaagttgcgcaaagcaaatgtaaagaaagtagttacttataaagaaatgtttgtaatgacctcaactcatatgcttgttgaactwtgtcttaagatgtagaattagc

SEQ ID NO: 552861 - DNA, 509 bp, Homo sapiens
ggccaaaggagaaggcgccgagagcggctccgcggcggggctgctacccaccagcatcctccaaagcactgaacgcccggcccaggtgaaggtgagggcccggcaccccgcgtggagggcgaggggagggaggaggcggaaatgggggatcaggggcgtcccggggtcggcctggtcaggggaccattgggatagccagggacaggaagcctacgagccagagaggacctgggggtgccctgggacagggggtgacggagaaaagctgtgggcgccctcgccccyctttgctcacccgcactccacgctctgcggagaggctctgccggcagccccatgtgattccccgctctgcctagccggtttccattcttccgtgttgagcggctggggcttgccgccccaaaccccagagatgaccccagaaatctgggaaactccccttggttccccatctctcatcccctacctcccactccacccacctactcttgcgcctcaactctgct

SEQ ID NO: 552862 - DNA, 677 bp, Homo sapiens
ttcactccagatggggttgattgggcccctctcacaccctgttcttatctcggccccagtcacactgccttctgcttgtctcttttctttcctactacttctatgagacggagcttctgargggcttggaccctgccttctcacacttcatatccccaatgcctagtataatacctagcatagattaggaaggcacttaattgatggcagcttgatgaatggataaataattgaataagtgaaagaaagcaaaaagaaagaatggaaggcagattcttggggaaaaatcagttctatgacaatcagttgctggatttcctgtgaggagtagaaaacaactgagacaaagctgtttgttctgaaaaacaagccccagagtctaggtgggagctgagagccccggagaagccacatctcttcattatcttaagtgcaatgagcacttcaagagacatgaatcaactgattagcaagggcagcctactccaggagaggtattctcttgcaattttctcaaaaacacaaaggcaggtgagattataacactataaacataattgcattttctaatcaaaagtgcaacataacttgggtaattatgaggcgtcagcggtgttaccactttatatcctgagtatttttatcactacgagttgggtagcaactgctcaaacatt

SEQ ID NO: 552863 - DNA, 532 bp, Homo sapiens
tgaaatattcaaatgccaagaaacacaaaagcagttcagaattatacttgaggaagagttatgtgactccactatcattacttaattcgtacaaagtgccttaaataagtggttttatctttatcttgtgattttttatttagtagatttctatgaatctgtctaatgatgacaggccagcaggacccatgtgctgaagcatatctaacaatgcaatcacagtaatttgaaaaaataacaaaagaataatcatagctatatattctctggctggttttgaattcaaatgcaaaaatgtgggtaaatgttcaaaattaatgtatctaaagctaaaaagaaaaacctggctcactaggaaacattttaacttagagtgtcaaataataaagttaactcaacgtaaaagcaaaggaaacatattttgtgttttgttttccagggctgaacacaaagcttttaatattagtcaaaagtttgataaaaggatgcagcactatctgaatcagaaargtagtttttgctcttaccacta

SEQ ID NO: 552864 - DNA, 551 bp, Homo sapiens
tgtaaggacacagaaggcggccatctataagccagaagtgagccctcatcagaaaccagccatgcctgcaccctgatctcagatttcagcctccagaacagtgagaaaatacatttctattgtttgagtcattcagtctgtggtattttgttatgggagccagggcaggctaatacagttgttttttccaattccttctttttactttgaaggattaaagagttctttagggatagaagaaaataaatgtaatattaaattgatttcaagtttgtgtgtgagaaygttttaactggtttagttccagattgtaaaaaaagaagaagaaatgagaaagaactcaggtctcagaggaaaggtaacacccttccacagggctcaatataacttctttctttgttttcttttcttttcttttctttttgagacagagtctctctttgtcacccaggctggaatccagtggcgcaatcttggctcactgcaacctccacctcccggtgatcaagtgattctcccacctcagcctcccgagtagctgggactaccgg

SEQ ID NO: 552865 - DNA, 1593 bp, Homo sapiens
tatacatacatatatatatatgtatgtataagtaagaagtgaagtcaaatataattacagcgttttgtttggttttgcttttgttctttgctttgcttttgtttaacaatgagaatctatccaagctattattaacatttgattacttagatgccaagttttgcttttagttcataaggaaacgtagtcgattttatcactggatactactggtagaaactttgaattgatatttcggtgaaaacctattttcattgaattgtcaaaccacaaatgctatatataatagcaatttagaacaagaaaaacaacctgattttgattaaaatgaggatacataatgaaaagtcaccacaaaataaactttactctgttactggcttttgaagaaaatcatttagatattaaatctatagatagaacatttctctgcctcatgtaatattttattcttagttaaaagttttgaggtataaagtaatgcattgtatttctttgtagatcctcccagttatagatatcctatgaagcaaagtaaattgggaaaggagataacaggtggagtggcagcttttggcattctataagttggttaaaaatattttcctcttagtatataaatcttggaattgatctcttaatctttttggtagcactaacaggtggtttattttatgatttttttcccttggttttcctttgcttcctgtctttttatcacaaagttactcttcatttgaakgcttctattggaacaaattgctaggttaacagaatgcaaggagacaagtcatcctgtcaggtacagaattcattcagtgctgtcaaatttcttgtattggggaaaattttaggtaggtggaagaaaaacctttcccttcacataacagatcaaaagtgtcatgtcacaagcatgagaaccatttgtcatgctgaaagaaacttcttttcttaagtttatgaataattacatcatgagtgacaatcaagataaaaactgtacttttatctaagtgcacatgtaatcatgagtaaagtgcttcctgaaagacgagcaagaatattgcttcaaaaataatcttacatttatctgtctcacttagcaatcaagcacaatgaaatgtgttattcttctaataattcaggcaagaaaaaatgtgatcaaagtatgtgtaaaattcatagcttctgtctgtgtcttcatcggtggtcaacccagaaactttcacttaatgagacaactaagattaagtttggaataaaagaacggtatgaattaattttagaatgctatattatttgtcttctgacttatgaactgtatgaattaattttaaaatgctatattatttgtcttctgccttcatttaattcttatggaatttgaatttttcataaaaaatggttctgagcaagtgctgcagtggatacaagataactggatcctagcactggctcttccatttacaagttgcaccatagactgtgacaaggtatctgatatagtttggctcttctctgtgtccccacccaaatctcacattgaattgtaatccccaacgttgggggagggaactggtgggaggtaactgg

SEQ ID NO: 552866 - DNA, 1593 bp, Homo sapiens
tatacatacatatatatatatgtatgtataagtaagaagtgaagtcaaatataattacagcgttttgtttggttttgcttttgttctttgctttgcttttgtttaacaatgagaatctatccaagctattattaacatttgattacttagatgccaagttttgcttttagttcataaggaaacgtagtcgattttatcactggatactactggtagaaactttgaattgatatttcggtgaaaacctattttcattgaattgtcaaaccacaaatgctatatataatagcaatttagaacaagaaaaacaacctgattttgattaaaatgaggatacataatgaaaagtcaccacaaaataaactttactctgttactggcttttgaagaaaatcatttagatattaaatctatagatagaacatttctctgcctcatgtaatattttattcttagttaaaagttttgaggtataaagtaatgcattgtatttctttgtagatcctcccagttatagatatcctatgaagcaaagtaaattgggaaaggagataacaggtggagtggcagcttttggcattctataagttggttaaaaatattttcctcttagtatataaatcttggaattgatctcttaatctttttggtagcactaacaggtggtttattttatgatttttttcccttggttttcctttgcttcctgtctttttatcacaaagttactcttcatttgaatgyttctattggaacaaattgctaggttaacagaatgcaaggagacaagtcatcctgtcaggtacagaattcattcagtgctgtcaaatttcttgtattggggaaaattttaggtaggtggaagaaaaacctttcccttcacataacagatcaaaagtgtcatgtcacaagcatgagaaccatttgtcatgctgaaagaaacttcttttcttaagtttatgaataattacatcatgagtgacaatcaagataaaaactgtacttttatctaagtgcacatgtaatcatgagtaaagtgcttcctgaaagacgagcaagaatattgcttcaaaaataatcttacatttatctgtctcacttagcaatcaagcacaatgaaatgtgttattcttctaataattcaggcaagaaaaaatgtgatcaaagtatgtgtaaaattcatagcttctgtctgtgtcttcatcggtggtcaacccagaaactttcacttaatgagacaactaagattaagtttggaataaaagaacggtatgaattaattttagaatgctatattatttgtcttctgacttatgaactgtatgaattaattttaaaatgctatattatttgtcttctgccttcatttaattcttatggaatttgaatttttcataaaaaatggttctgagcaagtgctgcagtggatacaagataactggatcctagcactggctcttccatttacaagttgcaccatagactgtgacaaggtatctgatatagtttggctcttctctgtgtccccacccaaatctcacattgaattgtaatccccaacgttgggggagggaactggtgggaggtaactgg

SEQ ID NO: 552867 - DNA, 525 bp, Homo sapiens
acattgctgacatgaaaattcttgggaaaaaatcttgaaatgtttagttcattcatcaatatcaatctgacaatcatgggctttgaactgtaattattcacattgttcccacttcactacaatgcaaaatatgtaacagttcatctcactgtaataaaatataattggctttcctttatattcccrcagctcagcataatgcctggaacaggctaattgtataatgatacaggtttaactgaatgaacaaatggttgcatggatgaacaaacaaattaaccttttatcttccattaccattgaagacaatgtagaagtaaataaagaaaagttgtgaaacaagtctctcacctgagggaggcagaggttctgctaattatagcaaatttccagtggttaaagaatgagtgatgtgggaatagtaatatgaggcctgttacttagggggaaataggtcctaattttaaagaatagttgacatgaacttccaaaaagctacacatatttcataactagctgtgtatt

SEQ ID NO: 552868 - DNA, 2034 bp, Homo sapiens
tgcacttgggaggggcggggctcctgcctactcttggctcccaagagcacaggagtgccctggtagcagccacagcttgggtggctgcagttgcacctgggaagctcccactctaccaactttctggctccataaagcatgcagccctagccataccactggtctgcattttccccttagtggcagcaggcaaggtgcgggtggctggtggcctcagccaaccccgcgcaaacaaacccaatgctcctggggccaccccacaagtcctggctgcactatcagctcacagactcctgagacgcagcacacagcgagattgaaggcacggcagaggttccgggcctgcagtgggtcctgcccagttgtgcaagggtcggggtggtgcagtcagctgcctcagggatgtagggcacaggggacccaccactaccactgctgctcccacagccactyctgccaccaccacttgtgcctccatactgcagctggcgtgataacagtggctgctccagatggcacaccgctgccattagtatcgttttctttatgcctgaaggacatcccttaacttttcttatagtgcaggtctgcaggtagtaaagtcgttcagctttttcgagtctgaaaacttctttatttcttcatctattattctctttttgatgaccgttagttaaaccaatccattgaactttccatttcaattatgatacttttcatttcgtttctacttggtactttccccaatctatttggttattttcatgctcaagttatttcaactcctttatttctttaagtataaaacgcactttgtactgtctttggtaacttgactgtcttaagtttttgcaggcctgctctttctgtccattgtttctgctggctcttgccgattttacatttgtgattttttattgtgaacttatattccttgaaagtatctcagagtttctccaaagacaatccattttgcatctgtcagtcacctagaaggcaccaaaaagctgatattgctttaaatttgaagcttgagacattttagaccacccaggttgtgtgaacaaaccagttaaagggctatatatatatatatatatatatatatatatatacacacacataaaactctcaggggagatgttttctctcaggatacccaatgttcctcactgttcctagggaagcaggggtcaagggaagcatacagggggaggcggacaggtttattcatagttcacccttacactaagtctgtccttttggatctcactttatgatgtctcctcttagcccctcccacttgggcaggccctcagctttgtctgctgttctgctgccccttttccacctcacgctgtgaaaaacagcaaagtttagtttgacaggcaaatatctgaagggtgaaaagtggcatcagtgccttagttacttctttgggtttcacttccattttaaaacttttttagctttttggaattcttattttgtagctcattgacacatttttaagaggttcttgatatgtattccagaagctttagttgtttccagctggtccttatcagccctactgttggaaataaaattctttcaacttgttctttagcaatgtacaggctccatagagctctcgctgatcctgaggcaacagggtaagaacgtcacttaggaatcaggctggcctgagatcaagtctcagatccaccagcagtgtgacatcagtgcctcgctttctttatagggttggtgatatggtttggctctgagtccccagccaaatgtcatgtcgaattgtaatttccaattacaattggaaattgaatcttacaattggaaattgattattgaatcataggtgtggacatcccccttgctgttcttgtgatagggctctcatgagatctggctgtttaatactgtatattaacttcccctgtgctcctgctgtccatacgaagatatgcttccttccctttcaccttctaccatgattgtaagtttcctgaggcctcctcagccatgcttcctgta

SEQ ID NO: 552869 - DNA, 622 bp, Homo sapiens
cgagaatacattttattgcattagtagtgcttttagaagagacatcaatatgatgcccaggctggtcttgaactcctggtcttaagcgatgctccctcctaagcttcccaaagtggtaaattgtacttcctgagggcatagaaaagagacatagaagcaagtgaaattggtattacccttttttctgttactctttattagtaaaacaaattaggtttttctttccttggttttcatgtgtccaagctcctttctctttcatttcacatgtgcacaaatataataacatacacttttgaacatcaaaagttgaatgatgaaagatcattcgttagcccaaatcaacctgcacatgactttttttttattcckctgagagttagcctgtggaaaggtggcagggtttcactgcattatccactgcagatggaaaggtcaatgacaacatgtgtaattgcttcagtcctgattttctacatacactttctgctgcggggttgtttcacctgaccaaggcagtttctgtggcagcaggtcctagctctctcgaccaggtccactgacaaagccactttgctgagtggccaatttgctgatgactattttgttaaatttgtttctg

SEQ ID NO: 552870 - DNA, 549 bp, Homo sapiens
ccaaaagaaagatactggaagacaatctgatatatacatttgtatctcatatatatgatttgagctttatacatttataacatacaggttgactttgcatgttagatcagtatgtgatttgcacataatcacagggaatgaacacaatttccaatatggtaggagaattgactactgagtactcattttctctttctcttatatattattatactagtggaattgactataaattatatgaatagtgaaaatttcatgctaattttaatgtgacaaaacataatcttggacatattttttgtcatmtagagattatgaatgttcttgctgctaaaatgttaattccacagattaaatatgagttacttttttcttttataaaagtagtacttacaaacatgctgaccttcatattatccagcaaatattggagctggtgaagtgatatctaatgtgtccttttaataaaatttatttttgaaaaatgagaggataactaatttggcaaaaatgtcctataaacaaaaacttattttgaaaattttaaca

SEQ ID NO: 552871 - DNA, 549 bp, Homo sapiens
ccaaaagaaagatactggaagacaatctgatatatacatttgtatctcatatatatgatttgagctttatacatttataacatacaggttgactttgcatgttagatcagtatgtgatttgcacataatcacagggaatgaacacaatttccaatatggtaggagaattgactactgagtactcattttctctttctcttatatattattatactagtggaattgactataaattatatgaatagtgaaaatttcatgctaattttaatgtgacaaaacataatcttggacatattttttgtcatawagagattatgaatgttcttgctgctaaaatgttaattccacagattaaatatgagttacttttttcttttataaaagtagtacttacaaacatgctgaccttcatattatccagcaaatattggagctggtgaagtgatatctaatgtgtccttttaataaaatttatttttgaaaaatgagaggataactaatttggcaaaaatgtcctataaacaaaaacttattttgaaaattttaaca

SEQ ID NO: 552872 - DNA, 531 bp, Homo sapiens
caaaaacttcaaaaagaaacaagagtaatctgaaagataacaattattaattcctaagttaagcttatggcataggaagtacaaaggtaggacatatgatcaatatgattcggtaagttatcttatatatgaagcattaatagaaaattkttctaatatttcaagtttaagagtgtgtaagtttgctgacagagaatattgagtggccaagaaggcatatgtggttttagatgattgaacacaataagagataaaatagtccaccaggaaatctgaaacataggattggatctcatgaaagatattatgaatggatgggaggggacataattaatgctatagttacttgcagacaaaaaaaaaggaaaacaaaagaaaaaataaggatgcaaatgggagagcaacgaaatagaaaaatgaaccgcatttcgaagtgccatatcattggaggaaagacattttcaggtaagaaggagaaccaagccaaagatataaaatgaaatcaaaagggtcatgaaggaacgataaaga

SEQ ID NO: 552873 - DNA, 531 bp, Homo sapiens
caaaaacttcaaaaagaaacaagagtaatctgaaagataacaattattaattcctaagttaagcttatggcataggaagtacaaaggtaggacatatgatcaatatgattcggtaagttatcttatatatgaagcattaatagaaaatttttctaatatttcaagtttaagagtgtgtaagtttgctgacagagaatattgartggccaagaaggcatatgtggttttagatgattgaacacaataagagataaaatagtccaccaggaaatctgaaacataggattggatctcatgaaagatattatgaatggatgggaggggacataattaatgctatagttacttgcagacaaaaaaaaaggaaaacaaaagaaaaaataaggatgcaaatgggagagcaacgaaatagaaaaatgaaccgcatttcgaagtgccatatcattggaggaaagacattttcaggtaagaaggagaaccaagccaaagatataaaatgaaatcaaaagggtcatgaaggaacgataaaga

SEQ ID NO: 552874 - DNA, 1355 bp, Homo sapiens
ctgaatcatcagaaataaatttgcctgagacaagttaaagatgagtctgcaaatatgttcatgtggtttcctaaacttacattgaagatatttgcagtatcatttataagttaaatataggcattataaataatcacatctttataaaagttatttttcttattaaatgaaaatcaataaaatatcttagaaatgaaaaacttttagataattaaactaataagcttatgtgaaggataaataatggacacctatgagacttagagcaggcctggatttcattcttggattctgattccagctccatcactatcacattttagttcttataggcaattcattaagacattcaaaactgttcacattggtaaatgagggagtttgatttgattctttggctctttttaacaataaaagtctgtgattgcaaaataaatttccatggtactcttacatacttcatgtcagtttaaactcaagtgtcttttctgaggtccagtgtgccagatatggcttgtcttttgcaaccatcatgccggggtttttgaattaaagatacgaccaggattctatgtcctcagaaattggaataaatattcttgttctctttgcatattaaagcatatttgcctataaaacactatttccagcatttttcactggatagttctagaatgtaggttaggactatccctcttctccagggagttaattgtggtattgcatcctttctttagatgtcatgtcaagtttcatattaacagaacactagacacttcaatatgacaaatgtaggtttaaatacacttttgctacttattatccatctacttaaaccagtttgaggtctgatcactggaaatgaatcttacatagttgaaagaattaaaaaggcataatatgcaaaatttctgatacataagcaataaatcttagtgtgctcattcttattgtatgctaatcttctttctttattttgttttctaacagtaaccccttttccactcaagaaaacaaaaacaaaaacagtctgttctcatgctgctaataaagacagagctgagactgggtaatttataaagaaaaagaagtttaatggacttctacatgrctgaggaggcctcacaatcatggtgaaaggcgaaggaggaacaaaggcacatcttacctggcagcaggcaatagagcatatgcagggaaactgtcctttataaaaccggcagatctcattagactcattcactattacgagaacatcatggaaaaacccactccatgattcaattgcctcccaccgggtccctcccatgacacatgaggattatgggagttacaattcaagatgaaaagacgga

SEQ ID NO: 552875 - DNA, 3194 bp, Homo sapiens
gtaatagcagagctagtttgtagcataaagaaaaaataataatattaggtgacacaaataatgctagccaccatttctaagtgtcatggtaagtacagtgattattttctttttttctgactcttttttattggattttttattttttttcccataggttattggggtacggtggtatttggttcgggtccatgaataacttctttactggttatttgtgagatttgggtgcacctatcacccgaacagtgtacactgcaccttatttgttatcttttatccctcgccccccaccctattaaataatagacaaaaaataatgggtttagaataaatgagttcaaatgaattgtcaaacgtatgtgggaaaagtggaatcagtttgtgagaaaaaggaaaaaaactcaacagaaatgctgataaagcatcatcccttcatggctagagctgccaggacactagaacaccaaaatcagctagggaaattttgtagaagtcccagatgtactagatgttctgtgaatacacagagatataattataactgttacctgcatgtagagtaaagatgagaaggcattggtcatggtggcagctacctcaggagttacaaagcagacgtggttccaggacagtgtatgtcagggcaaagctgtcctaggaggctattaggagttggttatggcatagacattgtaagtcagatggtctcattactttcaatgacaaaaccaaaattacttttgtatcagcctaatacaacggcctggcaagagcacagaaaaagtccctgtgctgttaggtggggacctctgatgcagcacaattccttcattcccttctccaaaacccccctcttccaattccactgaagagagaatctgatggaagtgctgtgtaagtaggctcagatatatctaccactatagatagtagaggtgattcataaatccaagcctatcaaatacatcataaagttacacgtttaatttttttttgaaattagggatcatgatataaaagttatcagaatcaaaactgtcagtaatctttaaaaagaaaagaaaaaacctggacaaatagattcagagaaggccttgaagagagggttctcatgcttctaggcctgatacaaactgtcacaaaataccacaaaatccacaaccttgcacaaaggccatagcaaccttacacaaaatacacttctgtgaggacatctatccaacaaccacctgctcaaacttcagctgacatcgaccttgttgttgatctttatagtcaaagataactataacaaaacaattatataagcctcttcatttttcctttatttttttctactcccccataattccaggttgatcgcttttcttttaaagaccttgtcttcctttaccatttgaatctacacagtttgctttgtcatgcatattcccattgcagtgtcctcctccctaagatgtgtctttttcctttaaagaacctttctctgtttgttatttaggtttacaatgagaaggcgtgtaaagtaattttactgtcttcctaggaaaaaatcactgacttatatttatatttatttatttacattcctggggatgaggaattaaagatttcacaaattttcttattgagaagatccaagttttcatgtgagcaaaactgaatatgtaaattgatatgtaaattatgctgcagataatatgctcaaatgtttacttgtatttaatttgttacacatgaatattgcatatgtaagataatatactaagaaattatcacatttaatgaaatgctttaatcaaattcctgattgaatttttgatatcaatatctttttccttgtttaatccatctttagagtgaacagggctgtctaggccaaagtcctcacttctatctaaattgtctgagttacagaactttttgaatttattatgttgtcacaggaagtttcttattgcttgcttaaaggagtygctctcaatatgatgcggaatccaaaagcactgaagggcatatatcctgagtttctgttactgaagccaaaggttgccaatttcttgtagatcctgctagagttaaacttcatttaagtaatcattaaaagctgcatttattccctcacttgaacttttgatttcacactattaggactaatcctctaagtctttgctaagttatgttcctccttttcttgtggcttgactctgatgctctctatatgcaacatcaattgatgtaaagtacattcagggcaatagagtttctttaaatattactttgttattcaaaataatcacaaaagcactcatcgtaggaaaacttgtgaggactcaaatatagggaaatactttttctttttaaggcacaattctctaaagaagttcaccttaatttgaatatacatgggaaaatatccttgttcactaatagtctatattcactctgttttcttccctcatagaccagccggttcactattattttccaaatgatgtgtgcctctctagagtccaggctatctgcatatctaatttttcccacaaattactgttttgaattgcactgaattcaattcaaggggatgtcatttataaacagtgcaaatatatactgcacgagggatcttagaactcatacacatggtttgatccataagctcatatgagcgtgcaatgtcaacttttttcatgttttttttaagtccacttaaattctattttaagccaccatctgccagtgctgttagggcagttagccttcaatcattttaagatggtcccctctaagtaccgtgatagtgatagagatatcaccagtcaggtgtcctaggaagccgactccgagttggagatttgcatgcaaggaggttgaaatgatattcccaacacctgtgggagagtgaaagcaataggattgggcggagcaggaagtcggctagaatgcaatcactatcatggctgcagtccactctacagggatcttggtgagtttacctaatgacctggaattggagcaagaaaaccaggccattatatttctgtaccaagcagttctcggatgtgggatgccttgagaagggatatgaacttggatgaaggaactttactgtgctgtgagtattgttgccaggagtcagctgtcaacactcccaggagacgggaaattatgctttagtcactgaggcggca

SEQ ID NO: 552876 - DNA, 3194 bp, Homo sapiens
gtaatagcagagctagtttgtagcataaagaaaaaataataatattaggtgacacaaataatgctagccaccatttctaagtgtcatggtaagtacagtgattattttctttttttctgactcttttttattggattttttattttttttcccataggttattggggtacggtggtatttggttcgggtccatgaataacttctttactggttatttgtgagatttgggtgcacctatcacccgaacagtgtacactgcaccttatttgttatcttttatccctcgccccccaccctattaaataatagacaaaaaataatgggtttagaataaatgagttcaaatgaattgtcaaacgtatgtgggaaaagtggaatcagtttgtgagaaaaaggaaaaaaactcaacagaaatgctgataaagcatcatcccttcatggctagagctgccaggacactagaacaccaaaatcagctagggaaattttgtagaagtcccagatgtactagatgttctgtgaatacacagagatataattataactgttacctgcatgtagagtaaagatgagaaggcattggtcatggtggcagctacctcaggagttacaaagcagacgtggttccaggacagtgtatgtcagggcaaagctgtcctaggaggctattaggagttggttatggcatagacattgtaagtcagatggtctcattactttcaatgacaaaaccaaaattacttttgtatcagcctaatacaacggcctggcaagagcacagaaaaagtccctgtgctgttaggtggggacctctgatgcagcacaattccttcattcccttctccaaaacccccctcttccaattccactgaagagagaatctgatggaagtgctgtgtaagtaggctcagatatatctaccactatagatagtagaggtgattcataaatccaagcctatcaaatacatcataaagttacacgtttaatttttttttgaaattagggatcatgatataaaagttatcagaatcaaaactgtcagtaatctttaaaaagaaaagaaaaaacctggacaaatagattcagagaaggccttgaagagagggttctcatgcttctaggcctgatacaaactgtcacaaaataccacaaaatccacaaccttgcacaaaggccatagcaaccttacacaaaatacacttctgtgaggacatctatccaacaaccacctgctcaaacttcagctgacatcgaccttgttgttgatctttatagtcaaagataactataacaaaacaattatataagcctcttcatttttcctttatttttttctactcccccataattccaggttgatcgcttttcttttaaagaccttgtcttcctttaccatttgaatctacacagtttgctttgtcatgcatattcccattgcagtgtcctcctccctaagatgtgtctttttcctttaaagaacctttctctgtttgttatttaggtttacaatgagaaggcgtgtaaagtaattttactgtcttcctaggaaaaaatcactgacttatatttatatttatttatttacattcctggggatgaggaattaaagatttcacaaattttcttattgagaagatccaagttttcatgtgagcaaaactgaatatgtaaattgatatgtaaattatgctgcagataatatgctcaaatgtttacttgtatttaatttgttacacatgaatattgcatatgtaagataatatactaagaaattatcacatttaatgaaatgctttaatcaaattmctgattgaatttttgatatcaatatctttttccttgtttaatccatctttagagtgaacagggctgtctaggccaaagtcctcacttctatctaaattgtctgagttacagaactttttgaatttattatgttgtcacaggaagtttcttattgcttgcttaaaggagtcgctctcaatatgatgcggaatccaaaagcactgaagggcatatatcctgagtttctgttactgaagccaaaggttgccaatttcttgtagatcctgctagagttaaacttcatttaagtaatcattaaaagctgcatttattccctcacttgaacttttgatttcacactattaggactaatcctctaagtctttgctaagttatgttcctccttttcttgtggcttgactctgatgctctctatatgcaacatcaattgatgtaaagtacattcagggcaatagagtttctttaaatattactttgttattcaaaataatcacaaaagcactcatcgtaggaaaacttgtgaggactcaaatatagggaaatactttttctttttaaggcacaattctctaaagaagttcaccttaatttgaatatacatgggaaaatatccttgttcactaatagtctatattcactctgttttcttccctcatagaccagccggttcactattattttccaaatgatgtgtgcctctctagagtccaggctatctgcatatctaatttttcccacaaattactgttttgaattgcactgaattcaattcaaggggatgtcatttataaacagtgcaaatatatactgcacgagggatcttagaactcatacacatggtttgatccataagctcatatgagcgtgcaatgtcaacttttttcatgttttttttaagtccacttaaattctattttaagccaccatctgccagtgctgttagggcagttagccttcaatcattttaagatggtcccctctaagtaccgtgatagtgatagagatatcaccagtcaggtgtcctaggaagccgactccgagttggagatttgcatgcaaggaggttgaaatgatattcccaacacctgtgggagagtgaaagcaataggattgggcggagcaggaagtcggctagaatgcaatcactatcatggctgcagtccactctacagggatcttggtgagtttacctaatgacctggaattggagcaagaaaaccaggccattatatttctgtaccaagcagttctcggatgtgggatgccttgagaagggatatgaacttggatgaaggaactttactgtgctgtgagtattgttgccaggagtcagctgtcaacactcccaggagacgggaaattatgctttagtcactgaggcggca

SEQ ID NO: 552877 - DNA, 3194 bp, Homo sapiens
gtaatagcagagctagtttgtagcataaagaaaaaataataatattaggtgacacaaataatgctagccaccatttctaagtgtcatggtaagtacagtgattattttctttttttctgactcttttttattggattttttattttttttcccataggttattggggtacggtggtatttggttcgggtccatgaataacttctttactggttatttgtgagatttgggtgcacctatcacccgaacagtgtacactgcaccttatttgttatcttttatccctcgccccccaccctattaaataatagacaaaaaataatgggtttagaataaatgagttcaaatgaattgtcaaacgtatgtgggaaaagtggaatcagtttgtgagaaaaaggaaaaaaactcaacagaaatgctgataaagcatcatcccttcatggctagagctgccaggacactagaacaccaaaatcagctagggaaattttgtagaagtcccagatgtactagatgttctgtgaatacacagagatataattataactgttacctgcatgtagagtaaagatgagaaggcattggtcatggtggcagctacctcaggagttacaaagcagacgtggttccaggacagtgtatgtcagggcaaagctgtcctaggaggctattaggagttggttatggcatagacattgtaagtcagatggtctcattactttcaatgacaaaaccaaaattacttttgtatcagcctaatacaacggcctggcaagagcacagaaaaagtccctgtgctgttaggtggggacctctgatgcagcacaattccttcattcccttctccaaaacccccctcttccaattccactgaagagagaatctgatggaagtgctgtgtaagtaggctcagatatatctaccactatagatagtagaggtgattcataaatccaagcctatcaaatacatcataaagttacacgtttaatttttttttgaaattagggatcatgatataaaagttatcagaatcaaaactgtcagtaatctttaaaaagaaaagaaaaaacctggacaaatagattcagagaaggccttgaagagagggttctcatgcttctaggcctgatacaaactgtcacaaaataccacaaaatccacaaccttgcacaaaggccatagcaaccttacacaaaatacacttctgtgaggacatctatccaacaaccacctgctcaaacttcagctgacatcgaccttgttgttgatctttatagtcaaagataactataacaaaacaattatataagcctcttcatttttcctttatttttttctactcccccataattccaggttgatcgcttttcttttaaagaccttgtcttcctttaccatttgaatctacacagtttgctttgtcatgcatattcccattgcagtgtcctcctccctaagatgtgtctttttcctttaaagaacctttctctgtttgttatttaggtttacaatgagaaggcgtgtaaagtaattttactgtcttcctaggaaaaaatcactgacttatatttatatttatttatttacattcctggggatgaggaattaaagatttcacaaattttcttattgagaagatccaagttttcatgtgagcaaaactgaatatgtaaattgatatgtaaattatgctgcagataatatgctcaaatgtttacttgtatttaatttgttacacatgaatattgcatatgtaagataatatactaagaaattatcacatttaatgaaatgctttaatcaaattcctgattgaatttttgatatcaatatctttttccttgtttaatccatctttagagtgaacagggctgtctaggccaaagtcctcacttctatctaaattgtctgagttacagaactttttgaatttattatgttgtcacaggaagtttcttattgcytgcttaaaggagtcgctctcaatatgatgcggaatccaaaagcactgaagggcatatatcctgagtttctgttactgaagccaaaggttgccaatttcttgtagatcctgctagagttaaacttcatttaagtaatcattaaaagctgcatttattccctcacttgaacttttgatttcacactattaggactaatcctctaagtctttgctaagttatgttcctccttttcttgtggcttgactctgatgctctctatatgcaacatcaattgatgtaaagtacattcagggcaatagagtttctttaaatattactttgttattcaaaataatcacaaaagcactcatcgtaggaaaacttgtgaggactcaaatatagggaaatactttttctttttaaggcacaattctctaaagaagttcaccttaatttgaatatacatgggaaaatatccttgttcactaatagtctatattcactctgttttcttccctcatagaccagccggttcactattattttccaaatgatgtgtgcctctctagagtccaggctatctgcatatctaatttttcccacaaattactgttttgaattgcactgaattcaattcaaggggatgtcatttataaacagtgcaaatatatactgcacgagggatcttagaactcatacacatggtttgatccataagctcatatgagcgtgcaatgtcaacttttttcatgttttttttaagtccacttaaattctattttaagccaccatctgccagtgctgttagggcagttagccttcaatcattttaagatggtcccctctaagtaccgtgatagtgatagagatatcaccagtcaggtgtcctaggaagccgactccgagttggagatttgcatgcaaggaggttgaaatgatattcccaacacctgtgggagagtgaaagcaataggattgggcggagcaggaagtcggctagaatgcaatcactatcatggctgcagtccactctacagggatcttggtgagtttacctaatgacctggaattggagcaagaaaaccaggccattatatttctgtaccaagcagttctcggatgtgggatgccttgagaagggatatgaacttggatgaaggaactttactgtgctgtgagtattgttgccaggagtcagctgtcaacactcccaggagacgggaaattatgctttagtcactgaggcggca

SEQ ID NO: 552878 - DNA, 3194 bp, Homo sapiens
gtaatagcagagctagtttgtagcataaagaaaaaataataatattaggtgacacaaataatgctagccaccatttctaagtgtcatggtaagtacagtgattattttctttttttctgactcttttttattggattttttattttttttcccataggttattggggtacggtggtatttggttcgggtccatgaataacttctttactggttatttgtgagatttgggtgcacctatcacccgaacagtgtacactgcaccttatttgttatcttttatccctcgccccccaccctattaaataatagacaaaaaataatgggtttagaataaatgagttcaaatgaattgtcaaacgtatgtgggaaaagtggaatcagtttgtgagaaaaaggaaaaaaactcaacagaaatgctgataaagcatcatcccttcatggctagagctgccaggacactagaacaccaaaatcagctagggaaattttgtagaagtcccagatgtactagatgttctgtgaatacacagagatataattataactgttacctgcatgtagagtaaagatgagaaggcattggtcatggtggcagctacctcaggagttacaaagcagacgtggttccaggacagtgtatgtcagggcaaagctgtcctaggaggctattaggagttggttatggcatagacattgtaagtcagatggtctcattactttcaatgacaaaaccaaaattacttttgtatcagcctaatacaacggcctggcaagagcacagaaaaagtccctgtgctgttaggtggggacctctgatgcagcacaattccttcattcccttctccaaaacccccctcttccaattccactgaagagagaatctgatggaagtgctgtgtaagtaggctcagatatatctaccactatagatagtagaggtgattcataaatccaagcctatcaaatacatcataaagttacacgtttaatttttttttgaaattagggatcatgatataaaagttatcagaatcaaaactgtcagtaatctttaaaaagaaaagaaaaaacctggacaaatagattcagagaaggccttgaagagagggttctcatgcttctaggcctgatacaaactgtcacaaaataccacaaaatccacaaccttgcacaaaggccatagcaaccttacacaaaatacacttctgtgaggacatctatccaacaaccacctgctcaaacttcagctgacatcgaccttgttgttgatctttatagtcaaagataactataacaaaacaattatataagcctcttcatttttcctttatttttttctactcccccataattccaggttgatcgcttttcttttaaagaccttgtcttcctttaccatttgaatctacacagtttgctttgtcatgcatattcccattgcagtgtcctcctccctaagatgtgtctttttcctttaaagaacctttctctgtttgttatttaggtttacaatgagaaggcgtgtaaagtaattttactgtcttcctaggaaaaaatcactgacttatatttatatttatttatttacattcctggggatgaggaattaaagatttcacaaattttcttattgagaagatccaagttttcatgtgagcaaaactgaatatgtaaattgatatgtaaattatgctgcagataatatgctcaaatgtttacttgtatttaatttgttacacatgaatattgcatatgtaagataatatactaagaaattatcacatttaatgaaatgctttaatcaaattcctgattgaatttttgatatcaatatctttttccttgtttaatccatctttagagtgaacagggctgtctaggccaaagtcctcacttctatctaaattgtctgagttacagaactttttgaatttattatgttgtcacaggaagtttcttattgcttkcttaaaggagtcgctctcaatatgatgcggaatccaaaagcactgaagggcatatatcctgagtttctgttactgaagccaaaggttgccaatttcttgtagatcctgctagagttaaacttcatttaagtaatcattaaaagctgcatttattccctcacttgaacttttgatttcacactattaggactaatcctctaagtctttgctaagttatgttcctccttttcttgtggcttgactctgatgctctctatatgcaacatcaattgatgtaaagtacattcagggcaatagagtttctttaaatattactttgttattcaaaataatcacaaaagcactcatcgtaggaaaacttgtgaggactcaaatatagggaaatactttttctttttaaggcacaattctctaaagaagttcaccttaatttgaatatacatgggaaaatatccttgttcactaatagtctatattcactctgttttcttccctcatagaccagccggttcactattattttccaaatgatgtgtgcctctctagagtccaggctatctgcatatctaatttttcccacaaattactgttttgaattgcactgaattcaattcaaggggatgtcatttataaacagtgcaaatatatactgcacgagggatcttagaactcatacacatggtttgatccataagctcatatgagcgtgcaatgtcaacttttttcatgttttttttaagtccacttaaattctattttaagccaccatctgccagtgctgttagggcagttagccttcaatcattttaagatggtcccctctaagtaccgtgatagtgatagagatatcaccagtcaggtgtcctaggaagccgactccgagttggagatttgcatgcaaggaggttgaaatgatattcccaacacctgtgggagagtgaaagcaataggattgggcggagcaggaagtcggctagaatgcaatcactatcatggctgcagtccactctacagggatcttggtgagtttacctaatgacctggaattggagcaagaaaaccaggccattatatttctgtaccaagcagttctcggatgtgggatgccttgagaagggatatgaacttggatgaaggaactttactgtgctgtgagtattgttgccaggagtcagctgtcaacactcccaggagacgggaaattatgctttagtcactgaggcggca

SEQ ID NO: 552879 - DNA, 3194 bp, Homo sapiens
gtaatagcagagctagtttgtagcataaagaaaaaataataatattaggtgacacaaataatgctagccaccatttctaagtgtcatggtaagtacagtgattattttctttttttctgactcttttttattggattttttattttttttcccataggttattggggtacggtggtatttggttcgggtccatgaataacttctttactggttatttgtgagatttgggtgcacctatcacccgaacagtgtacactgcaccttatttgttatcttttatccctcgccccccaccctattaaataatagacaaaaaataatgggtttagaataaatgagttcaaatgaattgtcaaacgtatgtgggaaaagtggaatcagtttgtgagaaaaaggaaaaaaactcaacagaaatgctgataaagcatcatcccttcatggctagagctgccaggacactagaacaccaaaatcagctagggaaattttgtagaagtcccagatgtactagatgttctgtgaatacacagagatataattataactgttacctgcatgtagagtaaagatgagaaggcattggtcatggtggcagctacctcaggagttacaaagcagacgtggttccaggacagtgtatgtcagggcaaagctgtcctaggaggctattaggagttggttatggcatagacattgtaagtcagatggtctcattactttcaatgacaaaaccaaaattacttttgtatcagcctaatacaacggcctggcaagagcacagaaaaagtccctgtgctgttaggtggggacctctgatgcagcacaattccttcattcccttctccaaaacccccctcttccaattccactgaagagagaatctgatggaagtgctgtgtaagtaggctcagatatatctaccactatagatagtagaggtgattcataaatccaagcctatcaaatacatcataaagttacacgtttaatttttttttgaaattagggatcatgatataaaagttatcagaatcaaaactgtcagtaatctttaaaaagaaaagaaaaaacctggacaaatagattcagagaaggccttgaagagagggttctcatgcttctaggcctgatacaaactgtcacaaaataccacaaaatccacaaccttgcacaaaggccatagcaaccttacacaaaatacacttctgtgaggacatctatccaacaaccacctgctcaaacttcagctgacatcgaccttgttgttgatctttatagtcaaagataactataacaaaacaattatataagcctcttcatttttcctttatttttttctactcccccataattccaggttgatcgcttttcttttaaagaccttgtcttcctttaccatttgaatctacacagtttgctttgtcatgcatattcccattgcagtgtcctcctccctaagatgtgtctttttcctttaaagaacctttctctgtttgttatttaggtttacaatgagaaggcgtgtaaagtaattttactgtcttcctaggaaaaaatcactgacttatatttatatttatttatttacattcctggggatgaggaattaaagatttcacaaattttcttattgagaagatccaagttttcatgtgagcaaaactgaatatgtaaattgatatgtaaattatgctgcagataatatgctcaaatgtttacttgtatttaatttgttacacatgaatattgcatatgtaagataatatactaagaaattatcacatttaatgaaatgctttaatcaaattcctgattgaatttttgatatcaatatctttttccttgtttaatccatctttagagtgaacagggctgtctaggccaaagtcctcacttctatctaaattgtctgagttacagaactttttgaatttattatgttgtcacaggaagtttcttattgcttgyttaaaggagtcgctctcaatatgatgcggaatccaaaagcactgaagggcatatatcctgagtttctgttactgaagccaaaggttgccaatttcttgtagatcctgctagagttaaacttcatttaagtaatcattaaaagctgcatttattccctcacttgaacttttgatttcacactattaggactaatcctctaagtctttgctaagttatgttcctccttttcttgtggcttgactctgatgctctctatatgcaacatcaattgatgtaaagtacattcagggcaatagagtttctttaaatattactttgttattcaaaataatcacaaaagcactcatcgtaggaaaacttgtgaggactcaaatatagggaaatactttttctttttaaggcacaattctctaaagaagttcaccttaatttgaatatacatgggaaaatatccttgttcactaatagtctatattcactctgttttcttccctcatagaccagccggttcactattattttccaaatgatgtgtgcctctctagagtccaggctatctgcatatctaatttttcccacaaattactgttttgaattgcactgaattcaattcaaggggatgtcatttataaacagtgcaaatatatactgcacgagggatcttagaactcatacacatggtttgatccataagctcatatgagcgtgcaatgtcaacttttttcatgttttttttaagtccacttaaattctattttaagccaccatctgccagtgctgttagggcagttagccttcaatcattttaagatggtcccctctaagtaccgtgatagtgatagagatatcaccagtcaggtgtcctaggaagccgactccgagttggagatttgcatgcaaggaggttgaaatgatattcccaacacctgtgggagagtgaaagcaataggattgggcggagcaggaagtcggctagaatgcaatcactatcatggctgcagtccactctacagggatcttggtgagtttacctaatgacctggaattggagcaagaaaaccaggccattatatttctgtaccaagcagttctcggatgtgggatgccttgagaagggatatgaacttggatgaaggaactttactgtgctgtgagtattgttgccaggagtcagctgtcaacactcccaggagacgggaaattatgctttagtcactgaggcggca

SEQ ID NO: 552880 - DNA, 503 bp, Homo sapiens
aaaccatcagatctcatgagaactcattcactatcacaagaacagtctgtgggaaactgcccccatgattcatttatctccacctggtcccacccttgacacatggggattattacaatttaaggttagatttgggtggggacacagccaaaycatatcaagtagttactattttcatcatttttaatctgccagacattatggcacattactttaaccttcataacaaacctaagagatgaatatttccatcctcattttacagattacataattgaggcctagataatttaagtgatttactcaagatcacttggctaataaaggtcagagctaggatacagactcagattttctggactccaaagtcttaaaaagtttgtattataggtatcagtgattgaagatcaaattaatgaaataaagcaagaaaacaaggttaaagaaaaaagagtaaaaagaaacgaacaaagcttccaagaaatatgggactatgtgaaaag

SEQ ID NO: 552881 - DNA, 627 bp, Homo sapiens
ctgtgaggttactgaagaaacctgctcaagaagctcaagacaaactaaaaatgtaccatttcatagcttattggaataaactagggtgagaggggaaaggcatctgaactatgcatgtaaaaagttataacagccaggaagagcaatcctgtctttaatactgagacctctatggatgtttatatcggcaattaaaagtcagcacactactgagaactctatatttatatcaggaattaaacgtcagtacactggccacataaggcctatcaatgctgcgattgtccttgcatggaaattaaaatatgaatttggaaacctttggatggtccatgttctctgaagtttgctgcagtccccactgctccctgttgtcgcrtcactcatttatatgttacatgcttggctcctgcaagcatctgagtttgggatccctgattcagatgaggttctatcagagcatttaccaaaactttagttctcagaatactttacattttcatgtgccagttgcttcttgaaactttctcacatccccagacagaattaattaatatagcataattcaagtggtgacaaaagcatttaagcaaagtacaaggatgaagaatccaatatatcatctta

SEQ ID NO: 552882 - DNA, 564 bp, Homo sapiens
tctggctgtcttaaaataaaaaataaaaaaattccacccagaccttgcccagagtttcatccctggtattttatcagtatgatataccagatgcttgatgacaccctgtgtgtcagaggcagatgctctggtcctgatggaggtcggggacacggaaacacggctccccaggaatctgcgctgaaggcttatttctaacatcactttaaaaaccattgacttcggacaatctgaagtktatcagcagccttttctatgtggaggcccatgacagcgtggcagctttgtggaagggatgtcagatcgttttatcgcaggaagctatccaagagagcatcaggtgctgtttcctcctgacaggtgagtgacaaagcatgttgctgggtccacaccccctctgcacacagtgtgctgataaacgtgtgtaggtcagtgtccctggctgattccatgctgctcaagaacttagatctctctgtcatcccaaattggaaatgagattgctaaggctcggttgctgctgatgtggttagaatagaatgggtccataacaaacctgtgggc

SEQ ID NO: 552883 - DNA, 606 bp, Homo sapiens
ggaactcctagcgcttatgttcattaattctcttctctcagaggtcctgtctttactgccggctgtccaatatctgacaacctttgatttatgtattttatgtgattttctggcattgaagttgggaatttaaatacatttctgttatttcctcataggcagtggtagaaatccataacaattattatatttttaatcaaggtctcagatgcagttagccaagtaaatatgctaatgagagcataaccaaattggaagctccctggactagctttagcactaycatgctcaaacaacacaatttcctaaaggccaacacatggagaaatgtatttagtattacttcgtgaccagctatgggatcagaggttttgatagatttaacttattatcattactaattattacatgatttgtattatatgtatttggatttccaaggttaaacaatataacaatagagataattggattattgtcctttgatagacactccaaatagagtctcaacatcacacttaataagttaattttagataataaaaattaacccaggcatattgttctctactgtatccagtaaatatggggccagtcaagatttga

SEQ ID NO: 552884 - DNA, 1907 bp, Homo sapiens
gaagaaacttgatgtcagtaccaaagaaatatatttctcttatttttatgtttcagtatataataaagaatcactttgggggaaaaattgggaaattattgtttaacccccccgccccacaaagtagacttcaattttaatgcaaagtgaatttcaatagtgaagctattttataacaaataagaagatgaaagtatgtaataaaatttataatgggcattgatatgtaatctttgcagtctagtctatctttaccactcagtttggccacaaccatgctggaaacactgattcacaaattatgttttatcaaatggtatcagtgttcccatgaccagaattactaacttatacaaagctagttacagaaacctaagacaaacaaatgtggtttaaacaaaacagaggcttacttttttctcatttatatcatcaatatcacacacttctgtctttcgtcttcaccatccttaacatgtgactcatagtgataatatcattgcacaagaaagataaatgaagaggaaaaagtaaaagtttaattactgctgcttatacctcattgtctatttttgtctgggatgaagcctgagaagtgaagtctttctatgagggggtaggaggtcatatttctacctccaatagtatagataatttaagaaataaggagaatttatattgagtagaaaattaagcagtccctactggagaagaaacccttcaatcgaggcacaaaattataacaatctatatgcattcatgatgtattctataatttcttttactcacaagtcagtgaaaaggagtttaataagttctgttagtgttccctcctcagtaagaatgtaacaattaattcatatcccactaagttgtagtaaagacgaattctctgcaaatccagtaaattatctgagtggtagagaacttcatgttttattctcatcacataaattaaaaaatacttaaaaggaggatgagtcaaggctgtagttctgatgatgacaaagactttcttcgtgttagacaagactgctgcaataatatatataaaaaaaatagtgcagcacttgccaatgtggaaattagagagtcacaatttttgtgacgctcttgaccagaatagcaaataagatgtatggccaggcgttgtacatttcacttatattgtaactctaagctttctttttcagacagagctaattggtaaaggggttttccaaacaattaaaggcacaaaatatatttttaatcatcaggaagctactgaaaaattagtaattckcctatttaatggcattaatacgcacacaacaggaaaagcagaatcttatagccttgagggaaggcagaatttcattctaattgcatactgattggaaatgggatagctgccattttcttcaaaatattcatttcaaaatactgaaagataactttggtatttctagatcagataatgtaatttggtagcagaaatggcttcaattttcttcccttgctctaaggctcaaaccaactcaagcatttctaaggcacatgtccaaattagttatctgttttctgaacagatgcttatgtggtttcatctgctgcaaattaataataaataatttatcacatatgtgttatctaattttcgaatacattactacttgttttttttttcaataagatactgaagagttaagggtgaaatatctcagaccaaactaacgttttgctctttccagtttctatttactcagattaatatggtaattcgattcattgaaattaaccacaatgttcctggttagagtctgttaaaacttctcttcaaaagttaatttactaatttgaggttcttttaagataaggtttatttcaagttgctttaaatgggttcactttgaaattcagtattt

SEQ ID NO: 552885 - DNA, 553 bp, Homo sapiens
cggatggatctggtggttattattacacccctagcttcttgcagattgtgtttcctggctttctgctgtagaaacagacagaaacatctaagattctatatttttcagaggtgaaatcttttgtccacacgagattcaggagactgcgctcaatctctatagcaaaccctgagcacgggtgtcgctatacccatttcaccatgagcagcctgcccaggtcacccagtgagcggcagaactggaagctgaatccacaccatcaggctccaagtcctgctgccttcctattactttcctgaaacagattttacacgtgcagagattctctttaaggagaagacagtcaaaacccacccccaggcaaatgcagagctgaccagcactgagagatgasaggagtggatttcttccatgctgaaccatggctatttcaggatgggtgcagagagagagggctgaacgtggcactggaggggtgtgaccgggagggccggaggagatttcaagaacacgaaaagcctcacacacaaccctaaatgcacggaactcacgg

SEQ ID NO: 552886 - DNA, 553 bp, Homo sapiens
cggatggatctggtggttattattacacccctagcttcttgcagattgtgtttcctggctttctgctgtagaaacagacagaaacatctaagattctatatttttcagaggtgaaatcttttgtccacacgagattcaggagactgcgctcaatctctatagcaaaccctgagcacgggtgtcgctatacccatttcaccatgagcagcctgcccaggtcacccagtgagcggcagaactggaagctgaatccacaccatcaggctccaagtcctgctgccttcctattactttcctgaaacagattttacacgtgcagagattctctttaaggagaagacagtcaaaacccacccccaggcaaatgcagagctgaccagcactgagagatgagaggagtggatttcttccatgctgaaccatggctatttcaggatgggtgcagagagagagggctgaacgtggcactggaggggtgtgaccgggagggccggaggagatttcaagaacaygaaaagcctcacacacaaccctaaatgcacggaactcacgg

SEQ ID NO: 552887 - DNA, 753 bp, Homo sapiens
atgcagtgaatatcctggtggatatttaatagacgttctctgagttgaccttgcctggatggagatgcatggataatagacactctgtgtttctgctgcccattatactccaaacacttgcagccctgtcgtcagtgcaacctgagtyagttgttcattaatccaactatttattttagctgcacttgctgccatcatttgatttcatcaaatgttatgtaattttaatgaaagttcagatttgaagagatttgctaacattgaatcaccaaatttctgtcaaataaggcatagtagagacagctgttaaaaaaaaaaaagacttggcaacgaattagaaaaatggagattctatttccagatttctccccaggtgtctttaagtctttccaccactttaaagaaacaaaatctgaagattgtaaatgaagtattacgaacaaggtttttgcaaaatagacgaaacagaacttttatcagttgaccgatatggacgaaagaggcctctgatttacatcataagatttgcaagtgaatgcacatttatttgcttgaaattaaaattacttttggggggagattcttcccattttccatgtttaaaattaacctattaatgaccagtttggaccacatcagatagaaagtagctaccgtctgtatttgagtccatgtgaacatatctataaaactaagtttctgaaagtgggattatacagtggatatttgtgaattttcccttttacagaaatt

SEQ ID NO: 552888 - DNA, 641 bp, Homo sapiens
taaattgaccaagacactgcccaaaagaatgtagctgtttctccctaaagaatactctcaatgctgcactggggtgcttggaacaaaatggacaaagaggagatggaaaaggaagtgtggaggttttgtaatatgcataatacttaagggaagaatggcatattgcaaattttaatttgagaaaacagaagtgtttcatacaccatttccttcaaataaaaaattatttaaataggtggatttttttctcacattgtaaggaaatcatagtttcactcttctttttatgtatttatttatttatttttaattttattattattacactttaagttttagggtacatgtgcacaatgtgcaggtttgttacatatgtatacatgtgccatattggtgtgctgcacccatcamctcgtcatttaacattaggtatatcctgagttaatttccgggctctagacaccaaacgatagacaccaactgacaaataaaacagttctgaaaacctgaaaccatcaatcctgttttttccccttgtgtttcctttctggtctctccccagagagcattataattctctttaaggactgtggccagtgatggcaatgtggatctaaatttctctttgactagggaatgag

SEQ ID NO: 552889 - DNA, 1334 bp, Homo sapiens
catgggaacaataccatgagctccatgagagcacagacaaggtctctttattctccactgtgtcctcagatccttgcactgtgctgagctaaagaaattcctgagatatttatgaattggatgaatgaatgaatgaatgcaaaagaggcagcacaaatgccaaagaggtgtcaaggaaggcttatgcaaagggtgggtgacattgagtcttgaaatttgtgtgaagttggcctggactggagagaaggaggatgtcagtccagagagagaagccatcagaggaagaatggagggtgatgaatttggcacaggtggcaccaaggtcccctgatacagctccagctttcatttctaggccacctttaggacataactggatcagatttggaacttacatggagcttccaaaatgctgacagtctctatractgtgacagtatttgatatctgccaatcccctggattttttgtttgtttgtttgttttttattttttgagatggaatttcactctgttgcccaggctggagtgcaatggtgagatctcagctcactgcaacctccgcctcccaggatcaagcgattctcctgcctcagcctcccaagtagctgggattataggcatgtgccaccatgccctgctaattttttttgtatttagtagaggcgggttttcaccgtgttggtcaggctggtctcgaactcctgacctcaggtgatccacccactttggcctcccaaagtgctgggattacaggagtgaaccaccatgtccggccaatttttttttttttaaaccaaagtaacaattacgtcacctaacctgttcttccagagggttggtgtgcttgtctggggagaagtgggttgacaagttcaatgaggcatattcaggtcactcccttgtctgtttttattaacatgaagaaagggattcagacgcaagtgtgtctttactcaaccagccagccagcagtttacctgggttctcatcattcattaacttggtgacgtgtgacaattcacccaacagctctcaggttcagctccctcatctcgaaagtggaacagaatggctcacctaatttatcaggataatcccgtccaattctgttgctgtgaaacacccctaaatgaggagagggtgaatgcagagctccaggagtttgacaatatcgcccaaagcacaagtctgttgttttatcttaaaaaatcacagagcttttgcattctacttgtcggtataacttggtttgctttatttgtgcatattttaaatgacttactagtgagccagccaggaaaaaggtgaggagagtgaggccctcaccttaa

SEQ ID NO: 552890 - DNA, 1075 bp, Homo sapiens
tccctcatcagcctccccaagggctgggattatagatgtgagccaccaagcctggccctagtctcttttttgatgtacagaatcactctggaatgcaggcaaagccaggattgctatattcattttacatatagggaaactgagattcaaagaggttcagtgtcatatctggccaagataatctcagttttcaggcaaagcagcatttttcaacttaacctctacctaaccttctactgcccattctctttccatccactcattctttagccagccaggtggtccttcctaagaaaaaagagaggcatgagatgatggaatttctttcctgcaggagctctgtccagtgggtaatatagccagggagtgagtggggtaattgcattcagtgcatttagtatataataacattatggtcaaggaatatgggaacatagagaatgcgatggtcagggctctgggctggggaaggggattgtggtcagacaaccatggcatcaggacataggcacaggctctaaggcatgaggaaagccaatctttgggggagttgcagcattgacaagtgttagagaaaagacacatgagggtcaggctggggaatgacagaggatcatgatgcggccctttccctctctcatggygtctccttatcctctccttcttgttcactttggccacactggtttctatgctgttcctccagtatcccagctgaactctcacctcagggcttttgcattggcttttccaatgaaaactgccaggagtgatctttgctttgagaaccttgacactaacaatcccacttcttccaagtctactccagtgttatttaggctgatttggaccacctagttttgcaaccctcccaccccatctccagaactctagatcctttttcccctgtcctacttcttcctttttccatagcacttaccatcttctaacatactttgtaatatacctccttatagggttattaatcatggctttctccttcagctggaatgtaagctccataaaggcagggatcattgcctctgatttatccaagtacctagaacagcactgg

SEQ ID NO: 552891 - DNA, 680 bp, Homo sapiens
atgcgtttggccagagtgagaacaagtttcagttgtctgacaatctsacggaatctgaagggcctgacttgcatcctggtgagagccaaggtcagttcattctggccaacacttgagcagcaagaacaaggctatgagtattttttagaataaaacttgatcaaggcttcaaatttctctgcctgacaacttcagcgagatggttttggcttacaaacattgttaagagtggatactatcattttattttaagggaagtgtttctgaacgtggggtccacggaccacctgcatcagaatcactctggacatgtgttaaaatgctgatgcaccctctgccttttgagaaccactttttttttttttttttttttcagagaaggggtcttgagctattgcccaggctggtctcaaactcctggcctcaaggaatcctcccgcctctgcctgtccgtgctgggattttaggcatgagctaccatgcccagctgagaaccattttcttaccaaaaatcattctccatagtctctccatccactaggatttctttctttttcttctttgtaaagataggtcatacttgaacacaggatttcttacctacaaataacctactcaagcttagtagattgagttatctgcaaattgttttcctaaacagctaaataatcaatctattg

SEQ ID NO: 552892 - DNA, 680 bp, Homo sapiens
atgcgtttggccagagtgagaacaagtttcagttgtctgacaatctcacggaayctgaagggcctgacttgcatcctggtgagagccaaggtcagttcattctggccaacacttgagcagcaagaacaaggctatgagtattttttagaataaaacttgatcaaggcttcaaatttctctgcctgacaacttcagcgagatggttttggcttacaaacattgttaagagtggatactatcattttattttaagggaagtgtttctgaacgtggggtccacggaccacctgcatcagaatcactctggacatgtgttaaaatgctgatgcaccctctgccttttgagaaccactttttttttttttttttttttcagagaaggggtcttgagctattgcccaggctggtctcaaactcctggcctcaaggaatcctcccgcctctgcctgtccgtgctgggattttaggcatgagctaccatgcccagctgagaaccattttcttaccaaaaatcattctccatagtctctccatccactaggatttctttctttttcttctttgtaaagataggtcatacttgaacacaggatttcttacctacaaataacctactcaagcttagtagattgagttatctgcaaattgttttcctaaacagctaaataatcaatctattg

SEQ ID NO: 552893 - DNA, 2350 bp, Homo sapiens
atagactcagattcccaaaacagctcagactggagagatgggcagactctatcaagatgaaaaaagaaaaaaaaatccttcttgacttctctgtaggtttattattttttgtcacttaaaaaaatagcacactcacataatacaaaagtaaaaatacaaaaagatatatagtaaaaagtaaagagctttctctgacccttgtgccctagctacctagtgtgcttctctcgaggcagccaccatttcctgcctcctctgtatccgtctrgagaaattctgtgcatttccaagcatatatctcacatggtgatttttttttttttttaatagagagacaaggtcttgctttgtcacccagcctggagtgcagtggcatgatcatagctcactgcagcctcgaactcctgggctcaggcaatcctcccacctcagcctccccagtagctaggactacaggtgcaaaccaccacacctggatatttttaaactttttgtagaaacaggctctcactatgttccaggctggtcttgaactcctggcctcaagtgatccttccaccttggcctctcaaagtgctaggataacagatgtgaactgccaagcccagccacatatggtgaaatttaagggtgactaattttagacattaaaatggtccagaaaaatccatggcacaagtctagaggaggaaaaatttcaacagcagcacatgtgagcaaaactcaggtttttgttaacagtaacctcaataggagtcaactgtgaagtggctgccagaaaagatcaggcaaccttgggttgcatttgtagacttcagtgtctgaagcaacaactgcaaacaacagatgtctcctgactagctgcttgtatgtgccggcctctgtgctggggcactggggacactgcagtgactgaatcacccacagtccaggccctcatagaccctaccttctgggggacaagggaagtgatttttgacatctcatcctgctctgcactgtccagaccctaccgaatcctgtgtcctgccctagccagctccctttaataaagaggaacattaaccaactagaattggtgcaggtgggtgtgagcagaagagtgaggaaacctgataccatgtcatgtgagggaaggtggcagaaattggataggattatttagccttagagaaggtaagagatgaaaggacttagggaagacataatggctgtctaacctaacagctgtgagggattgtcatttagaagacaggtttcatttcttttcttttcttcctgaaacagctttttgtaaaacaagaaagcagaattgcaacacaatttaaatgtctgtctaggtcacaaaagggatgcaaaatgtttgtaatatgattagtatgtattcatatagtgagtcattcttacacctatacataagattattccatgattaaaggtagcccagctctaataaccataagctatattagtggatcccttttcctattataacattttagtattacttctgatattgattcccttaacaaatggagtctacaaactgaattttaaaaaattgttaaaagtgactaaaactctgtaaacagaggagttgagtttacaaaaaattctgggagaacaagcaggataaaactgagcaagattatcaataagtgtacatctgaaactcccatttttcacagttctgatactaatacattcttaaggaattttgcaaaagttaatctgctgagtagaaatataccttgagaccaaactctttgtaactgttctcttccagatgtggtacataagattagtcaaagttggccagatgcggtagctcacgcctgtaatcccagcactttgggaggctgaggtgggcaaatcgctagagctcacaagttcgagaccagcctaggcaacatggcaaaacctcatatctacaaaaaaatacacacaaaaaaattagccgggcatgatggtacacgcctgtagtcccagctacttgggaggctgaggtgggaggttggcttgagcctgagccgtggaggttgcagggagccaagatcatgccactgcactccagcttgggtgacagagccaggccttgtcccctccccccgtccccccgccaaaaaacaggttagtcgagcttaatctactctcatatatttcccaaaagatctactctgtgccagagataacaaaaatctggagtgaaaatatttggagttggttactagtattttcccaagtacttttccatcctatttctattttcccttaagcttttctattttaaacacacacgaccataatttatatcttttcagatacaaagtaggtaattttgtaaaaaaaa

SEQ ID NO: 552894 - DNA, 964 bp, Homo sapiens
acttctggcctgggagaaaaataaaaccagtcaaatcacacctttctctaaaatgtcccattaaaaaaatatggaataggccgggcgcggtggctcacgcctgtaatcccagcactctgggaggccaaggtgggcggatcacgaggtcaggagatcaagaccatcctggctaacacrgtgaaaccccgtctctactaaaaatacaaaaaaattagctgggcgcggtggcaggtgcctgtagtcccagctactcgggaggctgaggcaggagagtggcgtgaatccaggaggtggagtttgcagtgagctgagaatgcgccactacactccagcctgggcgacagagtgaaactccatctcaaaaaaaaaaaaattatatgtatgtgtgtatgtatatatatatatgtatgtgtgtgtgtgtgtgtgtgtgtgtgtgtgtgtatatatatatggaataaagtttgagattccctgctttttcatgttaccttagcctcaattttaaacttacattgtttgttaaaattatcaaatggacaacctcattgctatggaacaaaaaagactgtgaggaaaaagaatcataacttggaaaaaaataagtgaaaaggcattgagagattgctaagatttgttaagttaaaacaataatatatctagaaaagactgtgaaaatatatatctcaaaagagaacaaggcatagtcagaaggctcagtaaaacaattactttaaaagctgactaataaaaagggtaagtgaaagaactcttccatccttgacccttcctcacttcctccctccgactctaccagtctggatgcactaaagcagaataacctaaaagccatgaaaaagtgctggtatttttcaggatctcttcaagacaccttccgtcttggtaacctgaattctctctctgatcaaggcagctgatggactttcaatgtatttggagatgccgg

SEQ ID NO: 552895 - DNA, 644 bp, Homo sapiens
atttgcagatgatgtttattagcctttgctggttatgttttatttgtatataatgtgactcccctgagagaagcagcaacagaaaaaccctggttctgagatggcaggtgagtcagggagatccttcaggctggtactttcgagcacctgaccctcaatatgtcttccgagcctgagcttgccatagaatgcagaatccttgcacttcctgaccattcaggtcagatcrtggtcattcggattgataaccatgcagcacctctttgctcagctttggctgggcttggagctgcaagagacacaaaaccagtaaaaagcagtagctcccctgtccttcaggtgttgtgcctgttatgcaaaactggcacgtatgagtcaggtgttcacaaattgccatgctaaaatgagtgtggtgtaacaaataattgggacaagaccagtgtgggtgttattagggaaagctttcttacatggatctgaaacaaagactaggagggagccactctggggctttctctaacaaggcatttgtgttgatccgggagttatgctggtcacatgagtgtcacacattgcttcagagtgctttggttccttcccctggaacataatctgagcctttgccctaactcctttgctaacct

SEQ ID NO: 552896 - DNA, 644 bp, Homo sapiens
atttgcagatgatgtttattagcctttgctggttatgttttatttgtatataatgtgactcccctgagagaagcagcaacagaaaaaccctggttctgagatggcaggtgagtcagggagatccttcaggctggtactttcgagcacctgaccctcaatatgtcttccgagcctgagcttgccatagaatgcagaatccttgcacttcctgaccattcaggtcagatcgtggtcattcggattgataaccatgcagcacctctttgctcagctttggctgggcttggagctgcaagagacacaaaaccagtaraaagcagtagctcccctgtccttcaggtgttgtgcctgttatgcaaaactggcacgtatgagtcaggtgttcacaaattgccatgctaaaatgagtgtggtgtaacaaataattgggacaagaccagtgtgggtgttattagggaaagctttcttacatggatctgaaacaaagactaggagggagccactctggggctttctctaacaaggcatttgtgttgatccgggagttatgctggtcacatgagtgtcacacattgcttcagagtgctttggttccttcccctggaacataatctgagcctttgccctaactcctttgctaacct

SEQ ID NO: 552897 - DNA, 644 bp, Homo sapiens
atttgcagatgatgtttattagcctttgctggttatgttttatttgtatataatgtgactcccctgagagaagcagcaacagaaaaaccctggttctgagatggcaggtgagtcagggagatccttcaggctggtactttcgagcacctgaccctcaatatgtcttccgagcctgagcttgccatagaatgcagaatccttgcacttcctgaccattcaggtcagatcgtggtcattcggattgataaccatgcagcacctctttgctcagctttggctgggcttggagctgcaagagacacaaaaccagtaaaaagcrgtagctcccctgtccttcaggtgttgtgcctgttatgcaaaactggcacgtatgagtcaggtgttcacaaattgccatgctaaaatgagtgtggtgtaacaaataattgggacaagaccagtgtgggtgttattagggaaagctttcttacatggatctgaaacaaagactaggagggagccactctggggctttctctaacaaggcatttgtgttgatccgggagttatgctggtcacatgagtgtcacacattgcttcagagtgctttggttccttcccctggaacataatctgagcctttgccctaactcctttgctaacct

SEQ ID NO: 552898 - DNA, 644 bp, Homo sapiens
atttgcagatgatgtttattagcctttgctggttatgttttatttgtatataatgtgactcccctgagagaagcagcaacagaaaaaccctggttctgagatggcaggtgagtcagggagatccttcaggctggtactttcgagcacctgaccctcaatatgtcttccgagcctgagcttgccatagaatgcagaatccttgcacttcctgaccattcaggtcagatcgtggtcattcggattgataaccatgcagcacctctttgctcagctttggctgggcttggagctgcaagagacacaaaaccagtaaaaagcagtagctcccctgtccttcaggtgttgtgcctgttatgcaaaactggcacgtatgagtcaggtgttcacaaattgccatgmtaaaatgagtgtggtgtaacaaataattgggacaagaccagtgtgggtgttattagggaaagctttcttacatggatctgaaacaaagactaggagggagccactctggggctttctctaacaaggcatttgtgttgatccgggagttatgctggtcacatgagtgtcacacattgcttcagagtgctttggttccttcccctggaacataatctgagcctttgccctaactcctttgctaacct

SEQ ID NO: 552899 - DNA, 555 bp, Homo sapiens
ggtttcttaataataggttttttgtttttttttggaaactgacgttttgatatgctttgtggttctctacaaaaagggaatacaaaactctgtgttcttagaacttaacttaccaccaaaacatttctgctgaggcatatctatgaataatatctgagttctgtgacacatggtttgggaaggatgagacgtggtgaactgatgcagatacagtgatgggagggcgcttcagtgctcttgtgagtaagagcatgtgtgttggtgctgggcagatgtgggtacaaatcctgtttctagcatctactggccacaggactttggagaaattacccaaactcactgagctttagtttccttattcataaaatgaagtgtatcaatttgaaacgtgtttggctccaagaatgaaaaaatctatcagaattacttagggggttatttttctgatataataagtccagggtcaggccatccatggccaatgcagctattcatggatgttttctgggtccaggctctttctgtatttcwgctttatatatatatatatatata

SEQ ID NO: 552900 - DNA, 1700 bp, Homo sapiens
cttctgtctttactcaaagatctctaaattccactaaagttatgttttccactgtagagggcagagctatggccagacaagsctccttctgcattcaaattgaaaagtggtgagaactgtgcttatttctgcagctggtgctaatatcagtccatagacttaggtgttcaagaaatgcaaaaatttgagttttataactcaaaatctaccatagtcttcattcttccaggtgaaagaaacttaatctcagcctatttagggtttctgtttttcctaagagttatatctttgtaccaggaataccaaaaggctggggtgggagtgcacacgacagacagtatccggacatctgtccctatccatccacactgccatccactgaggtagactttggtctgcatgatgactcattccagtctgcaaggtcctttcctatccagtggttttcttacactcttgtaggtgcacaggaaacattttgtggcttccaagccacaccaggtccaggaaagcaaccccgtgcttctaagaccctatctgcttccatgcagtttgggggcctatgaagttattccattgccctgtgctatgcagggctgcaatagcctctgctgttcaggccctttagccaggaccaaccacactgccccttctccatggatattttccctcccttctggggactcacttgggaaagcacttctagtaccctcactgtcttaccctaatcttccaaatctatcttgagattctcttgctctcctctccctctcaggaccacacatttaaaactccaaaaccaagcggataatctgtgactggaaggagagagggaggtcacggggtagcagaaagtatgagggggaaggaccaggtaggtcttgtctcaaaatggcactcacagttttctgttttgttgttgagtctaaatgatcctctctccccaaaacaaacaaaaaatatgttttttaaaatttaaagacatatttcaaactgtttatagcccaattcatttagctttgatgatctctcctatttctgacagttacaaatgcaaatgttctctttgggaaatcaaatgttactttgagttcctgggatgtttatgcagagctatcagagagggaggcagtttatgacatgggaacccaaacttagccaggggtaggggggcacattttcctcacactctaagacagggctaatagctataatttcacctgcattcctggatagcagccctttcttgccccaggctctggcacgatgcctcccaagataagggtctgataacagacctggctatacaggaaagcaaagtaggtcatcctagttaagtgatttgagggcaattaccttccatttgaggatgctgcctgctccaggcatcttctttaccagctcactgtgggctctccccttcctctggggaaaatttgtttcatcaaggttatttctttgttttagaaagcacagatttgaagacactgccttgactccatacagacagaaagcccttccaggcggcttttgatttctcctggtacctgcagactgcagggcaaccaaaggaactgggatgcttgcagagtgttctctattcattcacagagtcttcccatctcttttctctcttctccacagcaagtcctcttctgaaccctcattgccaaatatctgcatgttgttatggagctgtc

SEQ ID NO: 552901 - DNA, 627 bp, Homo sapiens
attaggagctagcctagcacagggaatgactcrttgtattgctttctttcctcacctcccctctccttttttaaaaaatggggacagggtcttgctttgttgcccaggctggtcttgaacttctgggctcagttgatccttctgcctcagcctcccaaagtgctgggagtacaggcatgagccactacaccctgccttttccctctttttaaggatgtagatattagatactaatttttttaaattaaatagctagaagggaacctgggtcatttcatctagactgtcttcagcagagcaatgctcaacttataaataaatctccaattcatacacacacacacacacacacacacacacacacacacacacacacgatggggtaaaatttccttataaaagttaaaatataaatatattttatgtcatatagtattgactaagagctttggctcacaagcagcacaaatgtgtatgctaatcccagcttccaaattactagccatgttgctatcttgctaagcctcagtttcctcatctttggaatgagaataataatagcatctacatcacagatgtgatgtgaggatgaagtgttagtgctggacacaaaacgaccactccaag

SEQ ID NO: 552902 - DNA, 627 bp, Homo sapiens
attaggagctagcctagcacagggaatgactcgttgtatygctttctttcctcacctcccctctccttttttaaaaaatggggacagggtcttgctttgttgcccaggctggtcttgaacttctgggctcagttgatccttctgcctcagcctcccaaagtgctgggagtacaggcatgagccactacaccctgccttttccctctttttaaggatgtagatattagatactaatttttttaaattaaatagctagaagggaacctgggtcatttcatctagactgtcttcagcagagcaatgctcaacttataaataaatctccaattcatacacacacacacacacacacacacacacacacacacacacacacgatggggtaaaatttccttataaaagttaaaatataaatatattttatgtcatatagtattgactaagagctttggctcacaagcagcacaaatgtgtatgctaatcccagcttccaaattactagccatgttgctatcttgctaagcctcagtttcctcatctttggaatgagaataataatagcatctacatcacagatgtgatgtgaggatgaagtgttagtgctggacacaaaacgaccactccaag

SEQ ID NO: 552903 - DNA, 1284 bp, Homo sapiens
cactgatatttttcaaaaggcatcctgaatgttataagaagctgactgatatcagagatgttagaataggatctcagaacggatgaaatatgttatgaaatatggttatggttatgcaaatacctagtcataacagtcatcaatagaagtgtagctcctttttgcccacctcaaaggcaaagcctgtgtcatctttatacccactatggaacctaagactggatcatgatggaatgatggcaataaaaaacataactgatatttactgagcactttatttgtgttgcagcgcaactttatatgaattaatactcaagataacttttattgcttgttttggtaagtactattattcccactttgcagataagggtactgagacttaaagagaagttaaacatctcaaccaagttaggaagatgcttggattacaaacccaagtctatctaatgctagatctacaccttctaagccactrtgttacactgtccttaaggagggtcaggttgtgggtgtcaagactacaaaggcaagtaacacacgtgagaagctcaggccagaatcagagagaaggatggtcaagagttttggagatgaggtaacttaaagaactgggtcatggattttatgagaaaacttgcttaaaatctccaatttgaggtcctctgtccaactttctcattcctttaatttgggagttaggcttttgcctccaggagtgagggctgtattggacacaatgaaatcaatgtgagaacattattttctaactcatgattcaggacccagtcaccatgatgcactgattttttttcaaacttcaattatactttaaaaatacatttgataaaagacattcaatttaaacatttcccaagctgatgttgaataatttaaacattttcccttctatctgagacagaaaaaataaatacataactctgagaatgtacataactctgagaatcaatcaccttcatttccctattccttaatgatattctgtaatgagctgtgaacatatacctgtctttctgctgagcctcttccatcagcattttaccattaaatgggaaataggggtggagaaggctgaggtaggagtacacaaattactgcagggaacagaaattaagggcattttccaactccaaagatcagaatataaaactgttcattctctcaagaattaaagcagcataacataaaaaaaattaacacaagaaaatgcagcaatggcttcaagacagcgtattcagaagcaaagctgaccctttaccatat

SEQ ID NO: 552904 - DNA, 1284 bp, Homo sapiens
cactgatatttttcaaaaggcatcctgaatgttataagaagctgactgatatcagagatgttagaataggatctcagaacggatgaaatatgttatgaaatatggttatggttatgcaaatacctagtcataacagtcatcaatagaagtgtagctcctttttgcccacctcaaaggcaaagcctgtgtcatctttatacccactatggaacctaagactggatcatgatggaatgatggcaataaaaaacataactgatatttactgagcactttatttgtgttgcagcgcaactttatatgaattaatactcaagataacttttattgcttgttttggtaagtactattattcccactttgcagataagggtactgagacttaaagagaagttaaacatctcaaccaagttaggaagatgcttggattacaaacccaagtctatctaatgctagatctacaccttctaagccactgtgttacactgtccttaaggagggtcaggttgtgggtgtcaagactacaaaggcaagtaacacacgtgagaagctcaggccagaatcagagagaaggatggtcaagagttttggagatgaggtaacttaaagaactgggtcatggattttatgagaaaacttgcttaaaatctccaatttgaggtcctctgtccaactttctcattcctttaatttgggagttaggcttttgcctccaggagtgagggctgtattggacacaatgaaatcaatgtgagaacattattttctaactcatgattcaggacccagtcaccatgatgcactgattttttttcaaacttcaattatactttaaaaatacatttgataaaagacattcaatttaaacatttcccaagctgatgttgaataatttaaacattttcccttctatctgagacagaaaaaataaatacataactctgagaatgtacataactctgagaatcaatcaccttcatttccctattccttaatratattctgtaatgagctgtgaacatatacctgtctttctgctgagcctcttccatcagcattttaccattaaatgggaaataggggtggagaaggctgaggtaggagtacacaaattactgcagggaacagaaattaagggcattttccaactccaaagatcagaatataaaactgttcattctctcaagaattaaagcagcataacataaaaaaaattaacacaagaaaatgcagcaatggcttcaagacagcgtattcagaagcaaagctgaccctttaccatat

SEQ ID NO: 552905 - DNA, 1143 bp, Homo sapiens
aaaataaattaccaatcctctgtaattttgcgtcctctcatctcacctactcataataaatgaagagaagatatgtcatgcctcacaggcaatcatatactgataaatatttaatgactggctctcaaaaaatattaaaaataccaatttgtagtgtttgctgatttttatgatataaatacacccaccatgacagatgcctaattaccaacatgacaacgctgaccctggagttaggaagaggtgtgtagtgacacatcatcatatctttaccatccatatatgatagctgtgaataaactygaggacataagtcatagtaaaatccaatttttaatgatggatatgtttaaccactggcttgaaacttcctgatatttaattataagctctcaaccactgtgtgggttggctccagcacatcagaaaaatggattgcagcatattcagattatataatcactctcagtagcataacaaggatattacttggcataaaaatttcataaattgattatagacccgtgttatcaagaaacatactctatatattatttcatcactagtgttccttgaaactgaattttacaaggttctaacattgtcacatgcctcaaatcatcctccaaagatactaataatctagttattgagttatataaatgtataaggaaggtacgtgggaaaaatatataatagtatgaatacatggaattatgttgatcatgaccattattccttaagaggaatattatattttcagaaagatttgaagaacttaaagcttatacctccagtggcccactaattcacagtctaaaatgacagaacatgataaatttcaatatcttatacaatttctcatagcctctggcaggagcaattcttgaaacagtaggtggaaatatactcattaagctgcaaaattgcctatattcaggacacctgccaagcaagcattccctaaattaccacctgttaccataacatcaaagacatccaaaatacttgcttactaactctagtctccctaagtatatataattttcctataatgctgcttgatggtagagcagtatcttaatttcatatacataaatcaaagttgtttctggacagctagggctcgaacctggttttcaa

SEQ ID NO: 552906 - DNA, 536 bp, Homo sapiens
tttcctcttagtttagcttttcttccaaatatatatatatatatatatatatatagctttattgccaatatctaccttcagatatgcctcctctggatttagtttgcttagggcttgttatgtctgacattagttttctgacccacattctccttttctttgtcaaaaataatttctatgtctatcctaagaaattggatagttaaaaattatgaaagtgcatcttttcccggcttaaaagcccttgggtcactggaatttctttaaagtcccaatcataaaactcaactatggtatacccctaaacacttactaaactcatatctacacatcttgtcttacttttaagttaaggtcaggagggggtaaactgctaagaaaatgagtatgtaaraaaagacacaagcttccccaatctgtgtaaaccaggagaaaagtctgtggtacaggtgtcttccttgctcttgacagagtgactcagaatataggagtgtgctatcaaatgattcattggggttacaattaggatacctaaa

SEQ ID NO: 552907 - DNA, 571 bp, Homo sapiens
tttttaatggagccttgctctgtcacccagactggagtgcactggcatgatcttagctgactgcagcctccttatgggctcaaacgatcctcccacctatgcctcccaagtagctctggctacagacatacaccaccatacctggatttttattttatttatttatttttatttatttattttttttgagtcggagtctggctctgtcgcccaggctgtagtgcagtggcgcartctctgctcactgcaacctccgtctcccagattcaagctattctcctgattcagcctcccaagtagctgggattacaggcgcccaccaccacacccagataacttaatttttttttttttttttaagagatggcatgtcactatgttgctcaggctgatctggaactctggcctcaatcttcccacctcagacctcccattcaatgatttcataaagtatgtgttcatctattgttgtcttctgggacttttatgtttgggccattaaaacttttgtcattctggtatttggtatggaatcagaatccagcctttttttcctaaatgattgagtttt

SEQ ID NO: 552908 - DNA, 567 bp, Homo sapiens
ttttttacaagccctgattctgaccttaaagaattttatagattgttatttctttatttaactttgattacattttagaatgtttgattcttgatatttggaatgactcattttgtggaaatgtgattcttcctgtgtcttaaaaaatgttttgcactctagtccagatgttaactatcgtggagctgtttctagtcactgtaagtgtagagttggaatctggaactagctctccaacctagaccaaactgatgactgtgtggtactgattcgctttaagctcaagtattataaaagtatgtcatgttctctgagaacccaccttcctgctcttcaccacattccaaggctaccacttcctcattccacagaaaatcaatacctttgctttttgaaatagatagctcttgcacattaaagaaactcagacaggcatgtatccacagtaagtcaagaacccaggaccttctatcacgttgtccatcaacagaacagttaccttgccatccagagccctggctttcacataattatgtgcctttgctatttcccygtgacagtggtaat

SEQ ID NO: 552909 - DNA, 685 bp, Homo sapiens
atgtgccttgttaaattttaaattgattagtatctatttcttaaatgttaggcatttaaacatattaaacatattaattttaatttaaacataaaataataatcctaatttcttttcctgctaacattcattgacactaatagtaaactctatgattaacaaaacaaaacaaacagtactaaagaagcactgattattttgatcaattaaaaaaacaagatatacacaaataactttaaaatatattgaattactcttactagaagctgccatcgtaaaataccactcactggatagcttaaaaaacaaatttttttttcacagttttcattatcagacaatttcatgaaaacaaaaaataaacaataaaataaaaattaaaaaaatatgctttttctaattaaaactctaaaaaatacatagttaagaaaataaggcaaaccacagaattagcaaacatgtagcaccacttacatctgaataagttattgtattcagratacgtttaaaaatcttatatataatactctactaccccaacaaattcacaaaatagtattttataaaataagactaatggataactaagcctatgtgaaaacatcattaattattaaaatttaagagaaaacaataggatgccatttttatgcccttcaaaagtgccagaaagaacaacaaaaac

SEQ ID NO: 552910 - DNA, 685 bp, Homo sapiens
atgtgccttgttaaattttaaattgattagtatctatttcttaaatgttaggcatttaaacatattaaacatattaattttaatttaaacataaaataataatcctaatttcttttcctgctaacattcattgacactaatagtaaactctatgattaacaaaacaaaacaaacagtactaaagaagcactgattattttgatcaattaaaaaaacaagatatacacaaataactttaaaatatattgaattactcttactagaagctgccatcgtaaaataccactcactggatagcttaaaaaacaaatttttttttcacagttttcattatcagacaatttcatgaaaacaaaaaataaacaataaaataaaaattaaaaaaatatgctttttctaattaaaactctaaaaaatacatagttaagaaaataaggcaaaccacagaattagcaaacatgtagcaccacttacatctgaataagttattgtattcagaataygtttaaaaatcttatatataatactctactaccccaacaaattcacaaaatagtattttataaaataagactaatggataactaagcctatgtgaaaacatcattaattattaaaatttaagagaaaacaataggatgccatttttatgcccttcaaaagtgccagaaagaacaacaaaaac

SEQ ID NO: 552911 - DNA, 685 bp, Homo sapiens
atgtgccttgttaaattttaaattgattagtatctatttcttaaatgttaggcatttaaacatattaaacatattaattttaatttaaacataaaataataatcctaatttcttttcctgctaacattcattgacactaatagtaaactctatgattaacaaaacaaaacaaacagtactaaagaagcactgattattttgatcaattaaaaaaacaagatatacacaaataactttaaaatatattgaattactcttactagaagctgccatcgtaaaataccactcactggatagcttaaaaaacaaatttttttttcacagttttcattatcagacaatttcatgaaaacaaaaaataaacaataaaataaaaattaaaaaaatatgctttttctaattaaaactctaaaaaatacatagttaagaaaataaggcaaaccacagaattagcaaacatgtagcaccacttacatctgaataagttattgtattcagaatacgtttaaaaatcttatatataatactctactaccccaamaaattcacaaaatagtattttataaaataagactaatggataactaagcctatgtgaaaacatcattaattattaaaatttaagagaaaacaataggatgccatttttatgcccttcaaaagtgccagaaagaacaacaaaaac

SEQ ID NO: 552912 - DNA, 685 bp, Homo sapiens
atgtgccttgttaaattttaaattgattagtatctatttcttaaatgttaggcatttaaacatattaaacatattaattttaatttaaacataaaataataatcctaatttcttttcctgctaacattcattgacactaatagtaaactctatgattaacaaaacaaaacaaacagtactaaagaagcactgattattttgatcaattaaaaaaacaagatatacacaaataactttaaaatatattgaattactcttactagaagctgccatcgtaaaataccactcactggatagcttaaaaaacaaatttttttttcacagttttcattatcagacaatttcatgaaaacaaaaaataaacaataaaataaaaattaaaaaaatatgctttttctaattaaaactctaaaaaatacatagttaagaaaataaggcaaaccacagaattagcaaacatgtagcaccacttacatctgaataagttattgtattcagaatacgtttaaaaatcttatatataatactctactaccccaacaaattcacaaaatagtattttataaaataagactaatggataactaagcctatgtgaaaacatcattaattattaaaatttaagagaaaacaataggatgccatttttatgcccttcaaaagtgccaraaagaacaacaaaaac

SEQ ID NO: 552913 - DNA, 633 bp, Homo sapiens
ggaagcagctcactggcttttcagtagatattatggggcagagttgctttgtaaccaagaaaaattcccttcaatgacttataaaatgtgatggcattttacaaaaagaatattctacatgacgtgagctgaaaaattcttggctaagagtagttaatgtacacagtggttaagacctgtggtgttagagctggacagatgtgcgtttaaattctggatactctacctgtggtcctctgtcaggtaggcaacttctctaagacatgtgttctaatatgtaaactcgtgctatgagcaatcactgaatggatatttacaaagaggtagcttagaacacagtaaggatttaatagggattagctatgagtataatattttctgagaaataagtaatgaaaaggtaaaataagaattctaattctgaaaatatacatgaaacatttgagcttctctttaaaaagtttatgtcaattgacggtgttataattacyatggttttgaaattacatagagcttttgaataatgagttaatctattattctttaaatgctcaataattaatattattcatatttaaataggtatctagacatatttatccataaaaatttaaattgtgtggaatatgtatc

SEQ ID NO: 552914 - DNA, 519 bp, Homo sapiens
gtggaaagggcattaggctgtgaaacacacattgggtcctttagaggctctgacactatctgtatgaccttaagcaagtccattaacctttctaggcatcagtaattattctgtaaagttttactaaaataaaatctagttcatatgtttacgatccctttgaaagcagctagatttggtaaccctttgggatgagcttctctgtgagcagacagcatcctcgctggaaacctcccagatcccccaccatgcttccccttgcctcagtggcaggtgtactagtatacaactagcaaaagagggaggaacaaaatggagagaggcctctccagctggtgcccagcaagttaaccaaagctggcccacccagggtctgtccatgctcaggtgttctctagtaacatcaaagaaaagtagacaaaacaggaccttcattcttcacaaacttcctttcagctgcaaacagttttctttcatctttyttttccccctccaagctacctttggtgtgcattttca

SEQ ID NO: 552915 - DNA, 692 bp, Homo sapiens
ctgatgccaggaactcaaagtttttattcccagaaattatacaaactgataaaaagatgggtaggaatatatgcaacacagagtaaggtatgtttgccccactagtatcttgctccctataacactggacataaaggtgcaagaattttctagaatctgagacacagatccaagaaattagttctactagtccctcaggatgctcatgacacagtgtaataacccctcataaagcatgtaaattcttgtttctaatccagaaacttaagtggacaccttgggaccttctgacaaataccaaatatgagttttccagtaacaatccatacattaaatattagtacactatatttctcttatttctacattaaaaattataaactacatctttatggtggagacacaacattttggaagccactgctctccaaacctttttgattgaccaccacataattaaaaatactttagctgcaytcctcctgtatttgtgggttgattggcttatgttattcaaatatatacatccataccactgttacatatgctataaaatatgcataaagtatacataaagtgaaaattagataagtattaaatgaacaatatttatgaatacttttactgtattattgatacaacattaatcaggctatatatcaatataaaactagtacaaaattaatgacaaa

SEQ ID NO: 552916 - DNA, 1210 bp, Homo sapiens
ttcttggtacatactgccagttgtaaattgatgatagtagaccaaatgtataacaaatgtttaacagactaagctgttcagatagcagctcactactgagaactgacatctgcaagaatgacataaattctggaatcctgttcctcataattttcttgttcaaaacagcatactcaaagagcttttgaacagtatcagaacattcatgatatgtagtttttgcatctttgaatcatatgccaacaatgtactctttggaaacttatacatccatatattgatcaatttcataaaaaggaaatcaagttcattctgagtaaaagrtgtgggataaacctcaaatttaacagcagattgttggaatcaatgaggatggaagctgaaggtgacaagcacagttacctcatggtgttctgagcaagttcatcaagtatcaacattaaattgatacaaagactgtatttcatcggccacaccagcacattctcgcaggattcagggctaaaatacaactgtcagcataagaaacaaaaaagcccatttcttagacaacttgttaaaatgctatctttctttataactttctctaacttggtacatatcaatatcaatcaatgtcacaatgatttaagtattgacaatagaggttttggaaagcaagtgaataaagaaaaggatgaatgattttgtgtttgtatgtgtgaataatcaatttcattcttattgtaaatgtggctgtctccagaacaagagataatttaattgtatatgaagagtttctagtataagaaagcagcattgtgtcaacagtgaggcagtggtgtgatctattcttatttatcttaacattctcaaatagaccgtcttcatttcctctatgtattttcacaattatgatattagcatcatttcatgtttcttgacattgtttttgtgactatagaaattcattttctttttatccaaacagatatattttaagtataattacagttactttgcttcatttgaaaatattttgtctaaatcacaatattttctttttctgaatatttgcagcattccttacgtttctcactcttagaaagtatttatcttctaaatgcctactcctgaacttgtttcacagattgccttgtaattcaggtaatttgtacttttaaaaagtctcaccagaaatttacatcaaagtagaattaggaaggaaaag

SEQ ID NO: 552917 - DNA, 534 bp, Homo sapiens
atttctccctttcacaaacgcacacacatacacacacacatatttacacaaagacccttaacagaggcaacctatctcatattatacatattgcaaaaaaaactgagtaattgagtcagttaaaaaacatcctttactccaataattcctgataaaacttgattttctctctttttataacaattctttcacagtgcttgctgtgctgataatctattatgatagaacaaattcttttttttcacaggaaatggaagagtttgtccagagctctggagaaaatggtgttgtggtgttttctctggggtcgatggtcagtaacacrtcagaagaaagggccaatgtaattgcatcagcccttgccaagatcccacaaaaggtaagataaaatgttttaatggtgtaaaaaactactgaaagaggctgttaaagtttgtaaagaacccaattgtagaaacttcctgcctatatattcagctgttgggaaagcactaattatctcagatattaattcaaaatcaaaaatatgtatgg

SEQ ID NO: 552918 - DNA, 366 bp, Homo sapiens
ttaaacatataggatcaggtctataatataaggcataacatctagaaaacaaaatggatttaagatgtttaggcacttttgttagtcacaatatcaattttactgttgtttaagacccaaaagttattttgtgagagtcacatatgttatataatttaacgagagaggtaaatcttgtatcatttaaggacctcactaacaatagaggcatatattttagatagtttaatgataagacacccagaagaaaattaatctctgccaytgtttctctgtctgcccttgcctgaatcactccaagtctgtatgtttcactttcctcatctgcagcttgcactcaatgttcctttccagtctaatatgcta

SEQ ID NO: 552919 - DNA, 1161 bp, Homo sapiens
attgagattttaagagttttagcatgtatatacaaataaatatattccagaatgctgataaattaatttatgacacagattaattttaatgcatggtagttacaactaagaaaatgtggttttacctcatacattgtctctgcaatttactaggtgtgtgaacttgggcaaattatatataaccccttggttcctcaattcccacatctgtaaaacaccaataattataccctatctaatcatgttgtcatgtgaaatgacaataatgtgtataaaatatatagtacagtgcctgaagtaaaccataaatgattggtctgtacagtggttctcaaccccagatgratattagaatcacctggggagtttcttgaatactgatgtccaggcttcacctaaagcaattacatctgaatctctggaggtggggcttaagccaataacaatttttttaaaaattcatcacatgggccaggttcagtggctcacacctgtaatcccagcgttttgggaggccaaggcaggaggactgctggagcccaaaagtcgagaccagcctgggcaacatgatgaggccttgactgtacaaaaaatgttaaaaattagccaggcatggtggagtgcacctaaagtcccagctacttgggagactgaagtaggaggattgcttgagcccaggagatcgaggctgcaatgagccttgttcgggccactgcactccagcctgggcaacagaatgagaacttgtcacaaaacaaaacgaaaacaaaaacaaaaacaaacaaacaaaaatctccctcactttatgatttcaatgtatatccagggttgagaactactgatctataataactatcatgtatcacatatgggcatgtaatgtttgtatatgtgaattatattaacataatatagtgtcatgtctattaaacaagtggtgaaaagaaattaaaaatctgtccagtgatttagtttgaaaaaaatatataaattggaagagtagataaatgataatcaggcctaagatctctggagtaggttgcctgtgcacaattaccacctcccacattcactagcttataactttgggcaagttactcgactactgtttccttatttatcagctagggataatgaagatgcctatctctcattgcattg

SEQ ID NO: 552920 - DNA, 625 bp, Homo sapiens
aacaatattttatgcacaaaggcaaattaaaaaaaaacaaaaaacctcatcatgactcagttgtgcaagatttcagagagggtgatttagggcagctcagtctggagctctatgttttcctggtggcatttaaggcttaagagctggatagaggtttccaaktagttactgagtgtggtgggcagaataatggccccccagagatgtcgtatccaaatccttagaacctgtgaatatgttaggttacgtggcaaaggggatttaaggttcagataaagtcaatgttgctaatcagctgaccttgagattgggaagttatcctggattgtctgggtgtgcccagtgtaatcacaatggtctttaaaagtgaaagagggaggcagaagaaagtgtgatagtatagggatgtaaagaagactcaaccagcccttgctggttttgaagctggaagagggtcgtgagccaaggaataagggcagcctctaaaaagctggaaaagatcagaaaatggttctcacctacagtctccagaaaggaacaccgtctggccaacaccttgatcttagcccagtgagactcatttctaccttctgacttccagaagtttaaggtaatcaacttttgt

SEQ ID NO: 552921 - DNA, 586 bp, Homo sapiens
tatttatgtatacataaagatgtacattctgcatatacacaagtatacatatatgaatattgtaatttgtgtttaaagaaaatcttatgatacatacttttttgcatcttgcttttctaccttgatatttccatatgaaaagcattacaaaccttacaaatcaactaatatacatcttttaaaaataattgtttagggttacataaagttttttgattttggtacacctcaatatgttgaactgttcacctggcatgaatgyttatttatcaaacttgatactttttaaataagaaaatgtccatggggtaaagttcagaaatgggttggaagtcagtcaaggatttcttctgaacacattattaggcaattaaaatgttgtatataaatacctatataaaaatgtcctccttactgtctttatatttgtacaaaactggtcatgtcaaaatggtctgtttttatagatacagagtgagaacaccatctccaaatcaagaaaaaaatcagggtctaggttatatattttgcactagagaactgaggagacccagaaacctctgaaaccaaggaagagtcaatgaac

SEQ ID NO: 552922 - DNA, 2001 bp, Homo sapiens
cttgtttttcaatacattttgaaaaaaaatttctggtattgtcatttaattaaaccaccttttccttctatagctatgggaaagtaaattttaagtggcatacttttacacagttcataattattttattatacagtttgtgaatcaaagcactgtgctttaaagaaaatctatttatatttatgaaattcccatttctctctaaaataacaaaatgttgtgatatccaggaaaactatcttctcatcatataaaaaaggatgggaggagagtaagagtcttctattgtacataaatattctcacagaacagcctctagctacctccactgtcagagctaccacttaaaccttgatagctatgaggctaccctatctaaaaaataatggaaacaagggttgaagaagatggaaaatgtagtcttcttgcatcttaggatggctagaatattgcctcttaaatagaagaaaacatgttataaaagggatgtagcagctgattgcttgatctcttaaccttctgacatttcattttggaaaaataaaatttatgccacaagtgcaaggctcagctaacagagtagtaatgacatggagaaaaacgaaaactgtggagtatttattgggcagaaagtaacagaataaaagagccaaatacagcatcattttaaaggaacagttcttaaaataataagwtttaaagggcctcgtggcataaagaatgtgttaaattcccctgcacagtcattacatcaagctgaaagccaaaaacctttcttgttgaatgagaatatttatgtttggtttgtggttaatcaatataatcggacgtataaccaaaaaatatactatttttatttatttatttatttattttgagatggagtcttgctctgtcaccaggctggagtgcagtggcgtgatctcggctcactgcaacctccacctcccgagttcaagtgattctcctgcctcagcctcccaagtagctgggattacaggtgcgcaccaccacgcctggctaatttttttgtatctttagtagagacgggttttcaccatgttggccaggctggtctcgaacttctgatctcatgatctgcccacctcagcctcccaaagtgctgggattacaggcgtgagccaccgcgcctggcccaaatgtttttatgagcgagaaggaaataggaagaaggatccttggaaaaccaacatgatagaggagaacataactgcatatttccaaacagcatctgagggcttaaaaggaaagatacagattatcaaccataagggctgcccatctacagtgacaggcttctgggaaagcaggcttttggcttgggtggtaatgctggttattctgtgatacagttcattcaagtagaatggaaggaccctcatttaggaacttaagtgcatctcattaaagataagtgataatgaaaaaagtgaagacatttgcatttgagccattttaagacaggctaagattacaacctgaagggcaagaagagtgtgagttatatgagtgatacagcacctaaaggagcatccaaggtcaaaactccagagaagcaaaaaccttctgtaaggaacaagagggctttccagggacccttcatctgaactgtttgcttcatgaggaatggtgtggtccagtggaaagtgtatctccttgagagtcacacagacctgggttcacattctggttcggcacataattgctgcttagctggggataatatacctattctgcagggtggttatgttaactaaggtggtaaccatagacaaagtacctaacatgtaatagatgccaatgaatctacattgtcgtctcatcaacaatgatgctggtcatcatttcaaagcctaatttaacttttcacaaatataagcaggctgtcatttctgattcagacctttatcctgtgctgtactctgtgctggaaatcctagaaaggtagatgtagaaaagaaaatgagagaaacttattct

SEQ ID NO: 552923 - DNA, 2001 bp, Homo sapiens
cttgtttttcaatacattttgaaaaaaaatttctggtattgtcatttaattaaaccaccttttccttctatagctatgggaaagtaaattttaagtggcatacttttacacagttcataattattttattatacagtttgtgaatcaaagcactgtgctttaaagaaaatctatttatatttatgaaattcccatttctctctaaaataacaaaatgttgtgatatccaggaaaactatcttctcatcatataaaaaaggatgggaggagagtaagagtcttctattgtacataaatattctcacagaacagcctctagctacctccactgtcagagctaccacttaaaccttgatagctatgaggctaccctatctaaaaaataatggaaacaagggttgaagaagatggaaaatgtagtcttcttgcatcttaggatggctagaatattgcctcttaaatagaagaaaacatgttataaaagggatgtagcagctgattgcttgatctcttaaccttctgacatttcattttggaaaaataaaatttatgccacaagtgcaaggctcagctaacagagtagtaatgacatggagaaaaacgaaaactgtggagtatttattgggcagaaagtaacagaataaaagagccaaatacagcatcattttaaaggaacagttcttaaaataataagtttwaaagggcctcgtggcataaagaatgtgttaaattcccctgcacagtcattacatcaagctgaaagccaaaaacctttcttgttgaatgagaatatttatgtttggtttgtggttaatcaatataatcggacgtataaccaaaaaatatactatttttatttatttatttatttattttgagatggagtcttgctctgtcaccaggctggagtgcagtggcgtgatctcggctcactgcaacctccacctcccgagttcaagtgattctcctgcctcagcctcccaagtagctgggattacaggtgcgcaccaccacgcctggctaatttttttgtatctttagtagagacgggttttcaccatgttggccaggctggtctcgaacttctgatctcatgatctgcccacctcagcctcccaaagtgctgggattacaggcgtgagccaccgcgcctggcccaaatgtttttatgagcgagaaggaaataggaagaaggatccttggaaaaccaacatgatagaggagaacataactgcatatttccaaacagcatctgagggcttaaaaggaaagatacagattatcaaccataagggctgcccatctacagtgacaggcttctgggaaagcaggcttttggcttgggtggtaatgctggttattctgtgatacagttcattcaagtagaatggaaggaccctcatttaggaacttaagtgcatctcattaaagataagtgataatgaaaaaagtgaagacatttgcatttgagccattttaagacaggctaagattacaacctgaagggcaagaagagtgtgagttatatgagtgatacagcacctaaaggagcatccaaggtcaaaactccagagaagcaaaaaccttctgtaaggaacaagagggctttccagggacccttcatctgaactgtttgcttcatgaggaatggtgtggtccagtggaaagtgtatctccttgagagtcacacagacctgggttcacattctggttcggcacataattgctgcttagctggggataatatacctattctgcagggtggttatgttaactaaggtggtaaccatagacaaagtacctaacatgtaatagatgccaatgaatctacattgtcgtctcatcaacaatgatgctggtcatcatttcaaagcctaatttaacttttcacaaatataagcaggctgtcatttctgattcagacctttatcctgtgctgtactctgtgctggaaatcctagaaaggtagatgtagaaaagaaaatgagagaaacttattct

SEQ ID NO: 552924 - DNA, 2646 bp, Homo sapiens
tgcctcgaccacatctgtgacatcgccgtccagcatgcggatgcctgaaagcacagaggaggctcggtgtcggcgcccaggctccgggcacacagcgacgggaacccgggcccaggaggctcggatgaggacaccgcatcacagagtccctccccagcaggggctgttcccagtcattctgcaaaactggctcctcttctccatgctggctgatgtgaaagaactcaggccagggcaacaaaagaaagcaagctacgtcccaaagagagggttcagcttccctcagtgctatgatgtcctgctggtatctaaaaatgcatatttctgttttttattttaaaaaacaagacctattattattattattattatttattattattattttgagacagagtctcactctgtcacccaggctggagggcagtggtgcaatctcggctcactgcaagctccacctcccgggttcaagtgattctcctgcctcagcctcccgagtagctgggactacaggcacataccaccatgcctggctaacttttatttttaatagagacagggtttggccatgttggccaggctggtctcgaactcctgacctcaagtgatccacctgcctcagcctcccaaagtgctgggcttacaggcgtgagccaccactcctggccaaaaggcacatttctataatggaactccagaggctttccacctctcccagctgttgagagttcacatctgtttctctctcctttataattccactccgacgtataacttatgatgaaccaaatgatgagctttcaacctggaagacagaagcccgcaccccaggttgcaatggaggggactggggtcttggacttcgctggccagctcatctccatttgggtttgggttctatgttccctggaggggtctttagaggtggagagtccagcttcctcragagcaccccaaaaagagaggggtgaggggctcccataagcctctcccaatgcctgccatcccagccaggggcgtcccttcttgcctcatacttggcatttgcctttattactgggtgccctctgcagccagaaagttgccccagcaacagtgcctcccccagagaaggcatctgagaaaaacctggcatgaaacggggaagcagggggtaatgacggccatggacacactcttcctggattctagtagatacagaaagtcgacttctctggggctcagagaatcttgccacccgaccctgggtcaactctcttcatggccacttgacacccacagctccccactcagaggcccccgggagcccctcacccacggggcccagctctgtgtgtgcgatgaccatgccttcatcaagacgaattctaaatcttagagctatttaagacgtaatggaaaagaggacttcttctgattgtaagaatagtatatgctcttgcccaaactttgggaaaaagagaaataaccaataatattttggctattttcttttctttttttgctttacagatggggtctcactctgtcacccaggctggaatgcagtgacacagatcatagctcactgcagcctcaaacacctgggctcaagcaatcatcccacctcagcctcccgagtagctaggatcacaggtgcacaccactgcacctggctggttattttcttctagtctttttctttgcctctggcatatactttctttctaaatcctttttttcccccactgagctttatacagggcatttccctgtgccattaaagactcttccaaggcttagtggctgcagctccctgccatcatgcacacacccctggcccaggcagcttccttctggggttcaccttctgaagtaggggttccccaccttacccatactagtctgcgcctgtttgttctacattccagaatctacatcaacacgtagtgcatactcaaaagcagcaactttaaatatgactgactttaaaaaacaaaatagtgaagttttccctgaggttaaaagaggtggtgcaggactcatgcagaagagcaacaggaaggagaccctggaggtgacaccctccctaggtgctcagggacaaacattttacgtgagtagaatcctgctgtcccatccatttgtacgataatcatgggtgtgctcttttgatggaaactgctgggcagagatccctaacacatacatttcaaatgttcttgtcctatcatctttcacccagtagcacatggattataaacatataaccaaatgtacttcttcacttgccagggtaagaagcttccaacctaaaaggaatttgaagatgatttcgctgcagtaaattcttccattccatccattcattctacccagttttgaaggttcaggtttccctaaggttttccccttaatatatgccctgaaatttcccaggcatgaagcaagacagagaatacaagagtcaccaaaggcagttcttgggaggccaggtaggatagttggtggtgggagagggaggaccactctagggctcggcatgttgaccttaacacttaggtgggacaccaagcttaactggaaacttctgctccaaaagcctggaattgtattcaaaatcaatgtcagagaaatttacaccaaggcaatagcaaggttgaggca

SEQ ID NO: 552925 - DNA, 651 bp, Homo sapiens
taaaagtagctccttagaataatgctttcattcttctcttctctccccacccccacttctccaacgtgccctaaatttaccagcagcttctcctaggccggggttctcccacaaggagtctgaccgctgtgtctttgctgcatttgccctggtacatccccgggrttacacaggatcaggattccgacataggacgcctgtccgttaggactctgtagggaatggctgtggtgctgcccttcaattcaacaactcgagaggctgaaaattctacacaaagtcagcaattcaaattctgaaactagagaaacactgcggagcaagaccgagaagataattagcaggcaagcaacccagcctaccttgccgtgccaggggtgtctgcggcttatctctcctccttctctctcctccgcaggaaggtccttaaaccacggactctgctcatttacatttactgggaagcttctccctggggctgaaactctgcctggggaaagcctagcaagttagtggctcagagagccacagtaatcctttcagatgccagtgtagccccagaacatcctctacaaaagcaaatgcccctgaacccagattccaggagatttctttgatgacatcatttgccctactaaatccctagaaagg

SEQ ID NO: 552926 - DNA, 641 bp, Homo sapiens
ctttatgtcatccttttgcaagtgcttatattggaataaagtccaatcataacaatggaccygcttaaaaattgaacaatttgagtaacaggcccaattgttttcttctctggcaggtacacgatggaatgtcacacacacaaaaattttcccacaaggcatagtcagtttttctattagcagatttactacactttctttgttcataatttttattcaaaaatctgttcagtggaattcagagtcttgtcaaaatgattgataaacccacactgttaggtttcctctagaaaagccatggagaagaaaaaaagaatttaagaaataatacaataattcctgtgagaagaaaggctgtctcggactggcatgtggagggtgaaaggagaagaaaaggctagcctagggcaaaatacactgggctgtaaaaggatacattagagaaaagcagtttaattctgctctttcttgctgctttcacaccttaataatgcctaagggcagcctcctatgcagagatctgggagaatgctcaggcccctagtgcaggcatccacaggagtgagattaaggtgagctggagccctgctcagctgtcagcctagcctcaagcactgagacctccatcctttcccttctaa

SEQ ID NO: 552927 - DNA, 641 bp, Homo sapiens
ctttatgtcatccttttgcaagtgcttatattggaataaagtccaatcataacaatggacctgcttaaaaattgaacaatttgagtaacaggcccaattgttttcttctctggcaggtacacgatggaatgtcacacacacaaaaattttcccacaaggcatagtcagtttttctattagcagatttactacactttctttgttcataatttttattcaaaaatctgttcagtggaattcagagtcttgtcaaaatgrttgataaacccacactgttaggtttcctctagaaaagccatggagaagaaaaaaagaatttaagaaataatacaataattcctgtgagaagaaaggctgtctcggactggcatgtggagggtgaaaggagaagaaaaggctagcctagggcaaaatacactgggctgtaaaaggatacattagagaaaagcagtttaattctgctctttcttgctgctttcacaccttaataatgcctaagggcagcctcctatgcagagatctgggagaatgctcaggcccctagtgcaggcatccacaggagtgagattaaggtgagctggagccctgctcagctgtcagcctagcctcaagcactgagacctccatcctttcccttctaa

SEQ ID NO: 552928 - DNA, 687 bp, Homo sapiens
gtaataacaaaattaatgacttcattgtgagcctggcagatactgccctccaacaccaaaaaaagagtccagcgtaatactgtattcaagattcagaaaaatccgatgaactctccaaaatcaattgtatgattttgcagattgtacttttcacaaatgcatccagccaagagggtaaatggaaggctggtttgttagccttgggttgtttatcagtttaaaagagtgttttgttttttagattttcattgtttatttacccaaagagatgccttttgtaattcatctgcccagagagtgtttggttttttttktttgtttgttgtttttttgttttttgtttttttttttcaatccttctgctggaggcaactttttacaattcaaacaaatgtgacattgatgatctagtaatttttactaaattaatctctagttcctaaaatattaagagctctgaatgaactgttctctcctacagtgttagaaacacaaagtcttaaattctacatttcttcggtttatgtggataaagagaatctctatatccctccactctatctttcccacattgtagtcattagggaccaataaactgattcatgttaagtcacacgcagtcaggagtcttgacaaatacagatctctaagattgctttctgtagcatgtatataattcttagtgca

SEQ ID NO: 552929 - DNA, 711 bp, Homo sapiens
ttgccaaacagaacccctaaagatagaaaaaaataaaaakaaaaagtcatttttctaggacttaggaattagtcaccaacttgcattagcaagaggagctgtaaagaattccatcaaataatgcggtttgaaaggcctaatttaaatgaaaataactaatttcaaaataagaatcaaggcagaagttgaggagaagattcaggtgccagggagagatggaaatttacattggcggaattcatagttcactcttgggcagaggaactaccacattggagtctagtgcctgtgagttaataaacaaatactgctaagagggctgacactctttggagaacataaggacagcctcttagttccaatctatttaggtgaagtagtttagtattacattgagggaaggcattgaggtatcattagcagaatcctccttccagtatggtttttagcttctttgggttttgagaagagtttaggcaaaaaagaagggataggaaatcaatactgaataatacacatatctttacttcacacaacctctgctgtggcttgattttttggtacctagcagaatgacttgcacaaaagaaatgctcaatacctcttcaatgttaaaggaattaactagttaattaaaataattaattaattttgtgtttatataggcccacgcattgaccaaaggtgtttcagtgcaattttattccttcc

SEQ ID NO: 552930 - DNA, 1380 bp, Homo sapiens
tgaatattccaccccttggttaaataaatatttaaaggtagctccaaaccccgctgggcgtgatgctctgtggtatgcctgcacttttctttcttcagtacgtacttattcccgtcgcaatgaatctccacactttgttctgctcatccatgaattccttctcacgacagtgtcaagagcctggacaccagtcagggtcgaggcctcaccagcatcttggggcctcactgggcacagacgcgtgagcgcccggcctgcagacctgactctggcagccgctcaggccctcagagggagagatggaagctggcaggacgcagttgctaccgcgcggacccggcccccgaccagccttggcccctcgcgcgccgggrcagggccacaaatgactgcacctgggcttcgctggcccaggcaccacgcgactctaagcgcgcccaaagcgaccctctgcgcaaactacccccggggacgacgtcacccgtgaggtcccgcggcgcctcctcctaaagctcggctgggaaaccgtccgcttccccaagacttgggggcttgtggccgagttgttttagttttcctgtaggattcacgggtggctgaggcaaacacgcttgaaggcctaagacttttaagtctcttccgcaccctctcttctgtctcttccacctggaggatgaccgcttttttgggggttttgttgttgttttgagacggagtctcgctctgtcgcccaggctggattgtagtggcgccatctccgctcactgcaacctccgcctcccgggttcaagcgattctcctgcctcagcctcccgagtagctgggattacaggcgcccaccaccatgcccggctgatttttgtatttttagtagagacggggtttcgccacgttggtcaggctaatatcaaactcctgacctcaggtgatccgccctcctcggcctcccaaagtgctgggatgacaggcgtgagccaccgcgcccggccgggatgactgttattaacaattcccggcgtggtttctagcaccagcccacctaccacaccccacctcgcttgaggctgaatgggtaacaggatgaacccgcccctgggctggttttctctgaaccctaactcctgccgttacgccccaccagctctaggccaggaactctatgtgccccggccacgctagagcccgtacctagacccgtaggtcgggaggcctgcgcccggcactgcgcagacgcagcgtgctgtgcccagaactcttctgttcccaggagaatcaggggagtcggcgccggaaggggcgggtccgagctgagatttccagagccatgggagccggaagtccaaggaactgtacctccatcatgacgactccggttacgta

SEQ ID NO: 552931 - DNA, 1380 bp, Homo sapiens
tgaatattccaccccttggttaaataaatatttaaaggtagctccaaaccccgctgggcgtgatgctctgtggtatgcctgcacttttctttcttcagtacgtacttattcccgtcgcaatgaatctccacactttgttctgctcatccatgaattccttctcacgacagtgtcaagagcctggacaccagtcagggtcgaggcctcaccagcatcttggggcctcactgggcacagacgcgtgagcgcccggcctgcagacctgactctggcagccgctcaggccctcagagggagagatggaagctggcaggacgcagttgctaccgcgcggacccggcccccgaccagccttggcccctcgcgcgccgggacagggccacaaatgactgcacctgggcttcgctggcccaggcaccacgcgactctaagcgcgcccaaagcgaccctctgcgcaaactacccccggggacgacgtcacccgtgaggtcccgcggcgcctcctcctaaagctcggctgggaaaccgtccgcttccccaagacttgggggcttgtggccgagttgttttagttttcctgtaggattcacgggtggctgaggcaaacacgcttgaaggcctaagacttttaagtctcttccgcaccctctcttctgtctcttccacctggaggatgaccgcttttttgggggttttgttgttgttttgagacggagtctcgctctgtcgcccaggctggattgtagtggcgccatctccgctcactgcaacctccgcctcccgggttcaagcgattctcctgcctcagcctcccgagtagctgggattacaggcgcccaccaccatgcccggctratttttgtatttttagtagagacggggtttcgccacgttggtcaggctaatatcaaactcctgacctcaggtgatccgccctcctcggcctcccaaagtgctgggatgacaggcgtgagccaccgcgcccggccgggatgactgttattaacaattcccggcgtggtttctagcaccagcccacctaccacaccccacctcgcttgaggctgaatgggtaacaggatgaacccgcccctgggctggttttctctgaaccctaactcctgccgttacgccccaccagctctaggccaggaactctatgtgccccggccacgctagagcccgtacctagacccgtaggtcgggaggcctgcgcccggcactgcgcagacgcagcgtgctgtgcccagaactcttctgttcccaggagaatcaggggagtcggcgccggaaggggcgggtccgagctgagatttccagagccatgggagccggaagtccaaggaactgtacctccatcatgacgactccggttacgta

SEQ ID NO: 552932 - DNA, 1380 bp, Homo sapiens
tgaatattccaccccttggttaaataaatatttaaaggtagctccaaaccccgctgggcgtgatgctctgtggtatgcctgcacttttctttcttcagtacgtacttattcccgtcgcaatgaatctccacactttgttctgctcatccatgaattccttctcacgacagtgtcaagagcctggacaccagtcagggtcgaggcctcaccagcatcttggggcctcactgggcacagacgcgtgagcgcccggcctgcagacctgactctggcagccgctcaggccctcagagggagagatggaagctggcaggacgcagttgctaccgcgcggacccggcccccgaccagccttggcccctcgcgcgccgggacagggccacaaatgactgcacctgggcttcgctggcccaggcaccacgcgactctaagcgcgcccaaagcgaccctctgcgcaaactacccccggggacgacgtcacccgtgaggtcccgcggcgcctcctcctaaagctcggctgggaaaccgtccgcttccccaagacttgggggcttgtggccgagttgttttagttttcctgtaggattcacgggtggctgaggcaaacacgcttgaaggcctaagacttttaagtctcttccgcaccctctcttctgtctcttccacctggaggatgaccgcttttttgggggttttgttgttgttttgagacggagtctcgctctgtcgcccaggctggattgtagtggcgccatctccgctcactgcaacctccgcctcccgggttcaagcgattctcctgcctcagcctcccgagtagctgggattacaggcgcccaccaccatgcccggctgatttttgtatttttagtagagacggggtttcgccacgttggtcaggctaatatcaaactcctgacctcaggtgatccgccctcctcggcctcccaaagtgctgggatgacaggcgtgagccaccgcgcccggccgggatgactgttattaacaattcccggcgtggtttctagcaccagcccacctaccacaccccacctcgcttgaggctgaatgggtaacaggatgaacccgcccctgggctggttttctctgaaccctaactcctgccgttacgccccaccagctctaggccaggaactctatgtgccccggccacgctagagcccgtacctagacccgtaggtcgggaggcctgcgcccggcactgcgcagacgcagcgtgctgtgcccagaactcttctgttcccaggagaatcaggggagkcggcgccggaaggggcgggtccgagctgagatttccagagccatgggagccggaagtccaaggaactgtacctccatcatgacgactccggttacgta

SEQ ID NO: 552933 - DNA, 625 bp, Homo sapiens
gtgtgagctactgcaccctgccaggaagatcttccttgataagataccgaaggcaaaggacaaaaaggttaaaatattgataaatttgactacatgaaaattttaaaatttctgtatgacagaaatatgctaggaacaaaattaaagaaaatgcatagactgatagtaaatatttataacaggcaaaaggttataagccagaatgtttatgtacttttatttgtagataatctatatttaagcctcctttatatcaataagaaaaagacaaataactcaatagaaaagcaaatttgtatgaatgagcaatttataggaggaaaaatataaatagtcaataaacatatgagaagataacarccctcattggtaatcagggaaatgaatgctgaaacaagaatgaaataccacctttcaaccaacatattggtaaagatttaaaagtttgctaatatccatattggtgaggttataagaaaatggatggtctcttacattgcaggtaagagtataattagtaaaaccactttgggggcaatttggcaatatctagtacttttcaatatgcgtataccttatgaaccagcagttccccatctttgtatctatgctaaagaggcactaa

SEQ ID NO: 552934 - DNA, 633 bp, Homo sapiens
tgtagtaatcactatacacgtgtatatcaaaacattatgttgcccattttaaatacatacaattaaaaaaaattacacttaatcctcctgacatctctaggatgtagatattgtcatccctaggatgtagatatgttttacagaggagataactggacctctgagagcttgaattatttacccaaggctacatactttgataaattaggccagtttcatgcaattctagagctcactgagtccagaggacaacaacctggtaccaagttgatgataactcatctcagataactcctatggtggttaatactagcatccccagtttagartaagactggaacttggattaagtgcctgggaggggaatacaactccaaaagcaggttttcctacttcaaaatttggcctacagacaaataattttccttttctcgaataggtttttctgtttttttgtgatatcaaccctgaaacaactatgtttcctaagagagaaataatcaacaccaaagcctaaattctacatgatcatgagaaataaaatatatggtgaaaatggctctgtatgcatgatgctttctagccagtgactgtgtatcttccccccacctaatccaacaggtatttagtcat

SEQ ID NO: 552935 - DNA, 703 bp, Homo sapiens
ctgatgagcactgcaatcctggctacaccaactggacactaaagatatcacaatattggatgttttcwtacgatgtttttgggaatttttctaaaaggtgccagaactttctaattttatttctcactggtatataggctcaaacagagtagagaccatattttttgatcacttctgtatacacagtgtgtagaagaaacaggtgctcaagaaacattctctgaatattaacgtagtgattccgtgcccatgctgctagcataggcatagaaaaaaggagtgagcatgtgaaataaacttattacagtcaggtcttgatttaattgttctcttatttctacccaagggacatgtttccctcagtgttaggataagagaaagtcaggttggcctcactccactaatatttccatagacacaaaaaggtcttaaagctaacttcgaattgttacaagttttcagaaatagtcctctaaataaaagcatttgctttaaatttagttgaaagcacttcttgttccccttctctgatgatgactttttctaagacacttattgtccatgaccccaattgctctagctcttctttattaatttggagcactctgggggcaccacgagccagcatcaggcctcctggctctgccatagtgtggccgcagggcagcaggaggtagtgggggctgtaagagctacaggaagg

SEQ ID NO: 552936 - DNA, 928 bp, Homo sapiens
tttcatttgattttagagtaggtaactttaattatattttccaatgcattacgatttacccaaaaaagagcagattttttcatattcttgtgattaaaaacatatttgacaactactaatttccagtaaatactatctaaagtctcaaacatgacattcaaggatcttcaatttttcattagccacagaaaaaaacacaccacatatttagagaaaagaaagagaaaagaaaattgacatggaaattcctttacaggtacaggraagaaatatactggacagtattattaataacataattttctctctacagtgggaagaaactttgcaaactaaaaaaattcaaaaataatatgagtgttgtcatatgttacatttagataagtcagggctgttcttaactggaacctcttagaaggaagactatgtgtctaattttgtatacaacagattgtataactttgatgctttgatgataatgataatgaaacatggcttaaaaagaaaacagatggaaagctttaaagattttttttaaatgttgatataataatcggaattattttgaaagaaaaccagaaacaaatacattctgttagaaatatgattctatattggaacagaaattccttgttaattttgcaattttttttggtgggggggggggacggagtcttgctctgtcgcccacgctggagtgcagtggcgcgatctcggctcactgcaagctccgcctcccaggttcacgccattctcctgcctcagcctcccgagtagctgggactacaggcgcccaccaccacgcccggttaattttttttgtatttttagtattgacggggtttcaccgtggtagccagtatggtctcaatcccctgacctcgtgatcctcccgtctcggcctcccaaagtgctgggattacaggcg

SEQ ID NO: 552937 - DNA, 666 bp, Homo sapiens
gaataagatgtagtatttgaaagcacaaaagaatgattacggtcaacaataatttattgtacactttaaaataacaaaaagartatagtaaacacatttttgggattatttcctctctttaagaatgcaaagggttcccaagaccaaaaattttgagaactgttgttttaaaaaaatatatttgctgaaagaattttgtgtgcaaaagattaaaacagccacaataaatgacataatgtaagaatgcatagatattttgcttgatacttgcattaatgatgtagagaatgttttgttaaaaggctgtgatatcattataaaatgattggtattaaatataaaatgtagaattaacctatcataagaaatacacagactcctataccaactgaaataatcccgcaactgacgtgataagtgaaaatactttttaatatatgtagatactttatcttaaaatcataaattagataatatctttacaatcattttaatatttttatttattttaataaatataccacacatatgtttaccctgatgtgattattacacattgtatgcctgtatcaagatatctcatgtatcccataaatatatacatctacaatatacccatgtggtatatagttatcaattttaattgtaatggaaattttaaaatga

SEQ ID NO: 552938 - DNA, 590 bp, Homo sapiens
aaacccaaaggatcatatgcactttaaccatgcattctgttctcttttccacttgtaataatgccattgtttactataaatgacactgacatggctgtttttcagattaatgtcaagagcccttaraagatcttgggaattgtctttctcatagttgtcccagcagagttcttcctacttcctgtaagattataaacccagatataagtaacaacatcttgttagggagtaataatggataataagggatggataaaggacataaccttttgtgtgtgtgtagtaagaatacttaacatgagatctaccctcttaacaatgtttaagtggtcaatatgttattattaactataggcactatgttatgtaggagagctctggaacttctataattgtagctttatactcatcagataataactccttatatccctctttcctcaatcccctggtaaccatcattctattgtctacttctatatctttgaccattttagatgcctcatatgagggtcattgagttgttttttctccattgtattattgaagttctttataaactgtgataagagtagcaatcactttctcat

SEQ ID NO: 552939 - DNA, 613 bp, Homo sapiens
ttttcagagtgtaagttttgtatttattttgttacattcattcctgagtattttattcttttcaatgcaattataaatagaactgttttcttaagtttacatttgtactgttcattgctagtatatagaaatacagttgatttttgtatattaaccttgtgccctgcaactgaacctatttattaattccaataataatttagtagcttccttaggattttctatatgtaagactgtgtcatttcaaatatagtattgcttgctctttgccagccagacgcctttcatcattgtcttgcctaattgtcctcccatcagatatttagggctgttgtaatcatctggattggctgagtccttgacattccgaatgttacacatctagagccatggttagaggtttgggcttctgagctaagcagagctttccttttgacaagctgacagcccctaccagagtgaggatatcagctcttctcccaggctctgctaattaacgtttcagtggaggcgtgatatgtggtcaktttcctccacagtcaaagcaggtctcactcctttgaatccccaaaggcacatacaccctgcagctcacgcgtgagggtctctccac

SEQ ID NO: 552940 - DNA, 959 bp, Homo sapiens
tggtatttgaaaaaaattagagaacccactggagttgttattatgattaaatgaaatagtcaacatcataaataaataaatacttaaatgaraggcacatatccggtgctctataagtgttggctgtcagggataacacatttacaaagactactgtctcttaccatataaagtattccaatttttgcttctgcatcattcctaattcaagcggtttgggatgagtaattggtccagccccattccttaactttctctgtagaaaatacaaagttccacatgcaaaaaaacaaaaacaaacaaaaaaaacaccctgctagttagagaagaacaatttcttgaggttgttaacagagaaaaatacacttgcctcttttttatttgacttattagattttttaaatcgtatttggcaaaaaaaaaaaaaagaagggaaggaaggatgggtaaaaatagaaaagtaactcccaggccatttgcatgggcaaggccataagctaaaatagccaaattatccattaaactaaaataaacttaacttcagacactataatctcccctatttcagtttccccaatttgcttaaggaaataaaattttattaagtaatattggagaaaaacacatttatcttatactgagaagtatcactttccatttaggggtgcctggattttaatgataacagcaaaaaatctggggtctttctactgtgcccgcatatttttatggacaagatttatttgacagaaagtaaccatttcattacttcaggacattacattcaaatttagatatatatgtacataggtatgtatacatacatctatatacacacaactgttcatttatacatgtagataaatacacacatgtatccatatgaacatatgccgagagagggaaagttttatcaaaaatgtaatctagtatccttttttaaaatgttaatatttatc

SEQ ID NO: 552941 - DNA, 640 bp, Homo sapiens
attatttcctaattgtccacatagctttgttttcttgctgggaactgatttgccaagtgtgctgggagtcccaggcagtggagagtcagcattaattcatcctctcatttattagtgggtcaatttttctccctcaaatctcttttttccttaatataatttgcaactgcaaaaagactgcctgagcctccccacaggcagcttttctagcactgtggggtgaagcctttcttctgttgtgatcttgatctttccctcccagctttcactgaggaagtacattctgtgactcggctgtcctgcatgtttccaaaaagacgtgttcttttgcctggagatcttgccgtaagtcatcttttatgaggcaaagctgaagggatcttatccctgaattmtttgttcttcaaaaggaatagtaatcttttgcacttgcaaagacaaaaaaagtccctcagaagacctctgctttgcccccacataaaacttcactcttcctgaagtttctcagtagttttccccagtttccaactcttgctttagagtgtcgagccacagagtagcagctcgagacaactggattctatggttcccaccagggtccagggctctctcctgatctgcccaacaatttttattcagt

SEQ ID NO: 552942 - DNA, 639 bp, Homo sapiens
atttgccatttttgtccaggctggtcttgaactcctgacctcaagtgatctgcccacctcggcctcccaagtgctgggattactggtgtgagccaccacgcctggcccagattgtaaaacttatatttatatggaaatacaaaatccaaaacaagatgtctctttaaatgacaaacttggagtactcatgcttctgggtttcaaaacttatggtaaagccacagttatgaaggcagcatggtactgggatggggaaaataatatagatcagtgggacaaaattgagagtccaaaaataaatccttgtgcttgcagtctactgattttgacaaaggtgccaaggcaattcactggggaaagaatagtctgtttaataaatggtcctgggacaactgaatatgcacaaaaatgaactcacacccttgcaccatatacaaacagaactcaacagattgctccacgtcacatgaatggggatgtccttttccataggctccaatggagtagaattaaaaccaacagatggaaaccatgggataaaaaagattgagagacaaggcaaggaagaacttcctcatcaaataaggagktgttaaaatcttcatacatcagaaaatttgagaacgggcagaagtaccc

SEQ ID NO: 552943 - DNA, 1394 bp, Homo sapiens
tatgatgaggcatatttcatggtgcaggaataggctggaagtttgcagctcaatttgcttctgaattggaagcacaggtayggcaggccatgataaacaaaggggctaaactgcgtgtggctaaagccttgttgaaggaatgtggacctagtaaaatctcacttgcctcaggttaaagagtgtgaaatgggcgttccttttcttttttcttttcttttttttttttttttttgagacagagtctcactctgtcacccaggctggagtgcagtgacgtgatcttggctcactgcaagctccgcctcccggattcacgccattctcctgcctcagcctcccaagtagctgggactacaggcgcccaccaccacgcccggctaattttttgtatttttagtagagacggggtttcaccgtgttagccaggatggtctcgatctcctgacctcgagatccacccacctcggcctcccaaagtgctgggattacaggtgtgagccaccgcacccggcgaaatgggtgtttctttacacacacaaaccccttcacacttgtggtcttcccccctatgaatcaaggagtccaggtcttgatgcagacctgagacagcagagtgtctattttcaaactatcatgtgctcacagctgccagaaataagtcacctcagcaaactcaaatggtggcaatttcataacacataaaattgattgatgctcacaatcaaaatgtatttccctcgataatttatgctcaacaatttgacgtaattatctgtgccacaatagtaacatttctgccttcctgtcagcgctgaagtgcaagcacacaagcacacacacgtacacagaacaaaaaacacactatctttcagaggcaagatttccaaaaaatcaatgtcatcgcagcctcttttgtattttgttgtggcaagagtgaatttaaacagcctaggaagtcaaaacaacgggaaaatgtcaatacatattaacttaatcacgcagctctgccctgccatccttgtctaacactcaaattaggcttccactgtaagttccacgccgctattggcagcttgtaacttccccacaaatatttgcagtcttgagcggtcatccaaaatgaaggatggctccaggcttccaggcatcttctttgcatctgtatgagattttgtcactgctgttttaagaaaatcactccccaggcaggcttgggctcacttgtttgattcacaatcttaaagcatcttctatccagcaaatgcttttctgcctgcctcttgatggcactgcagcagaaacttcattatctgatgctctgcataagcctctttgaaaagaaaacttaatataagacatgttaatccaaataaatgcacaatgtactggcccca

SEQ ID NO: 552944 - DNA, 659 bp, Homo sapiens
aattaatatatgaacatgatcttttcaaaaaatacacaatatgatggttaaatctaacatccttttttgataatcacccctggttttaagaatataactgtctagagaaaataattaacagaggtcattgtgtattatctagaactcattgtatgccaggcaattttctgacaacctcatggagtcggtactatttttatccctattttacagatgaggaaactgatgccaagagattttcacatagctcaccaagtcactagctagtaagcagtagagccaggattcaaattcaggaaaaaaagcacatgagaaggttcatgctgcttcctgatcaaacccttactctcgaagggtaaccaccatcctgctttctaactgcatacattcattgtgcctctttctgtattttatataatttcatataaaaatgtgtttgtacatggcatattttgtggagtgttatgttttgaaatttattcatgtttgctgtctatagttgtaggtcattcttctctttgctgtaacccattgtgtgaatgtacttcaactttatcatcatttaactgttagtgggcattaggatactttaaagtttgaggtaattatgaccagtgcaatatgaacattctcrtaaatgtttttgataaacatatgca

SEQ ID NO: 552945 - DNA, 559 bp, Homo sapiens
tctggcaaacaaactggaaacccagtccatctttgcagctgtaaatgtctcatcctgcatccttaggtcttttcctcacttccctgcccctcaaaatccttctctttctttcaagacttctctcatacgttaccactacaataaagcctcagccactgcccacaaatgtaattaacttcctcctcctagctccttycatctggtcaaagcagcatcctacatgtctccaggatgttttagagaccttgttgaattcttccagttacaatttcaagttcattctgtgtatagtttttgagcacctggacccaggtatatgatgaaaagaaaataatctccttccttattactttcctcctggtgcttactcagcacttccttcctatcctttacggatgccatttcaaaaatgtcaaactgctgcccagccacattctagtatgtgtagctggacatgtcacaataggattagatgttttctgatgattttaagttcttctgaggcatttaattatgaccccatggatacaggttcaaattgagggtaggctgacttttt

SEQ ID NO: 552946 - DNA, 563 bp, Homo sapiens
aataaaaaattaatttaccccacttatcaagtgtgaggttttgtttcatattatcattgtgaaacaatttcagatcttttattataattattatatttagaacataaaattattcctttaaaagtcctgaatattattcaatagtctcttggtatttgcagatttactatttggggcttcaatttttcatgagtgatattgtttatatctgtattcgtaagtgtttcgaggcacgtatttgagagtgaccttagctgaccaccaggcatactcattacatgtgcctgatttctctctacacaggtgctctttcttctgaatctaaaaaaaaaaaaaaaaaaaaccctccaaaacagaaaaaaaaaaaccctttgtttctttgttaaaattatccgccccccsccgccaacacatacacataattccagctccaatggtggaaaaagtaatgcaatttagcttaaacatttctaaaaacaaaagctctgggtgatggtctctctttgagattgtgggttttctgagtcttcaggaagcacctgcccctaatgtcaagtatttcc

SEQ ID NO: 552947 - DNA, 518 bp, Homo sapiens
tgttttcccactgagctaggaggtcaggaagcagcactcctgatgacatgagctcatctccccaaacrtaagccctcactagaccacaggttggtaatatactctcagcttttaagtaaaactaaacagtgcctccctgtgccgagccccgttccttctctttctacatgggcttccctggaatgagtgagaaaagattggcctgggtgagcttccagagcaccagctgggaaagaccccctagggtgatgcagacctgctctactcaaggctcagggcaaatccctcctgctctaactccccaaggctggccctgtctttccaagtggaagccaggagcctggggttcagggtgcctggtgaacatggcctgggtggtcctgggctccttacttggccctgcactctttgggtggtcctggactgtggcacccacctggcctcagtggaggaagcccctaccttgacagactcgttctcatgaattccagttagtagctggggctgaagcatcaggt

SEQ ID NO: 552948 - DNA, 536 bp, Homo sapiens
tgcattctgaatttaggggaggaagtggctatagtgggctggagaacactgggaagaatttcaggtttaaggagaattgaattgagtctggaggtctgcagccataccaccctgaacacgcccagggagaattgaattgagccttgaggtctgcagccataccatcctgaacacacccggtcttgtctgaattgagccttgagaaatgggctggctgtgaattgaattgagtcttgaggtctgcartcataccaccctgaacacacccggggagaactgaattgagccttgaggtctgcagccataccatcctgaacacacccggtcttgtctgaattgagccttgagaaatgggctggctgtgaactgaattgagtcttgaggtctacagccataccaccctgaacacaccccgttttgtctgaattgagctttcagaaatgggctggctgtggagaggtggggttcatatggaataagatttggaggggaaattctcattaggaagggtgaagaggattagtaaagtcagaggc

SEQ ID NO: 552949 - DNA, 537 bp, Homo sapiens
aatgaatgcagtcagcagtgggaggaaggaacagatagagagagcgagggtcacaaacagcagaaaagtaccgaaaaaaaggacattcatccagttgcccatgatttcagaattttggttaatctaatttttatgtctaagccctatcttgatggtattcattaatttcattaaaaaatacagagaattggtgaaaatatatgagaaaataaactatttttatttgtaaattattagtcatttaaaaataaacatactattatcagtgcttttgttattttgtgaaccaaggtcaggcacctaccctgctaaataaatgtttattgaatagaagaatggatgcatggatggatggatggatagacgaatgggtggatggatrgatagatgaatggatagctggctggggctggctggctggctggctggctggctggatggatggatggatgcacagttggatggatggacagatggatggatgagtactagggtagtgttagttcttgtgatatgctactagaaccaggatttgac

SEQ ID NO: 552950 - DNA, 537 bp, Homo sapiens
aatgaatgcagtcagcagtgggaggaaggaacagatagagagagcgagggtcacaaacagcagaaaagtaccgaaaaaaaggacattcatccagttgcccatgatttcagaattttggttaatctaatttttatgtctaagccctatcttgatggtattcattaatttcattaaaaaatacagagaattggtgaaaatatatgagaaaataaactatttttatttgtaaattattagtcatttaaaaataaacatactattatcagtgcttttgttattttgtgaaccaaggtcaggcacctaccctgctaaataaatgtttattgaatagaagaatggatgcatggatggatggatggatagacgaatgggtggatggatggatagatgaatggatagctggctggggctggctggctggctggctggctggmtggatggatggatggatgcacagttggatggatggacagatggatggatgagtactagggtagtgttagttcttgtgatatgctactagaaccaggatttgac

SEQ ID NO: 552951 - DNA, 568 bp, Homo sapiens
cattattctctttatttataggaattaatcctatttataaaatacaaatatagtattgtatcacattcttcatttatttagaatgcatcacattcttcatttattgtatcacgttcttcatttatttacttccaatgccttctattgttatttaaataaatctgaagtccttatcatcgtttacaaagccctgtcttatcactacaaccaagtctcctgtccctcacatttgttattaaatatcccaatcacactacacttatttatggttcttgagaaacctagatgtgttataatctcctgggtttttatctatttttaatctaacgttcttggaaagattccccagttcttcacaaagcaatcttctacgtkcagtggatacctatttctaaatgttctcctagagagtttccgatgagcatcccaacatcattaatctctctgcagttattttaaacagtatttgccacaatttgaaattaactacattatatgtataatagatctttataattttttttttctgtgagagcaaggcattctctcttattaatcactatttcct

SEQ ID NO: 552952 - DNA, 1280 bp, Homo sapiens
accccaaatcttaattctgatcaaattataaggcacattatatgaaagttatgttaagcataaataattcattttatagaaaataaattattttctatatataacagatgttatacacaaactattaaaacaaacaaatctaccctaagaatttgcaagaattccttcctgcacattcaagcacatttaaggcccagaaactggccaaatactacttctttaattaaaaataaattggcattaggtcgggcgtggtggctcacgcctgtaatcccagcactttgggaggccgaggctggtggatcacctgaggtcagggttccagaacagcctgaccaacatggtgaaaccctgtctctattaaaaatacaaaaaattagccgagtgtggtggtattgcacggcagttgtagtgagccaagatcatgccactgcactccagcctgggcaacaggacaagactccgtctcataacaaacaaataaataaataattggcattaaaatatttttccaggtcaatcctaacagcaaactcacaggaattaatcaaagtttgatactaagattgataaaaagattgatactaagtctttttccactccttaaaaaaaaaaaaatttagccctattgctatttaagctgcttgatattataatactataactaaaaaaaaaaaaattgttataaagataagtaaaaaaacaaagcacaaaactaaatctgtggtgtgctcataatgatataaaaactgtcaaactagattgggtgtggtggctcatgcctgtaatctcagcactttgggaggccgaggcaggtggatcacctgaggtcaggaattcaagaccagcctggccaacatggtaaaacccygtctctactaaaaatacaaaaattagccaggtgtggttgtgtgtgcctgtagtcccagctactcgggaggtcaaggcaggagaattgcttgtacctgggaggcggaggttgcactaagtcgagactgtgccactgcactccagcccaggcaacagagtgagactccatctcaaaaaaataaaaataaaaaacaaacaaacaacaacaacaacaaaaaaatgtgtcaaactaaaggaaacatcaaaatgctaccagtagttgtcttcaggtagtagaactaagggctatttattttctctttctactttataataatttttttaattaataaaagatcatgggccagggggcatgttgccaggtggccaacacagcgaaaccccatttctactaaaaatacaaaaattag

SEQ ID NO: 552953 - DNA, 1280 bp, Homo sapiens
accccaaatcttaattctgatcaaattataaggcacattatatgaaagttatgttaagcataaataattcattttatagaaaataaattattttctatatataacagatgttatacacaaactattaaaacaaacaaatctaccctaagaatttgcaagaattccttcctgcacattcaagcacatttaaggcccagaaactggccaaatactacttctttaattaaaaataaattggcattaggtcgggcgtggtggctcacgcctgtaatcccagcactttgggaggccgaggctggtggatcacctgaggtcagggttccagaacagcctgaccaacatggtgaaaccctgtctctattaaaaatacaaaaaattagccgagtgtggtggtattgcacggcagttgtagtgagccaagatcatgccactgcactccagcctgggcaacaggacaagactccgtctcataacaaacaaataaataaataattggcattaaaatatttttccaggtcaatcctaacagcaaactcacaggaattaatcaaagtttgatactaagattgataaaaagattgatactaagtctttttccactccttaaaaaaaaaaaaatttagccctattgctatttaagctgcttgatattataatactataactaaaaaaaaaaaaattgttataaagataagtaaaaaaacaaagcacaaaactaaatctgtggtgtgctcataatgatataaaaactgtcaaactagattgggtgtggtggctcatgcctgtaatctcagcactttgggaggccgaggcaggtggatcacctgaggtcaggaattcaagaccagcctggccaacatggtaaaaccccgtctctactaaaaatacaaaaattagccaggtgtggttgtgtgtgcctgtagtcccagctactcgggaggtcaaggcaggagaattgcttgtacctgggaggcgraggttgcactaagtcgagactgtgccactgcactccagcccaggcaacagagtgagactccatctcaaaaaaataaaaataaaaaacaaacaaacaacaacaacaacaaaaaaatgtgtcaaactaaaggaaacatcaaaatgctaccagtagttgtcttcaggtagtagaactaagggctatttattttctctttctactttataataatttttttaattaataaaagatcatgggccagggggcatgttgccaggtggccaacacagcgaaaccccatttctactaaaaatacaaaaattag

SEQ ID NO: 552954 - DNA, 375 bp, Homo sapiens
acagctgttagaagggttagatcttgtatttggactcaggtctgcctgccctggaacttgactctcccacacctggtgctgggcacactaggagacgtcacraggctcagagatgccacccttcctagaacgggcgccgtgcctctcttctccacacactgcaggggagacaggcactgtgttttcagataagttccatgtgcatcaggggctcggtgggaaagggaggacacactcagattaggattattcatggaggattctccaaagaggctatttggaaagacggagggaatggtgaaggaaagcacaagagaaaatggacagaaccgttacttcctcacgcctgaaggggatgggttactggaagccagg

SEQ ID NO: 552955 - DNA, 375 bp, Homo sapiens
acagctgttagaagggttagatcttgtatttggactcaggtctgcctgccctggaacttgactctcccacacctggtgctgggcacactaggagacgtcacaaggctcagagatgccacccttcctagaacgggcgccgtgcctctcttctccacacactgcaggggrgacaggcactgtgttttcagataagttccatgtgcatcaggggctcggtgggaaagggaggacacactcagattaggattattcatggaggattctccaaagaggctatttggaaagacggagggaatggtgaaggaaagcacaagagaaaatggacagaaccgttacttcctcacgcctgaaggggatgggttactggaagccagg

SEQ ID NO: 552956 - DNA, 375 bp, Homo sapiens
acagctgttagaagggttagatcttgtatttggactcaggtctgcctgccctggaacttgactctcccacacctggtgctgggcacactaggagacgtcacaaggctcagagatgccacccttcctagaacgggcgccgtgcctctcttctccacacactgcaggggagacaggcactgtgttttcagataagttccatgtgcatcaggggctcggtgggaaagggaggacacactcagattaggattattcatggaggattctccaaagaggctatttggaaagacggagggaatggtgaaggaaagcacaagagaaaatggacagaaccgttacttcctcaygcctgaaggggatgggttactggaagccagg

SEQ ID NO: 552957 - DNA, 624 bp, Homo sapiens
gagtactgtttgaattctaaaaacaaaaataattatgctgggagattaaatacaaatattgatttatgttttacagtaaaataccagaaaattatttggtaaatacattaaatagagctttgtttgttttttgtgcatgtagtataaccaattaaaacctgaaatgaataaagaatatgctgggtgtcatggttcatgcctgtaatcacaacactttggaaggcccaggtgggaaaattgctttagaccaggagtttgagaccgacctagacaacatagtgaagtcctgtctctagcaaactttttttgttgttttttttttttttttttttgagatggagtctcgctgtatgtcccaggctggagtgcagtggcatgatctcgggtcactgcaaccttcgcctyttggattcaagtgattctcctgcctcagcctcccaagtagctgtgactataggcgcgcaccaccatacccagctatttttttttttttgtatttttagtagagacggggtttcaccatgttggccaggatgatcttgatctcttgaccttgtgatccgcccaccatgacctcccagcatgctgggattacaggcgtgagccactgcgctcagcccaaaa

SEQ ID NO: 552958 - DNA, 652 bp, Homo sapiens
aaccagccaggggctggtctatttagcacttgatgcctctataatttttgtcttgggtacgtgcatttaaaaagcgccccaatctggagtgggaggtggggagctgctgaggctcacatactctttgggccgcgctatcactagsaaatctggagaagatccctgactgcaagaagccccatcattatattagagggaagtcagagacattttaccttggctttcctgtaggcagatcatagcacttcaagttctaccacaaagatacagctattcgatccccaggaaatccaagtgggggctctggtttgctgttggaactcctagtcactgaccctgattccttgtctcaggagtaaagctgcctccgattctcatagggaacacgtctcctcaatttgtattctaagccagctactgcctgcaggccctggtcaaattaacttgtccctcatgaaatagcctcaccctgggcatatcctcctggtggaacgcaatttgtacaagaaaaatgcaaatctatttatgcatctccaattcaataaaaactggaagacttactatgggttaattcaattaagaatttttcactctggacaacggtaaagacttgatatataaaagctgcacagtctggaactgataaagcttg

SEQ ID NO: 552959 - DNA, 652 bp, Homo sapiens
aaccagccaggggctggtctatttagcacttgatgcctctataatttttgtcttgggtacgtgcatttaaaaagcgccccaatctggagtgggaggtggggagctgctgaggctcacatactctttgggccgcgctatcactagcaaatctggagaagatccctgactgcaagaagccccatcattatattagagggaagtcagagacattttaccttggctttcctgtaggcagatcatagcacttcaagttctaccacaaagatacagctattcgatccccaggaaatccaagtgggggctctggtttgctgttggaactcctagtcactgaccctgattccttgtctcaggagtaragctgcctccgattctcatagggaacacgtctcctcaatttgtattctaagccagctactgcctgcaggccctggtcaaattaacttgtccctcatgaaatagcctcaccctgggcatatcctcctggtggaacgcaatttgtacaagaaaaatgcaaatctatttatgcatctccaattcaataaaaactggaagacttactatgggttaattcaattaagaatttttcactctggacaacggtaaagacttgatatataaaagctgcacagtctggaactgataaagcttg

SEQ ID NO: 552960 - DNA, 652 bp, Homo sapiens
aaccagccaggggctggtctatttagcacttgatgcctctataatttttgtcttgggtacgtgcatttaaaaagcgccccaatctggagtgggaggtggggagctgctgaggctcacatactctttgggccgcgctatcactagcaaatctggagaagatccctgactgcaagaagccccatcattatattagagggaagtcagagacattttaccttggctttcctgtaggcagatcatagcacttcaagttctaccacaaagatacagctattcgatccccaggaaatccaagtgggggctctggtttgctgttggaactcctagtcactgaccctgattccttgtctcaggagtaaagctgcctccgattctcatagggaacacgtctcctcaatttgtattctaagccagctactgcctgcaggccctggtcaaattaacttgtccctcatgaaatagcctcaccctgggcatatcctcctggtggaacgcaatttgtacaagaaaaatgcaaatctatttatgcatctccaattcaataaaaactggaagacttactatgggttaattcaattaagaatttttcacwctggacaacggtaaagacttgatatataaaagctgcacagtctggaactgataaagcttg

SEQ ID NO: 552961 - DNA, 784 bp, Homo sapiens
tgcgacgctgggggcctggagagagagtgtagatgtgtcagtgcctccactcgctgctcaacctaacccacgggagctcggctcagtgcctggggcgaggactctgtgggggtagggggacagacagaacccaggctggggtacagtgggagaatggaactcaggctgtgccgagcagagatcctggctcctcgctctgggtttcatgcctgcctctgccacccagatcccccccaacacacacacacacctgagcccctgctgcagcttcctggccacctgcctgcactgccatccccccagtgagcagtcagggccaccctctccaacctaagtcaggtcacgccatctgtgctccagacgcactcctgattcactcaagcagagtgaaacccacgkcctgctgcacccaggggacctggcccattgcctctgacctcggtctatccctgtggcttcctcagctccagcacgctggcctgcgctgctctgtggtcccccagctgagctccacccaggccctggcacacgtggctccttctgcccggtgggctccccaaggggcacctagcaccgctctgtctcctcttccagcctttctcaaatgccaccttctcagaaagccaccgtgccagccttagtccatttgtgccacataagaaaaataccataggctgaataattcacaacccacagagatggactgttccggaagctggaaggctgacatccaggcgttggcaggcttggcatctctctgcttctaggtggcaccgcacgtggt

SEQ ID NO: 552962 - DNA, 1154 bp, Homo sapiens
ctcacagctgggaaggcccaggttggggtggggtcagaggcagtcaggcaggcttcctcgtagctgaggatgggggccctcattctgtggcctgtagggtctgggagagtggacatgtggccctctccccccagccctaatgctcagacagggtgggtgctcactagacacttgctgtgtgaatgagtgagtgagggtgaactgtgcagatggccgtgcttagggccctgtcccatccagaggccacacaaaaatcgacagcatctcagggccccttgggccttcaaactggagccccgtgtgctccagagcagagggaggggccatgggagtggtgggtgctgtgggcagacggacccactggctctcaatacggccacatcagttcctatcctaagatcttgggcaagtgattagagtctctcagaaccttggctcccctggcaggggcagcgaaacacccatgtgggggagtggctgggccttsaacctgcgtgggcagagcctcttctcttctggggagggtgaggaggggaccgagagcccgaggtgggcatgagtatggccaggacaggggcctttgccccgccttgggctctggtggcgtgagccccacgtggtgggagggaacagagcaggcagaggcagcgaagctgtgctgaggagccatgccgaggtcccaccctcactgcccctggtgagctgtgtggctttgggcaagccagtgcccctctcagggccgcggtggcctcactgtcaaaaatgtcgaggatgggcttctccaggccttggctccagagcccctcagagctgagcctcacctgcctcctcctccagggcttctctccctggcaggggcagtgatcactcaggctgtgccagggctgggctgagtcctcagtgtggggttggctggagcagggccccctgttgccagcagtgtgactcatcaggtgttgatggggtgagtcatcagggggagctggggaacggtctccagggtctgagatgctggctcagagcagggctgactgacagtgcagcctgggaggccgaccctatgccagcaccgtgcactcatcgtggccccactcccacctcatgcttccggtcccctccccgggctgccctggtgagtcagggcaccctgggtc

SEQ ID NO: 552963 - DNA, 1154 bp, Homo sapiens
ctcacagctgggaaggcccaggttggggtggggtcagaggcagtcaggcaggcttcctcgtagctgaggatgggggccctcattctgtggcctgtagggtctgggagagtggacatgtggccctctccccccagccctaatgctcagacagggtgggtgctcactagacacttgctgtgtgaatgagtgagtgagggtgaactgtgcagatggccgtgcttagggccctgtcccatccagaggccacacaaaaatcgacagcatctcagggccccttgggccttcaaactggagccccgtgtgctccagagcagagggaggggccatgggagtggtgggtgctgtgggcagacggacccactggctctcaatacggccacatcagttcctatcctaagatcttgggcaagtgattagagtctctcagaaccttggctcccctggcaggggcagcgaaacacccatgtgggggagtggctgggccttcaacctgcgtgggcagagcctcttctcttctggggagggtgaggaggggaccgagagcccgaggtgggcatgagtatggccaggacaggggcctttgccccgccttgggctctggtggcgtgagccccacgtggtgggagggaacagagcaggcagaggcagcgaagctgtgctgaggagccatgccgaggtcccaccctcactgcccctggtgagctgtgtggctttgggcaagccagtgcccctctcagggccgcggtggcctcactgtcaaaaatgtcgaggatgggcttctccaggccttggctccagagcccctcagagctgagcctcacctgcctcctcctccagggcttctctccctggcaggggcagtgatcactcaggctgtgccagggctgggctgagtcctcagtgtggggttggctggagcagggccccctgttgccagcagtgtgactcatcaggtgttgatggggtgagtcatcagggggagctggggaacggtctccagggtctgagatgctggctcagagcagggctgactgacagtgcagcctgggaggccgaccctatgccagcaccgtgcactcatcgtggccccactcccacctcatgcttccggtcccctccccgggctgccctggtgagtcaggrcaccctgggtc

SEQ ID NO: 552964 - DNA, 576 bp, Homo sapiens
gatgccttgaatattatttatatctctggctttgtaaaataaaaatatacaattgaaaatgttcagaaagaccaggtgttatggccagcactttgggaggtggaagaaggaagatcacttgaggccagcagttcaaagccagcctgggaccctgtctctaccaaaaaaaaaaaaaaaakaaaagaaaaaaattagccaggcatggtagtgtacacctgtagtcctagctacatgagaggctgaggtgggaagatcacttgagctcatgagcttgaggttacagcaagctatgatcacaacactgtacttcggcctggacagcagagcgagatcctgtctcatcctcaaacagcagaatctcacagcatttatcaacatgtctaaagagagacaaagtacagcacctaggcatgtgtttctttttggggatttggtgacatcacaggaattggtgtacaaatacatcgactggaatatccaaggcgcttccctctcggtttatcatggagatgaatccaaatcccatgcgcacattgaaccacttacagtggccagttccgcgcaaaacctgggatt

SEQ ID NO: 552965 - DNA, 2404 bp, Homo sapiens
ttgctgtgtatccacaggcaagctatttaacttctcttagcctcggttttctcatctgtaaaattggaaacaaaaaagcagtgactacataggctatttcgaagattaaataattgctaattggaaagttttagcaaagtgtctacatcttgtaagcaatactagatggtaaccattaaagcatttattgttttttatgatgatgtgcgattattttctctgttggactgattggaagatacccgttccataattcatactaaaattaaaataaaaaaaaaaaaacaaatggaagacccctcctcaaaaattacaaaggctactgatggttttcttggggtaattgattatgattatttttttcttactcttttttccaaatcatcataatatagctttgcttatttttaatggacaaggaatattaaaccatcctttctttataattgacaaatctgtgagtagatatctagagactaatcatttctcacatttttaaagttaagtccctttaacttggggagcataatattggcagactgggacagtttgaggaagctcatcagaacatgcctgtagcatattcttgtaccttttatttagcttaagggtgttatttgttcttctcttgtgataagaagtctttgattctctgatgagtgtatttaagtgacaactgagatctaggcagtagacaaataaagtaggccatctccttaggagtgggctttcttctaaattaggggaacagagagtgcagcagtttagggggtaacaatagaaaatgaatggtttttgagtgcatagtgcttctcactttatcagtagccatcagcaggttaccctgctgaggtcaaggaagtcttttatcaaagttttaagggagtagttgataaaggaaagggagactgaggactcctgtggagagacacaggatgaggctgcaggctaaggttatcagcttgatattgttcacagacaggattttcttttaagaagtcagtctctctgggggtttctacaattgccttaaactcattcacatttttataaagaaacccacccctgtggcttccacagggctgtaattacagtcagttggcacatgcattcagaggtcctacttttctcatcaatgatccccacaatatccaattaggcataacttttctggaccagagatgggagatcatttttaggagaacaggacaaaaccatttttgcaaaaggaaatccaacagaaatttatacttggtttacttctagcaatcttttatatgactgaagtcaaaataatcccctaaaagtagaagtgttaaatacttgctggacctgatggcaggtccagcaggagggagatttcattgaggggtgcagggagatggatccatgaaaaattgcagtttacagaaaatgagtaatatggtttggctgtgtccccacccaaatctcatcttgaattttaggtcccataattcttacgtgtcgtgggaattaattgagtcacgggggcaggtctttcccatgctgttctcatgatagtgaataagtctcatgagatctgatcattttataaagaggaattcccttgcacatgccctcttgcctgccaccatgtaagacgtgcctttgctgttctttcaccttctgccgtgattgcgaggcctctccagccacgtggaactgtgagtcgattaaacctctttcctttacacatgacccagtctcgggtatgtctttattagcagcatgagaatggactaatacagtgagcttaagctaagagaatattaggcatttgttgatttgtaatattattgtggaaaatgtaataataataataacaaattaaaagataacccatgagagaagaaaactttcaggctttgcctcgtccaacatktgctgcttgggagcctgtccagccaacactattttgaaggacagtgctcatgtgccctatgatactttttgactttttgtctctcatagctaatactgcttggtggcttctatagaccaaccttctgcctaacctgcttccgcatatctgatttataaaatctagattttatttttttttaaagtttgatatcaggcaccaaagggctatggcttaattgtaatatcacagaatgacgactactgctttttgtttttcatttatttgttcccccttctctcttttttctttttctttttttttacagattgtgtttattatttatttttaatttatttataaaagtttcatttttaattgacaaataatacttgcttatatttatagggtacaatggggtgtgttgataaatgaatatgttgcagatcgatcaaaccagaccaataaacgtatctatcacctcacatatttatcatttctttgtggtgagaacacttaaaa

SEQ ID NO: 552966 - DNA, 575 bp, Homo sapiens
aacctatgtacaatatcctgtcttctggaactattctctggtcaccttctgctttytttttttttttttttttttagcataaactataccatcaccgcttcggcttttttttagcaatcaccttcaggcattttatgaagattgcctccgcatgattcagcaacctgacatttttaagttttccattaaaaacaatgtaagttaaagaaaattaagccatccagcaaaatgttgtaaaacaatttcatcacgttgaccttaacttcctatattaacaaatatatttatgctcatgtttaaagcatttcacacgagagaataactgattttgaattttgctatgatctcataaacaaataactattaaatataaacctcttatttcaatatagacaaatgttgtatataattctcaaataatgagatatcactcagtaataatccataaacttaagtaacttctctgactctctgtttttctataagttaaaagggaataacactaccaataataatgtctattccagagaactcttaagatgattaaatgagttaatatttattaagaatctagc

SEQ ID NO: 552967 - DNA, 575 bp, Homo sapiens
aacctatgtacaatatcctgtcttctggaactattctctggtcaccttctgctttttttttttttttttttttttagcataaactataccatcaccgcttcggcttttttttagcaatcaccttcaggcattttatgaagattgcctccgcatgattcagcaacctgacatttttaagttttccattaaaaacaatgtaagttaaagaaaattaagccatccagcaaaatgttgtaaaacaatttcatcacgttgaccttaacttcytatattaacaaatatatttatgctcatgtttaaagcatttcacacgagagaataactgattttgaattttgctatgatctcataaacaaataactattaaatataaacctcttatttcaatatagacaaatgttgtatataattctcaaataatgagatatcactcagtaataatccataaacttaagtaacttctctgactctctgtttttctataagttaaaagggaataacactaccaataataatgtctattccagagaactcttaagatgattaaatgagttaatatttattaagaatctagc

SEQ ID NO: 552968 - DNA, 575 bp, Homo sapiens
aacctatgtacaatatcctgtcttctggaactattctctggtcaccttctgctttttttttttttttttttttttagcataaactataccatcaccgcttcggcttttttttagcaatcaccttcaggcattttatgaagattgcctccgcatgattcagcaacctgacatttttaagttttccattaaaaacaatgtaagttaaagaaaattaagccatccagcaaaatgttgtaaaacaatttcatcacgttgaccttaacttcctatattaacaaatatatttatgctcatgyttaaagcatttcacacgagagaataactgattttgaattttgctatgatctcataaacaaataactattaaatataaacctcttatttcaatatagacaaatgttgtatataattctcaaataatgagatatcactcagtaataatccataaacttaagtaacttctctgactctctgtttttctataagttaaaagggaataacactaccaataataatgtctattccagagaactcttaagatgattaaatgagttaatatttattaagaatctagc

SEQ ID NO: 552969 - DNA, 575 bp, Homo sapiens
aacctatgtacaatatcctgtcttctggaactattctctggtcaccttctgctttttttttttttttttttttttagcataaactataccatcaccgcttcggcttttttttagcaatcaccttcaggcattttatgaagattgcctccgcatgattcagcaacctgacatttttaagttttccattaaaaacaatgtaagttaaagaaaattaagccatccagcaaaatgttgtaaaacaatttcatcacgttgaccttaacttcctatattaacaaatatatttatgctcatgtttaaagcatttcacacgagagaataactgattttgaattttgctatgatctcataaacaaataactattaaatataaacctcttatttcaatatagacaaatgttgtatataattctcaaataatgagatatcactcagtaataatccataaacttaagtaacttctctgactctctgtttttctataagttaaaagggaataacamtaccaataataatgtctattccagagaactcttaagatgattaaatgagttaatatttattaagaatctagc

SEQ ID NO: 552970 - DNA, 571 bp, Homo sapiens
attggttcacccactttttttcataattcaaaataactgaaaggattatttttcttagaccttgtcaaaagaaatataccttatcacttagatgaagtatggaaaagttgaattttaaagycaaaagggttataaatgtcaaaagccctgaaaacataggaatataaagacagcttgaatccacacttttcattgcgtttccactgtaaacgctcctttcaacagtccatttgtatttcctggtcttattgttatgtccaagcctgtgctgtttggacacatattaagaagtcaatccatatttttttctgaaaaaaaaatgtagcataaactaaaggaaagtagcaaaatagtctaaggcaagggtagagttttaaaaaatcagtcatcttttttccctatgagtggactgtctattcatgaaataatttactcttatttcatatacacaaattctaatggtatggtgaaaattgctcttggagaccattctcacttcacttgaagggcactcattgatatgtggtaataagacagcaaagataaacgaccaagttttagctatatcatt

SEQ ID NO: 552971 - DNA, 562 bp, Homo sapiens
ctctccagagggtccagtgagagcaaaaccaggacatctgttcaacagtggaggacagtgctcatgtttctcgtactgggtatggaaaagaagctgacagcaatcatatgaccacaaggaaagcattttgaagctaaagaggccaggcaatcgatggagacacaaagaaatcccccaaaacatgggaacagagatccrctcgcactttgactaaagaccagtctatccttggactttctcgtttgtaagccaataaactccattcactgtttaagacctgtgagtctgattttccctatctaacaaccacttttctaaaccactaagccacttttaaactttttccaaaacaaaaaaaaagtttttttctcaatcactttacttaacaaaccaagtaccaatcagtactaaactataaactcaaaatatctatcctctcaattttgaaagtgtgtaaaaacttatctgacaaaatttctaagaaaaagatgatgacttccccactctgaagtagaaaacacaactttataaagagctttaagaagagaaaatatattgaaga

SEQ ID NO: 552972 - DNA, 551 bp, Homo sapiens
acaattctccccatttattcctcgacattgtattagtggtacctgagaggtggctcatggatgttaagaatacaaatatgagcaagaggacctcaagatgcaaacaatccaattgagaaaggagattataaacagcaaactgctactaaggctactgctgttgcagcagttgctgctgctactaataataaaaaartagaacgcctgtgccttgttccgaagagctgccttgcaaatgcacctaaaagggggagagaaccttttcttttagcaaaatataagcataagcaagttagtaattacatacacttctgttccattgtctgtaaagacacaaataattgctgcctcatggaatgattttcagggttaagatacatatgggaagtgtttagcattaagccacgagcaactaagagctcaatggatgggagctatctatttattgctctttactattcatgttagttgtattattggaggcataatgacacagtgaaagaggctctgcatccaagtaggtcacagcatcattgggggcttacaatatg

SEQ ID NO: 552973 - DNA, 606 bp, Homo sapiens
taccaaaaacatgtcttatattccctgaataagagttttttcccttatttctattttcaattacaatatgataattagaatttttaacttttaataatcttatcttctagtgaaaacccaggaagtgttgtgggctgtcctatatgagcattcaccagttcttaatttctagaaccgtgttttctcaactttttatatctattaatagactcaaatacatatagctttttatamaatacaaaaacaagatgccaaacatgtatatattctttaaacttatgttcagcaattaatgtttcagtattctaattttcttagaaatgactcagatgtttcgtgtctgttatttaatttaacaaaactttaaatctcgagccactgaaaaagatatttgaaactataacaagtttatcaacttgcatcctatttacattcacctaatttactcattccttttaaataaagctagccattagagtagttcaggaactttcaccccaaaataactcactttggtatattaactactttgagctttagctcaaaggcacttttaaaaatagcaaagtacgaggcatggcttgggcatagtggctcatgcctgta

SEQ ID NO: 552974 - DNA, 1494 bp, Homo sapiens
  misc_feature 692, 693, 694, 695, 696, 697, 698, 699, 700, 701, 702, 703,704, 705, 706, 707, 708, 709, 710, 711, 712, 713, 714, 715,716, 717, 718, 719, 720, 721, 722, 723, 724, 725, 726, 727,728, 729, 730, 731, 732, 733, 734, 735, 736, 737, 738: n = A,T,C or G
  misc_feature 739, 740, 741, 742, 743, 744, 745, 746, 747, 748, 749, 750,751, 752, 753, 754, 755, 756, 757, 758, 759, 760, 761, 762,763, 764, 765, 766, 767, 768, 769, 770, 771, 772, 773, 774,775, 776, 777, 778, 779, 780, 781, 782, 783, 784, 785: n = A,T,C or G
  misc_feature 786, 787, 788, 789, 790, 791: n = A,T,C or G
ttaaaataatattatgtattttgacttgagtatattactcaaaacagagccttgtatgtgggatagtgtaaaattcctgcttgttttaatatttttatgcacattaacatttgggaaaaacagcccttgccactttgtctccatatttgttgcctacagatgacctgaataaatttaactctctactttcttcaagtgtgaagccatcagcactgctaataagtgatgagcatggcagatagtcccttctgtcaacagcaagctgcttaaattaaaaccactcatttccatctgaggccaccctcatccacgtgggatattcagctttctctctcagccaggttttcagactcaaacctgcaagtcacttgcattgattttgtcttgtttgccaatttacatgtaactttggcccctggacttccagtaatgacaacaacattatgctttgatgctatccattttcttgatttatgtgggaatacttttctgattgtctctaagactcattatataaggtgtgtgtagcccagtcaattggcaagggtaccaagatatcaatgggattgcagagttttccttctctggttattccctgcaagtgatgaaaaaaaaatatgcattttctcctagtgctctttcctaaaattccaagtgaaatataaaatactttcatttgtttttgccaactnnnnnnnnnnnnnnnnnnnnnnnnnnnnnnnnnnnnnnnnnnnnnnnnnnnnnnnnnnnnnnnnnnnnnnnnnnnnnnnnnnnnnnnnnnnnnnnnnnnnttcaatgccagcattccagcatttgggatggtagcttttattaagatcttaatgtgtcaatctcaaaaaaatgcaaacacatgcaggtttcagtggaaaagttaaagttaaatyaaaaacaaattacctttttttacctacagaagtgagttgtaagcatttgtaaggaaagcacacattgctgaaaggaaggaaatgcagcagaagatgaaaactagattggctcaacgttttgcttgggagtggatgtttttgtaaaatatgcagaagcccagattggtttgtctaagttatttctggtagcatttaatcttgtcaagtttcctttggaaagtttaacagttgacatctacagcaggaagagtgacagaaattgtatttttttttttttactgctgatgatattcttttcttttctctgtatttcattaatttgttagagatttttattttatgtaaaaagaaccatgttgagccttttagaaaaaggatgtaagaatattgtttgttcctaatcgcaatatgcttttaatagagtaatatcaactggtccatctgtctatggagaagaacaagagaaatcgctttagtgtgtaatttgtttctttggcacatgttatcaacagtgactgtatcacaactatccagtaggcacacaattagtttcttttgatttttgttatacttcagctcatttagcaat

SEQ ID NO: 552975 - DNA, 1494 bp, Homo sapiens
  misc_feature 692, 693, 694, 695, 696, 697, 698, 699, 700, 701, 702, 703,704, 705, 706, 707, 708, 709, 710, 711, 712, 713, 714, 715,716, 717, 718, 719, 720, 721, 722, 723, 724, 725, 726, 727,728, 729, 730, 731, 732, 733, 734, 735, 736, 737, 738: n = A,T,C or G
  misc_feature 739, 740, 741, 742, 743, 744, 745, 746, 747, 748, 749, 750,751, 752, 753, 754, 755, 756, 757, 758, 759, 760, 761, 762,763, 764, 765, 766, 767, 768, 769, 770, 771, 772, 773, 774,775, 776, 777, 778, 779, 780, 781, 782, 783, 784, 785: n = A,T,C or G
  misc_feature 786, 787, 788, 789, 790, 791: n = A,T,C or G
ttaaaataatattatgtattttgacttgagtatattactcaaaacagagccttgtatgtgggatagtgtaaaattcctgcttgttttaatatttttatgcacattaacatttgggaaaaacagcccttgccactttgtctccatatttgttgcctacagatgacctgaataaatttaactctctactttcttcaagtgtgaagccatcagcactgctaataagtgatgagcatggcagatagtcccttctgtcaacagcaagctgcttaaattaaaaccactcatttccatctgaggccaccctcatccacgtgggatattcagctttctctctcagccaggttttcagactcaaacctgcaagtcacttgcattgattttgtcttgtttgccaatttacatgtaactttggcccctggacttccagtaatgacaacaacattatgctttgatgctatccattttcttgatttatgtgggaatacttttctgattgtctctaagactcattatataaggtgtgtgtagcccagtcaattggcaagggtaccaagatatcaatgggattgcagagttttccttctctggttattccctgcaagtgatgaaaaaaaaatatgcattttctcctagtgctctttcctaaaattccaagtgaaatataaaatactttcatttgtttttgccaactnnnnnnnnnnnnnnnnnnnnnnnnnnnnnnnnnnnnnnnnnnnnnnnnnnnnnnnnnnnnnnnnnnnnnnnnnnnnnnnnnnnnnnnnnnnnnnnnnnnnttcaatgccagcattccagcatttgggatggtagcttttattaagatcttaatgtgtcaatctcaaaaaaatgcaaacacatgcaggtttcagtggaaaagttaaagttaaattaaaaacaaattacctttttttacctacagaagtgagttgtaagcatttgtaaggaaagcacacattgctgaaaggaaggaaatgcagcagaagatgaaaactagattggctcaacgttttgcttgggagtggatgtttttgtaaaatatgcagaagcccagattggtttgtctaagttatttctggtagcatttaatcttgtcaagtttccttkggaaagtttaacagttgacatctacagcaggaagagtgacagaaattgtatttttttttttttactgctgatgatattcttttcttttctctgtatttcattaatttgttagagatttttattttatgtaaaaagaaccatgttgagccttttagaaaaaggatgtaagaatattgtttgttcctaatcgcaatatgcttttaatagagtaatatcaactggtccatctgtctatggagaagaacaagagaaatcgctttagtgtgtaatttgtttctttggcacatgttatcaacagtgactgtatcacaactatccagtaggcacacaattagtttcttttgatttttgttatacttcagctcatttagcaat

SEQ ID NO: 552976 - DNA, 1494 bp, Homo sapiens
  misc_feature 692, 693, 694, 695, 696, 697, 698, 699, 700, 701, 702, 703,704, 705, 706, 707, 708, 709, 710, 711, 712, 713, 714, 715,716, 717, 718, 719, 720, 721, 722, 723, 724, 725, 726, 727,728, 729, 730, 731, 732, 733, 734, 735, 736, 737, 738: n = A,T,C or G
  misc_feature 739, 740, 741, 742, 743, 744, 745, 746, 747, 748, 749, 750,751, 752, 753, 754, 755, 756, 757, 758, 759, 760, 761, 762,763, 764, 765, 766, 767, 768, 769, 770, 771, 772, 773, 774,775, 776, 777, 778, 779, 780, 781, 782, 783, 784, 785: n = A,T,C or G
  misc_feature 786, 787, 788, 789, 790, 791: n = A,T,C or G
ttaaaataatattatgtattttgacttgagtatattactcaaaacagagccttgtatgtgggatagtgtaaaattcctgcttgttttaatatttttatgcacattaacatttgggaaaaacagcccttgccactttgtctccatatttgttgcctacagatgacctgaataaatttaactctctactttcttcaagtgtgaagccatcagcactgctaataagtgatgagcatggcagatagtcccttctgtcaacagcaagctgcttaaattaaaaccactcatttccatctgaggccaccctcatccacgtgggatattcagctttctctctcagccaggttttcagactcaaacctgcaagtcacttgcattgattttgtcttgtttgccaatttacatgtaactttggcccctggacttccagtaatgacaacaacattatgctttgatgctatccattttcttgatttatgtgggaatacttttctgattgtctctaagactcattatataaggtgtgtgtagcccagtcaattggcaagggtaccaagatatcaatgggattgcagagttttccttctctggttattccctgcaagtgatgaaaaaaaaatatgcattttctcctagtgctctttcctaaaattccaagtgaaatataaaatactttcatttgtttttgccaactnnnnnnnnnnnnnnnnnnnnnnnnnnnnnnnnnnnnnnnnnnnnnnnnnnnnnnnnnnnnnnnnnnnnnnnnnnnnnnnnnnnnnnnnnnnnnnnnnnnnttcaatgccagcattccagcatttgggatggtagcttttattaagatcttaatgtgtcaatctcaaaaaaatgcaaacacatgcaggtttcagtggaaaagttaaagttaaattaaaaacaaattacctttttttacctacagaagtgagttgtaagcatttgtaaggaaagcacacattgctgaaaggaaggaaatgcagcagaagatgaaaactagattggctcaacgttttgcttgggagtggatgtttttgtaaaatatgcagaagcccagattggtttgtctaagttatttctggtagcatttaatcttgtcaagtttcctttggaaagtttaacagttgacatctacagcaggaagagtgacagaaattgtatttttttttttttactsctgatgatattcttttcttttctctgtatttcattaatttgttagagatttttattttatgtaaaaagaaccatgttgagccttttagaaaaaggatgtaagaatattgtttgttcctaatcgcaatatgcttttaatagagtaatatcaactggtccatctgtctatggagaagaacaagagaaatcgctttagtgtgtaatttgtttctttggcacatgttatcaacagtgactgtatcacaactatccagtaggcacacaattagtttcttttgatttttgttatacttcagctcatttagcaat

SEQ ID NO: 552977 - DNA, 610 bp, Homo sapiens
  misc_feature 247, 249: n = A,T,C or G
tcccacactaaagatggggaaagaaagtgtaggagatcagtaagtaaattcagattataaaacaagaaattagaagattagaatttcaacctgaatgtttcactcagcttttcccctttccatgtggtcctatttgtttagaaaaaatgtgacaagtctttatatttttaaaaggcctttaaaatccatataggatttaggtcctatatttttaaggtttttttttttttttttttttttttttttnantaaatactatagatctctcagaattccttctgtaaccgaatagttatcagattactatcaacctgcaagtctgtgactcctgtataccactgggagccattaggtgctagatgtgctatttttcattcattctttgagttagtgtttagagtccaccatgtgctacacattgcatcaggtcttgagacacaaagtccctggtctcatatggttaaccagttttatttaaaaactttttttttaaacatacagaaactttaacttcatttcctcatttttacttaaagcttaattttataaaacacacaaacacacaaaaatgtkaagagttctgtatcacaagaaattaaatggtataaat

SEQ ID NO: 552978 - DNA, 644 bp, Homo sapiens
ttggagaaatttaaatagttaacaaatactggtattacagtggttccccctcattccatttaacatggtttcagttattcgcagtaatagcatctgaaaataggtgagtacggtaaaataagatgttttcagagaaggagaccacattcacataatttttattacaatatattgttatagttgttctaatgttactctcgtactgtgactaatttacaaattatactttatcatacgtatatatgtctggaaaaaagcctacatatataatatagaacatatatatataacatataacatatatataacatataacatatatataatacataacatataatatataatatataacatatatatakagagagagagagcgagagagagaacgcatttgatactatctgccgtttcaggcgtctactgaatatcttgtaacatatcacccatggataaggggggactgctatattattaaggaattagttttcgtatttaagttgtgacaataaaattgcagatatgttttctagaagattttttcataagtatatagaaatatttagaggtgaaataatatacacattggaatgttttaaaaataatagagcaggcagtgtgggggtacaaataaatcaagactg

SEQ ID NO: 552979 - DNA, 644 bp, Homo sapiens
ttggagaaatttaaatagttaacaaatactggtattacagtggttccccctcattccatttaacatggtttcagttattcgcagtaatagcatctgaaaataggtgagtacggtaaaataagatgttttcagagaaggagaccacattcacataatttttattacaatatattgttatagttgttctaatgttactctcgtactgtgactaatttacaaattatactttatcatacgtatatatgtctggaaaaaagcctacatatataatatagaacatatatatataacatataacatatatataacatataacatatatataatacataacatataatatataatatataacatatatatatagagagagagagcgagagagagaacgcatttgatactatctgccgtttcaggcgtctactgaatatcttgtaacayatcacccatggataaggggggactgctatattattaaggaattagttttcgtatttaagttgtgacaataaaattgcagatatgttttctagaagattttttcataagtatatagaaatatttagaggtgaaataatatacacattggaatgttttaaaaataatagagcaggcagtgtgggggtacaaataaatcaagactg

SEQ ID NO: 552980 - DNA, 791 bp, Homo sapiens
tcgattaaagttagtaagaaaaaaaggcttgattttccttgaagtgtcagagagtatatggctccctgactctgatgaggagcgaaacatccctggttttgctatgggcctaaaacctaaattcctaagatcagaattctaagtccttctccaactcacccactgtagagtagagccttcactctatttctgtgaccatggatgtgtggtggagcattagtcctgggacagaaagtccctgcgttgttcccaggcagggctgaatgaggaccctggacagtagtgaaatacatgtgggagtttgagtccaatggccttctagcgccttgctccctgcagacatctgattgtccctgtgagtacttgggctatagggagacattctagttctgcaacagccaaggggcaagacctcagtaaagaagtgacacacctgatgaagacatttcctaaaatgtaagagaagaagtgagttaatttacattgctctggaagtcgttattgatcaacacagagtcacactgctgacatgtttgaagcatcttttggggctataaagatgaaatttatttcatcggcaggaacatttcataatcaatattggaggccacttgcagatactattttagccacaaaggcaaagtggatttgatttgagcctgtctctaggttaagtggtttgctrttgagatataataagtttccctgatgtagggatttaatttttaaaatatcaactatatttaaaaattatttcaaaatatccacatatatatatagatcttatagca

SEQ ID NO: 552981 - DNA, 712 bp, Homo sapiens
agaggtttagagttatcatttaatcaagccaagacttgtcattgaaaaattatgtgtgcagagccctgtgttaaatacagcaaggaatacagaaatggaaaatgtggggatgggcaygctggctcattcctataatcccagcactttgggaggccaagacaggcaggtcacatgaggccaggagttcaagactggcctggccaacatggtgaaaccctgtctctactaaaaattcaaaaattagctgggcgttgtggcactcgcctgtaatcccatctacttggtagactgaggcatgagaattgtttgagcctgggaggtggaggtagcagtgagctgagattgtgtcactgaactccagcctgggtgacagagcaagactctgtctcaaaaaaagagaagagaagaaaagaaaaaggtgtgaattctgccttccaggagcttcaggctggtaagagagtaagacctacataaataacctgttaaagggcagagtagttacgaccaagacagagacccaagcagtgtgctatggaagtagaagacagggagagatctatttcatttagggagctcgggtaaagctcattagaggaaacggcattgaaacagggatctcacagacttttaccagactgaaggtggggattagggtaaaatgagtgggacacttgactgggttacagcatgtacaggagtgccaaaaaaaact

SEQ ID NO: 552982 - DNA, 1042 bp, Homo sapiens
attagtgagagggatgttttagtgaggtcaccagcctgggccaggtctaggaggaagacagggaagagttaccacaggtctgacatgacccctttgtcccaaagctggggcttatatgttaatcacaacttggctcctgtcctggctcagtgagttgagcttctctggggkcccctgcaccctggccctcctgcctctccaatccccggtgctgctcttttcccatcacaggtgggcagggagctgtgtgaacgcccgccccggagacacttttctggtcttctcctctctcccgctcctcttgtgtcctacccttgccccaggtcttctcctgcctgcatctccccggacccccgtctacactaaccttccccaccgcagaggccttgtcatctgccccttatgtgccccctatgctgccttgcattatcaatttcctcgtaacatgtcccttctgtctcccaccacctgagcagcagccctctgggcctaggctgtgggcccgggatggtagggaaggttgtcaagggggcaccaggtaggctggaaccaagaaggctggacagatggccatgatggtgactgcacctgccccaccagggggccctggggcagtggcaattgtagccatgctggtcttttgccaggaggccatatgcagtagacccaggagttggctggtgaggtgagcagacggtagggcatgcagtttgggtggggaggggctctcttttggagaggacgctctgactctacatggacacctgtccctgggtcccttttcctctcatttcacagataaggtcccggggtaggcgatgggggcaggggccagctgaagcctgtctgaccccgggggcccctttcccactgccctgtgctgccttcctcacccccttcgctggtggaagggacgtcatctttcctgttccaaggggagaagtcccagggagctgccacaccgcagcgaggggagaggagggcagatacacgtggctctagagggcgtgagaaatggcattctttattcataaataaaaac
